United States Patent Application Publication US 2026/0226133 A1 - sequence listing, part 17

SEQ ID NO: 38026 - DNA, 3480 bp, synthetic construct
  source 1..3480: mol_type = other DNA
atggccttaccagtgaccgccttgctcctgccgctggccttgctgctccacgccgccaggccggacatccagttgacccagtcccccagctcactcagcgccagtgtgggggaccgggtgaccattacctgtaaagccagtcagagtgtggactatgagggggatagcttcctgaattggtatcagcagaagcctggcaaagccccaaagctgctgatctacgctgcatctaatctggagtcaggcgtgccttctaggttctccggtagtgggtctgggaccgatttcacattgaccatttcatccctccaacccgaggatttcgctacatattactgtcagcagtccaatgaggaccctctcacctttggccagggcaccaaagttgaaattaagagactcgaggacctgaagaacgtgttcccacctgaggtggccgtgttcgagcctagcgaggccgagatcagccacacccagaaagccaccctcgtgtgcctggctaccggcttctaccccgaccatgtggaactgtcttggtgggtcaacggcaaagaggtgcacagcggcgtgtgtaccgacccccagccactgaaagaacagcccgccctgaacgacagccggtactgcctgagcagcagactgagagtgtccgccaccttctggcagaacccccggaaccacttcagatgccaggtgcagttctacggcctgagcgagaacgacgagtggacccaggacagagccaagcccgtgacccagatcgtgtctgccgaagcctggggcagagccgattgcgacgtgaagctggtggaaaagagcttcgagacagacaccaacctgaacttccagaacctgagcgtgatcggcttcagaatcctgctgctgaaagtggccggctttaacctgctgatgaccctgcggctgtggtccagcagggccaagcgatctggatctggagcaacaaacttctcactactcaaacaagcaggtgacgtggaggagaatcccgggcctactagtaccatggactggatttggcgcatccttttccttgtcggcgctgctaccggcgcccattccctgttcaatcaagaggtgcagatccctctgaccgagagctactgtggcccctgtcctaagaactggatctgctacaagaacaactgctaccagttcttcgacgagagcaagaattggtacgagagccaggccagctgcatgagccagaatgccagcctgctgaaggtgtacagcaaagaggaccaggacctgctgaaactggtcaagagcgcccactggatgggccttgtgcacatccccaccaatggctcttggcagtgggaggacggcagcattctgagccctaacctgctgaccatcatcgagatgcagaagggcgactgcgccctgtacgccagcagctttaagggctacatcgagaattgcagcaccccgaacacctacatctgtatgcagagaaccgtttctggcggaggcggctctggaggaggcggaagtggcggcggaggcgacctctttaatcaagaagtccagattccactcaccgaatcctactgcggaccttgtccaaaaaattggatttgttataagaacaactgttatcaattctttgatgagtctaaaaattggtatgagtcccaggcttcctgcatgtctcagaacgcttctctgctgaaagtctactctaaagaagatcaggatctcctgaagctcgtcaagtctgcccattggatggggctcgtccacattcctaccaacggaagctggcaatgggaagatggctccatcctgtctccaaatctgctcacgattattgaaatgcagaaaggggattgtgctctctacgccagctccttcaagggatatattgagaactgtagcacgcccaatacttatatctgtatgcaacggaccgtgggatccggcggcggaggatctggcggaggcggatctgggggcggaggctctttcgaagaagtccaacttgtggagtctggagggggcctggtgcagcccggcggctctctcagactgtcttgtgcggcaagcggctacaccttcacctcttactggatagaatgggtgaggcaggcacctggaaagggactggagtggattggagagattctgccaggagggggagatacaaattacaatgaaatcttcaaggggcgggccaccttttcagcggataccagcaagaatacagcttacctgcagatgaatagcctccgggcagaagataccgctgtttattattgcacgagacgggtgccaataagactggactattgggggcaagggactcttgtcaccgtcagttcaacgcgtatccagaaccctgatcctgccgtgtaccagctgcgggatagcaagagcagcgacaagagcgtgtgtctgttcaccgacttcgacagccagaccaacgtgtcccagagcaaggactccgacgtgtacatcaccgataagtgcgtgctggacatgcggagcatggacttcaagagcaactccgccgtggcctggtccaacaagtccgatttcgcctgcgccaacgccttcaacaacagcattatccccgaggacacattcttcccaagccccgagagcagctgcggctttaccagcgagagctaccagcagggcgtgctgagcgccaccatcctgtacgagatcctgctgggcaaggccaccctgtacgccgtgctggtgtctgccctggtgctgatggctatggtcaagcggaaggacagccggggacgcgccaagagaagcggatctggcgtgaagcagaccctgaatttcgacctgctgaagctggctggcgacgtggaatccaacccaggcccttctagaggccatatgaccgagtacaagcccacggtgcgcctcgccacccgcgacgacgtccccagggccgtacgcaccctcgccgccgcgttcgccgactaccccgccacgcgccacaccgtcgatccggaccgccacatcgagcgggtcaccgagctgcaagaactcttcctcacgcgcgtcgggctcgacatcggcaaggtgtgggtcgcggacgacggcgccgcggtggcggtctggaccacgccggagagcgtcgaagcgggggcggtgttcgccgagatcggcccgcgcatggccgagttgagcggttcccggctggccgcgcagcaacagatggaaggcctcctggcgccgcaccggcccaaggagcccgcgtggttcctggccaccgtcggcgtctcgcccgaccaccagggcaagggtctgggcagcgccgtcgtgctccccggagtggaggcggccgagcgcgccggggtgcccgccttcctggagacctccgcgccccgcaacctccccttctacgagcggctcggcttcaccgtcaccgccgacgtcgaggtgcccgaaggaccgcgcacctggtgcatgacccgcaagcccggtgcctga

SEQ ID NO: 38027 - DNA, 1866 bp, synthetic construct
  source 1..1866: mol_type = other DNA
atggccttaccagtgaccgccttgctcctgccgctggccttgctgctccacgccgccaggccggacatccagttgacccagtcccccagctcactcagcgccagtgtgggggaccgggtgaccattacctgtaaagccagtcagagtgtggactatgagggggatagcttcctgaattggtatcagcagaagcctggcaaagccccaaagctgctgatctacgctgcatctaatctggagtcaggcgtgccttctaggttctccggtagtgggtctgggaccgatttcacattgaccatttcatccctccaacccgaggatttcgctacatattactgtcagcagtccaatgaggaccctctcacctttggccagggcaccaaagttgaaattaagagactcgaggacctgaagaacgtgttcccacctgaggtggccgtgttcgagcctagcgaggccgagatcagccacacccagaaagccaccctcgtgtgcctggctaccggcttctaccccgaccatgtggaactgtcttggtgggtcaacggcaaagaggtgcacagcggcgtgtgtaccgacccccagccactgaaagaacagcccgccctgaacgacagccggtactgcctgagcagcagactgagagtgtccgccaccttctggcagaacccccggaaccacttcagatgccaggtgcagttctacggcctgagcgagaacgacgagtggacccaggacagagccaagcccgtgacccagatcgtgtctgccgaagcctggggcagagccgattgcggctttaccagcgagagctaccagcagggcgtgctgagcgccaccaacctgagcgtgatcggcttcagaatcctgctgctgaaagtggccggctttaacctgctgatgaccctgcggctgtggtccagcagggccaagcgatctggatctggagcaacaaacttctcactactcaaacaagcaggtgacgtggaggagaatcccgggcctactagtatggactggatttggcgcatccttttccttgtcggcgctgctaccggcgcgcattccttcgaagaagtccaacttgtggagtctggagggggcctggtgcagcccggcggctctctcagactgtcttgtgcggcaagcggctacaccttcacctcttactggatagaatgggtgaggcaggcacctggaaagggactggagtggattggagagattctgccaggagggggagatacaaattacaatgaaatcttcaaggggcgggccaccttttcagcggataccagcaagaatacagcttacctgcagatgaatagcctccgggcagaagataccgctgtttattattgcacgagacgggtgccaataagactggactattgggggcaagggactcttgtcaccgtcagttcaacgcgtatccagaaccctgatcctgccgtgtaccagctgcgggatagcaagagcagcgacaagagcgtgtgtctgttcaccgacttcgacagccagaccaacgtgtcccagagcaaggactccgacgtgtacatcaccgataagtgcgtgctggacatgcggagcatggacttcaagagcaactccgccgtggcctggtccaacaagtccgatttcgcctgcgccaacgccttcaacaacagcattatccccgaggacacattcttcccaagccccgagagcagctgcgacgtgaagctggtggaaaagagcttcgagacagacaccaacctgaacttccagatcctgtacgagatcctgctgggcaaggccaccctgtacgccgtgctggtgtctgccctggtgctgatggctatggtcaagcggaaggacagccgggga

SEQ ID NO: 38028 - DNA, 1878 bp, synthetic construct
  source 1..1878: mol_type = other DNA
atggccttaccagtgaccgccttgctcctgccgctggccttgctgctccacgccgccaggccggacatccagttgacccagtcccccagctcactcagcgccagtgtgggggaccgggtgaccattacctgtaaagccagtcagagtgtggactatgagggggatagcttcctgaattggtatcagcagaagcctggcaaagccccaaagctgctgatctacgctgcatctaatctggagtcaggcgtgccttctaggttctccggtagtgggtctgggaccgatttcacattgaccatttcatccctccaacccgaggatttcgctacatattactgtcagcagtccaatgaggaccctctcacctttggccagggcaccaaagttgaaattaagagactcgagatccagaaccctgatcctgccgtgtaccagctgcgggatagcaagagcagcgacaagagcgtgtgtctgttcaccgacttcgacagccagaccaacgtgtcccagagcaaggactccgacgtgtacatcaccgataagtgcgtgctggacatgcggagcatggacttcaagagcaactccgccgtggcctggtccaacaagtccgatttcgcctgcgccaacgccttcaacaacagcattatccccgaggacacattcttcccaagccccgagagcagctgcgacgtgaagctggtggaaaagagcttcgagacagacaccaacctgaacttccagatcctgtacgagatcctgctgggcaaggccaccctgtacgccgtgctggtgtctgccctggtgctgatggctatggtcaagcggaaggacagccggggacgcgccaagagaagcggatctggcgtgaagcagaccctgaatttcgacctgctgaagctggctggcgacgtggaatccaacccaggccctactagtatggactggatttggcgcatccttttccttgtcggcgctgctaccggcgcgcattccttcgaagaagtccaacttgtggagtctggagggggcctggtgcagcccggcggctctctcagactgtcttgtgcggcaagcggctacaccttcacctcttactggatagaatgggtgaggcaggcacctggaaagggactggagtggattggagagattctgccaggagggggagatacaaattacaatgaaatcttcaaggggcgggccaccttttcagcggataccagcaagaatacagcttacctgcagatgaatagcctccgggcagaagataccgctgtttattattgcacgagacgggtgccaataagactggactattgggggcaagggactcttgtcaccgtcagttcaacgcgtgaggacctgaagaacgtgttcccacctgaggtggccgtgttcgagcctagcgaggccgagatcagccacacccagaaagccaccctcgtgtgcctggctaccggcttctaccccgaccatgtggaactgtcttggtgggtcaacggcaaagaggtgcacagcggcgtgtgtaccgacccccagccactgaaagaacagcccgccctgaacgacagccggtactgcctgagcagcagactgagagtgtccgccaccttctggcagaacccccggaaccacttcagatgccaggtgcagttctacggcctgagcgagaacgacgagtggacccaggacagagccaagcccgtgacccagatcgtgtctgccgaagcctggggcagagccgattgcggctttaccagcgagagctaccagcagggcgtgctgagcgccaccaacctgagcgtgatcggcttcagaatcctgctgctgaaagtggccggctttaacctgctgatgaccctgcggctgtggtccagc

SEQ ID NO: 38029 - DNA, 2271 bp, synthetic construct
  source 1..2271: mol_type = other DNA
atggccttaccagtgaccgccttgctcctgccgctggccttgctgctccacgccgccaggccggaagtgcagctggttgaatctggcggaggactggttcagcctggcggatctctgagactgtcttgtgccgccagcggcttcagcttcagcgacttttggatgagctgggtccgacaggcccctggcaaaggacttgaatgggtcgccacaatcagccaggccggcagcgagaaggactacgtggactctgtgaagggcagattcaccatcagccgggacaacgccaagaagtccctgtacctccagatgaacagcctgagagccgaggacaccgccgtgtactattgtgcctctggcgtgtacagcttcgactacagaggccagggcaccctggtcacagtctcttctggtaccggcggaggcggatctggcggcggaggtagcggtggcggaggatctgaattcgacatccagttgacccagtcccccagctcactcagcgccagtgtgggggaccgggtgaccattacctgtaaagccagtcagagtgtggactatgagggggatagcttcctgaattggtatcagcagaagcctggcaaagccccaaagctgctgatctacgctgcatctaatctggagtcaggcgtgccttctaggttctccggtagtgggtctgggaccgatttcacattgaccatttcatccctccaacccgaggatttcgctacatattactgtcagcagtccaatgaggaccctctcacctttggccagggcaccaaagttgaaattaagagactcgaggacctgaagaacgtgttcccacctgaggtggccgtgttcgagcctagcgaggccgagatcagccacacccagaaagccaccctcgtgtgcctggctaccggcttctaccccgaccatgtggaactgtcttggtgggtcaacggcaaagaggtgcacagcggcgtgtgtaccgacccccagccactgaaagaacagcccgccctgaacgacagccggtactgcctgagcagcagactgagagtgtccgccaccttctggcagaacccccggaaccacttcagatgccaggtgcagttctacggcctgagcgagaacgacgagtggacccaggacagagccaagcccgtgacccagatcgtgtctgccgaagcctggggcagagccgattgcggctttaccagcgagagctaccagcagggcgtgctgagcgccaccaacctgagcgtgatcggcttcagaatcctgctgctgaaagtggccggctttaacctgctgatgaccctgcggctgtggtccagcagggccaagcgatctggatctggagcaacaaacttctcactactcaaacaagcaggtgacgtggaggagaatcccgggcctactagtatggactggatttggcgcatccttttccttgtcggcgctgctaccggcgcgcattccttcgaagaagtccaacttgtggagtctggagggggcctggtgcagcccggcggctctctcagactgtcttgtgcggcaagcggctacaccttcacctcttactggatagaatgggtgaggcaggcacctggaaagggactggagtggattggagagattctgccaggagggggagatacaaattacaatgaaatcttcaaggggcgggccaccttttcagcggataccagcaagaatacagcttacctgcagatgaatagcctccgggcagaagataccgctgtttattattgcacgagacgggtgccaataagactggactattgggggcaagggactcttgtcaccgtcagttcaacgcgtatccagaaccctgatcctgccgtgtaccagctgcgggatagcaagagcagcgacaagagcgtgtgtctgttcaccgacttcgacagccagaccaacgtgtcccagagcaaggactccgacgtgtacatcaccgataagtgcgtgctggacatgcggagcatggacttcaagagcaactccgccgtggcctggtccaacaagtccgatttcgcctgcgccaacgccttcaacaacagcattatccccgaggacacattcttcccaagccccgagagcagctgcgacgtgaagctggtggaaaagagcttcgagacagacaccaacctgaacttccagatcctgtacgagatcctgctgggcaaggccaccctgtacgccgtgctggtgtctgccctggtgctgatggctatggtcaagcggaaggacagccgggga

SEQ ID NO: 38030 - DNA, 2283 bp, synthetic construct
  source 1..2283: mol_type = other DNA
atggccttaccagtgaccgccttgctcctgccgctggccttgctgctccacgccgccaggccggaagtgcagctggttgaatctggcggaggactggttcagcctggcggatctctgagactgtcttgtgccgccagcggcttcagcttcagcgacttttggatgagctgggtccgacaggcccctggcaaaggacttgaatgggtcgccacaatcagccaggccggcagcgagaaggactacgtggactctgtgaagggcagattcaccatcagccgggacaacgccaagaagtccctgtacctccagatgaacagcctgagagccgaggacaccgccgtgtactattgtgcctctggcgtgtacagcttcgactacagaggccagggcaccctggtcacagtctcttctggtaccggcggaggcggatctggcggcggaggtagcggtggcggaggatctgaattcgacatccagttgacccagtcccccagctcactcagcgccagtgtgggggaccgggtgaccattacctgtaaagccagtcagagtgtggactatgagggggatagcttcctgaattggtatcagcagaagcctggcaaagccccaaagctgctgatctacgctgcatctaatctggagtcaggcgtgccttctaggttctccggtagtgggtctgggaccgatttcacattgaccatttcatccctccaacccgaggatttcgctacatattactgtcagcagtccaatgaggaccctctcacctttggccagggcaccaaagttgaaattaagagactcgagatccagaaccctgatcctgccgtgtaccagctgcgggatagcaagagcagcgacaagagcgtgtgtctgttcaccgacttcgacagccagaccaacgtgtcccagagcaaggactccgacgtgtacatcaccgataagtgcgtgctggacatgcggagcatggacttcaagagcaactccgccgtggcctggtccaacaagtccgatttcgcctgcgccaacgccttcaacaacagcattatccccgaggacacattcttcccaagccccgagagcagctgcgacgtgaagctggtggaaaagagcttcgagacagacaccaacctgaacttccagatcctgtacgagatcctgctgggcaaggccaccctgtacgccgtgctggtgtctgccctggtgctgatggctatggtcaagcggaaggacagccggggacgcgccaagagaagcggatctggcgtgaagcagaccctgaatttcgacctgctgaagctggctggcgacgtggaatccaacccaggccctactagtatggactggatttggcgcatccttttccttgtcggcgctgctaccggcgcgcattccttcgaagaagtccaacttgtggagtctggagggggcctggtgcagcccggcggctctctcagactgtcttgtgcggcaagcggctacaccttcacctcttactggatagaatgggtgaggcaggcacctggaaagggactggagtggattggagagattctgccaggagggggagatacaaattacaatgaaatcttcaaggggcgggccaccttttcagcggataccagcaagaatacagcttacctgcagatgaatagcctccgggcagaagataccgctgtttattattgcacgagacgggtgccaataagactggactattgggggcaagggactcttgtcaccgtcagttcaacgcgtgaggacctgaagaacgtgttcccacctgaggtggccgtgttcgagcctagcgaggccgagatcagccacacccagaaagccaccctcgtgtgcctggctaccggcttctaccccgaccatgtggaactgtcttggtgggtcaacggcaaagaggtgcacagcggcgtgtgtaccgacccccagccactgaaagaacagcccgccctgaacgacagccggtactgcctgagcagcagactgagagtgtccgccaccttctggcagaacccccggaaccacttcagatgccaggtgcagttctacggcctgagcgagaacgacgagtggacccaggacagagccaagcccgtgacccagatcgtgtctgccgaagcctggggcagagccgattgcggctttaccagcgagagctaccagcagggcgtgctgagcgccaccaacctgagcgtgatcggcttcagaatcctgctgctgaaagtggccggctttaacctgctgatgaccctgcggctgtggtccagc

SEQ ID NO: 38031 - DNA, 2682 bp, synthetic construct
  source 1..2682: mol_type = other DNA
atggccttaccagtgaccgccttgctcctgccgctggccttgctgctccacgccgccaggccggaagtgcagctggttgaatctggcggaggactggttcagcctggcggatctctgagactgtcttgtgccgccagcggcttcagcttcagcgacttttggatgagctgggtccgacaggcccctggcaaaggacttgaatgggtcgccacaatcagccaggccggcagcgagaaggactacgtggactctgtgaagggcagattcaccatcagccgggacaacgccaagaagtccctgtacctccagatgaacagcctgagagccgaggacaccgccgtgtactattgtgcctctggcgtgtacagcttcgactacagaggccagggcaccctggtcacagtctcttctggtaccggcggaggcggatctggcggcggaggtagcggtggcggaggatctgaattcgacatccagttgacccagtcccccagctcactcagcgccagtgtgggggaccgggtgaccattacctgtaaagccagtcagagtgtggactatgagggggatagcttcctgaattggtatcagcagaagcctggcaaagccccaaagctgctgatctacgctgcatctaatctggagtcaggcgtgccttctaggttctccggtagtgggtctgggaccgatttcacattgaccatttcatccctccaacccgaggatttcgctacatattactgtcagcagtccaatgaggaccctctcacctttggccagggcaccaaagttgaaattaagagactcgaggacctgaagaacgtgttcccacctgaggtggccgtgttcgagcctagcgaggccgagatcagccacacccagaaagccaccctcgtgtgcctggctaccggcttctaccccgaccatgtggaactgtcttggtgggtcaacggcaaagaggtgcacagcggcgtgtgtaccgacccccagccactgaaagaacagcccgccctgaacgacagccggtactgcctgagcagcagactgagagtgtccgccaccttctggcagaacccccggaaccacttcagatgccaggtgcagttctacggcctgagcgagaacgacgagtggacccaggacagagccaagcccgtgacccagatcgtgtctgccgaagcctggggcagagccgattgcggctttaccagcgagagctaccagcagggcgtgctgagcgccaccaacctgagcgtgatcggcttcagaatcctgctgctgaaagtggccggctttaacctgctgatgaccctgcggctgtggtccagcagggccaagcgatctggatctggagcaacaaacttctcactactcaaacaagcaggtgacgtggaggagaatcccgggcctactagtatggactggatttggcgcatccttttccttgtcggcgctgctaccggcgcgcattccgggccccagctccagctgcaagagtctggacctggcctggtcaagcctagcgagacactgagcctgacctgtaccgtgtccggcgatagcatcagcagcggcgattactactggggctggatcagacagcctcctggcaaaggactggaatggatcggccacatctactacagcggcgtgacctactacaaccccagcctgaagtccagagtgaccatcagcgtggacaccagccggaaccagttctccctgaagctgtctagcgtgacagccgccgataccgccgtgtactactgcaccagagaggacagcagcaactggcggagtagaggccagggaacactggtcacagttagctctggatccggcggaggcggaagtggaggcggaggatctggcggcggaggctctttcgaagaagtccaacttgtggagtctggagggggcctggtgcagcccggcggctctctcagactgtcttgtgcggcaagcggctacaccttcacctcttactggatagaatgggtgaggcaggcacctggaaagggactggagtggattggagagattctgccaggagggggagatacaaattacaatgaaatcttcaaggggcgggccaccttttcagcggataccagcaagaatacagcttacctgcagatgaatagcctccgggcagaagataccgctgtttattattgcacgagacgggtgccaataagactggactattgggggcaagggactcttgtcaccgtcagttcaacgcgtatccagaaccctgatcctgccgtgtaccagctgcgggatagcaagagcagcgacaagagcgtgtgtctgttcaccgacttcgacagccagaccaacgtgtcccagagcaaggactccgacgtgtacatcaccgataagtgcgtgctggacatgcggagcatggacttcaagagcaactccgccgtggcctggtccaacaagtccgatttcgcctgcgccaacgccttcaacaacagcattatccccgaggacacattcttcccaagccccgagagcagctgcgacgtgaagctggtggaaaagagcttcgagacagacaccaacctgaacttccagatcctgtacgagatcctgctgggcaaggccaccctgtacgccgtgctggtgtctgccctggtgctgatggctatggtcaagcggaaggacagccgggga

SEQ ID NO: 38032 - DNA, 2694 bp, synthetic construct
  source 1..2694: mol_type = other DNA
atggccttaccagtgaccgccttgctcctgccgctggccttgctgctccacgccgccaggccggaagtgcagctggttgaatctggcggaggactggttcagcctggcggatctctgagactgtcttgtgccgccagcggcttcagcttcagcgacttttggatgagctgggtccgacaggcccctggcaaaggacttgaatgggtcgccacaatcagccaggccggcagcgagaaggactacgtggactctgtgaagggcagattcaccatcagccgggacaacgccaagaagtccctgtacctccagatgaacagcctgagagccgaggacaccgccgtgtactattgtgcctctggcgtgtacagcttcgactacagaggccagggcaccctggtcacagtctcttctggtaccggcggaggcggatctggcggcggaggtagcggtggcggaggatctgaattcgacatccagttgacccagtcccccagctcactcagcgccagtgtgggggaccgggtgaccattacctgtaaagccagtcagagtgtggactatgagggggatagcttcctgaattggtatcagcagaagcctggcaaagccccaaagctgctgatctacgctgcatctaatctggagtcaggcgtgccttctaggttctccggtagtgggtctgggaccgatttcacattgaccatttcatccctccaacccgaggatttcgctacatattactgtcagcagtccaatgaggaccctctcacctttggccagggcaccaaagttgaaattaagagactcgagatccagaaccctgatcctgccgtgtaccagctgcgggatagcaagagcagcgacaagagcgtgtgtctgttcaccgacttcgacagccagaccaacgtgtcccagagcaaggactccgacgtgtacatcaccgataagtgcgtgctggacatgcggagcatggacttcaagagcaactccgccgtggcctggtccaacaagtccgatttcgcctgcgccaacgccttcaacaacagcattatccccgaggacacattcttcccaagccccgagagcagctgcgacgtgaagctggtggaaaagagcttcgagacagacaccaacctgaacttccagatcctgtacgagatcctgctgggcaaggccaccctgtacgccgtgctggtgtctgccctggtgctgatggctatggtcaagcggaaggacagccggggacgcgccaagagaagcggatctggcgtgaagcagaccctgaatttcgacctgctgaagctggctggcgacgtggaatccaacccaggccctactagtatggactggatttggcgcatccttttccttgtcggcgctgctaccggcgcgcattccgggccccagctccagctgcaagagtctggacctggcctggtcaagcctagcgagacactgagcctgacctgtaccgtgtccggcgatagcatcagcagcggcgattactactggggctggatcagacagcctcctggcaaaggactggaatggatcggccacatctactacagcggcgtgacctactacaaccccagcctgaagtccagagtgaccatcagcgtggacaccagccggaaccagttctccctgaagctgtctagcgtgacagccgccgataccgccgtgtactactgcaccagagaggacagcagcaactggcggagtagaggccagggaacactggtcacagttagctctggatccggcggaggcggaagtggaggcggaggatctggcggcggaggctctttcgaagaagtccaacttgtggagtctggagggggcctggtgcagcccggcggctctctcagactgtcttgtgcggcaagcggctacaccttcacctcttactggatagaatgggtgaggcaggcacctggaaagggactggagtggattggagagattctgccaggagggggagatacaaattacaatgaaatcttcaaggggcgggccaccttttcagcggataccagcaagaatacagcttacctgcagatgaatagcctccgggcagaagataccgctgtttattattgcacgagacgggtgccaataagactggactattgggggcaagggactcttgtcaccgtcagttcaacgcgtgaggacctgaagaacgtgttcccacctgaggtggccgtgttcgagcctagcgaggccgagatcagccacacccagaaagccaccctcgtgtgcctggctaccggcttctaccccgaccatgtggaactgtcttggtgggtcaacggcaaagaggtgcacagcggcgtgtgtaccgacccccagccactgaaagaacagcccgccctgaacgacagccggtactgcctgagcagcagactgagagtgtccgccaccttctggcagaacccccggaaccacttcagatgccaggtgcagttctacggcctgagcgagaacgacgagtggacccaggacagagccaagcccgtgacccagatcgtgtctgccgaagcctggggcagagccgattgcggctttaccagcgagagctaccagcagggcgtgctgagcgccaccaacctgagcgtgatcggcttcagaatcctgctgctgaaagtggccggctttaacctgctgatgaccctgcggctgtggtccagc

SEQ ID NO: 38033 - DNA, 2178 bp, synthetic construct
  source 1..2178: mol_type = other DNA
atggccttaccagtgaccgccttgctcctgccgctggccttgctgctccacgccgccaggccggacatccagttgacccagtcccccagctcactcagcgccagtgtgggggaccgggtgaccattacctgtaaagccagtcagagtgtggactatgagggggatagcttcctgaattggtatcagcagaagcctggcaaagccccaaagctgctgatctacgctgcatctaatctggagtcaggcgtgccttctaggttctccggtagtgggtctgggaccgatttcacattgaccatttcatccctccaacccgaggatttcgctacatattactgtcagcagtccaatgaggaccctctcacctttggccagggcaccaaagttgaaattaagagactcgaggacctgaagaacgtgttcccacctgaggtggccgtgttcgagcctagcgaggccgagatcagccacacccagaaagccaccctcgtgtgcctggctaccggcttctaccccgaccatgtggaactgtcttggtgggtcaacggcaaagaggtgcacagcggcgtgtgtaccgacccccagccactgaaagaacagcccgccctgaacgacagccggtactgcctgagcagcagactgagagtgtccgccaccttctggcagaacccccggaaccacttcagatgccaggtgcagttctacggcctgagcgagaacgacgagtggacccaggacagagccaagcccgtgacccagatcgtgtctgccgaagcctggggcagagccgatgatgtgattaagatccactggcaggaaaagaagtccaacaccatcctgggcagccaggaaggcaacaccatgaagaccaacgacacctacatgaagttcagctggctgaccgtgcccgagaagtccctggacaaagaacacagatgcatcgtgcggcacgaaaacaacaagaacggcgtggaccaggaaatcatcttcccacccatcaagaccgatgtgattacaatggaccccaaggacaactgctccaaggacgccaacgataccctgctgctccagctgaccaacaccagcgcctactacatgtacttgttgctgctgctgaagtccgtggtgtacttcgccatcatcacatgctgcctgctgatggctatggtcaagcggaaggacagccggggaagggccaagcgatctggatctggagcaacaaacttctcactactcaaacaagcaggtgacgtggaggagaatcccgggcctactagtatggactggatttggcgcatccttttccttgtcggcgctgctaccggcgcgcattccttcgaagaagtccaacttgtggagtctggagggggcctggtgcagcccggcggctctctcagactgtcttgtgcggcaagcggctacaccttcacctcttactggatagaatgggtgaggcaggcacctggaaagggactggagtggattggagagattctgccaggagggggagatacaaattacaatgaaatcttcaaggggcgggccaccttttcagcggataccagcaagaatacagcttacctgcagatgaatagcctccgggcagaagataccgctgtttattattgcacgagacgggtgccaataagactggactattgggggcaagggactcttgtcaccgtcagttcaacgcgtatccagaaccctgatcctgccgtgtaccagctgcgggatagcaagagcagcgacaagagcgtgtgtctgttcaccgacttcgacagccagaccaacgtgtcccagagcaaggactccgacgtgtacatcaccgataagtgcgtgctggacatgcggagcatggacttcaagagcaactccgccgtggcctggtccaacaagtccgatttcgcctgcgccaacgccttcaacaacagcattatccccgaggacacattcttcccaagccccgagagcagcgactccaccgaccacgtgaagcccaaagagacagagaacaccaagcagcccagcaagagctgccacaagcccaaggccatcgtgcacaccgagaaagtgaacatgatgagcctgaccgtgctgggcctgcggatgctgttcgccaaaaccgtggccgtgaacttcctgctgaccgccaagctgttcttcctcctcaccgcc

SEQ ID NO: 38034 - DNA, 2190 bp, synthetic construct
  source 1..2190: mol_type = other DNA
atggccttaccagtgaccgccttgctcctgccgctggccttgctgctccacgccgccaggccggacatccagttgacccagtcccccagctcactcagcgccagtgtgggggaccgggtgaccattacctgtaaagccagtcagagtgtggactatgagggggatagcttcctgaattggtatcagcagaagcctggcaaagccccaaagctgctgatctacgctgcatctaatctggagtcaggcgtgccttctaggttctccggtagtgggtctgggaccgatttcacattgaccatttcatccctccaacccgaggatttcgctacatattactgtcagcagtccaatgaggaccctctcacctttggccagggcaccaaagttgaaattaagagactcgagatccagaaccctgatcctgccgtgtaccagctgcgggatagcaagagcagcgacaagagcgtgtgtctgttcaccgacttcgacagccagaccaacgtgtcccagagcaaggactccgacgtgtacatcaccgataagtgcgtgctggacatgcggagcatggacttcaagagcaactccgccgtggcctggtccaacaagtccgatttcgcctgcgccaacgccttcaacaacagcattatccccgaggacacattcttcccaagccccgagagcagcgactccaccgaccacgtgaagcccaaagagacagagaacaccaagcagcccagcaagagctgccacaagcccaaggccatcgtgcacaccgagaaagtgaacatgatgagcctgaccgtgctgggcctgcggatgctgttcgccaaaaccgtggccgtgaacttcctgctgaccgccaagctgttcttcctcctcaccgcccgcgccaagagaagcggatctggcgtgaagcagaccctgaatttcgacctgctgaagctggctggcgacgtggaatccaacccaggccctactagtatggactggatttggcgcatccttttccttgtcggcgctgctaccggcgcgcattccttcgaagaagtccaacttgtggagtctggagggggcctggtgcagcccggcggctctctcagactgtcttgtgcggcaagcggctacaccttcacctcttactggatagaatgggtgaggcaggcacctggaaagggactggagtggattggagagattctgccaggagggggagatacaaattacaatgaaatcttcaaggggcgggccaccttttcagcggataccagcaagaatacagcttacctgcagatgaatagcctccgggcagaagataccgctgtttattattgcacgagacgggtgccaataagactggactattgggggcaagggactcttgtcaccgtcagttcaacgcgtgaggacctgaagaacgtgttcccacctgaggtggccgtgttcgagcctagcgaggccgagatcagccacacccagaaagccaccctcgtgtgcctggctaccggcttctaccccgaccatgtggaactgtcttggtgggtcaacggcaaagaggtgcacagcggcgtgtgtaccgacccccagccactgaaagaacagcccgccctgaacgacagccggtactgcctgagcagcagactgagagtgtccgccaccttctggcagaacccccggaaccacttcagatgccaggtgcagttctacggcctgagcgagaacgacgagtggacccaggacagagccaagcccgtgacccagatcgtgtctgccgaagcctggggcagagccgatgatgtgattaagatccactggcaggaaaagaagtccaacaccatcctgggcagccaggaaggcaacaccatgaagaccaacgacacctacatgaagttcagctggctgaccgtgcccgagaagtccctggacaaagaacacagatgcatcgtgcggcacgaaaacaacaagaacggcgtggaccaggaaatcatcttcccacccatcaagaccgatgtgattacaatggaccccaaggacaactgctccaaggacgccaacgataccctgctgctccagctgaccaacaccagcgcctactacatgtacttgttgctgctgctgaagtccgtggtgtacttcgccatcatcacatgctgcctgctgatggctatggtcaagcggaaggacagccgggga

SEQ ID NO: 38035 - DNA, 2583 bp, synthetic construct
  source 1..2583: mol_type = other DNA
atggccttaccagtgaccgccttgctcctgccgctggccttgctgctccacgccgccaggccggaagtgcagctggttgaatctggcggaggactggttcagcctggcggatctctgagactgtcttgtgccgccagcggcttcagcttcagcgacttttggatgagctgggtccgacaggcccctggcaaaggacttgaatgggtcgccacaatcagccaggccggcagcgagaaggactacgtggactctgtgaagggcagattcaccatcagccgggacaacgccaagaagtccctgtacctccagatgaacagcctgagagccgaggacaccgccgtgtactattgtgcctctggcgtgtacagcttcgactacagaggccagggcaccctggtcacagtctcttctggtaccggcggaggcggatctggcggcggaggtagcggtggcggaggatctgaattcgacatccagttgacccagtcccccagctcactcagcgccagtgtgggggaccgggtgaccattacctgtaaagccagtcagagtgtggactatgagggggatagcttcctgaattggtatcagcagaagcctggcaaagccccaaagctgctgatctacgctgcatctaatctggagtcaggcgtgccttctaggttctccggtagtgggtctgggaccgatttcacattgaccatttcatccctccaacccgaggatttcgctacatattactgtcagcagtccaatgaggaccctctcacctttggccagggcaccaaagttgaaattaagagactcgaggacctgaagaacgtgttcccacctgaggtggccgtgttcgagcctagcgaggccgagatcagccacacccagaaagccaccctcgtgtgcctggctaccggcttctaccccgaccatgtggaactgtcttggtgggtcaacggcaaagaggtgcacagcggcgtgtgtaccgacccccagccactgaaagaacagcccgccctgaacgacagccggtactgcctgagcagcagactgagagtgtccgccaccttctggcagaacccccggaaccacttcagatgccaggtgcagttctacggcctgagcgagaacgacgagtggacccaggacagagccaagcccgtgacccagatcgtgtctgccgaagcctggggcagagccgatgatgtgattaagatccactggcaggaaaagaagtccaacaccatcctgggcagccaggaaggcaacaccatgaagaccaacgacacctacatgaagttcagctggctgaccgtgcccgagaagtccctggacaaagaacacagatgcatcgtgcggcacgaaaacaacaagaacggcgtggaccaggaaatcatcttcccacccatcaagaccgatgtgattacaatggaccccaaggacaactgctccaaggacgccaacgataccctgctgctccagctgaccaacaccagcgcctactacatgtacttgttgctgctgctgaagtccgtggtgtacttcgccatcatcacatgctgcctgctgatggctatggtcaagcggaaggacagccggggaagggccaagcgatctggatctggagcaacaaacttctcactactcaaacaagcaggtgacgtggaggagaatcccgggcctactagtatggactggatttggcgcatccttttccttgtcggcgctgctaccggcgcgcattccttcgaagaagtccaacttgtggagtctggagggggcctggtgcagcccggcggctctctcagactgtcttgtgcggcaagcggctacaccttcacctcttactggatagaatgggtgaggcaggcacctggaaagggactggagtggattggagagattctgccaggagggggagatacaaattacaatgaaatcttcaaggggcgggccaccttttcagcggataccagcaagaatacagcttacctgcagatgaatagcctccgggcagaagataccgctgtttattattgcacgagacgggtgccaataagactggactattgggggcaagggactcttgtcaccgtcagttcaacgcgtatccagaaccctgatcctgccgtgtaccagctgcgggatagcaagagcagcgacaagagcgtgtgtctgttcaccgacttcgacagccagaccaacgtgtcccagagcaaggactccgacgtgtacatcaccgataagtgcgtgctggacatgcggagcatggacttcaagagcaactccgccgtggcctggtccaacaagtccgatttcgcctgcgccaacgccttcaacaacagcattatccccgaggacacattcttcccaagccccgagagcagcgactccaccgaccacgtgaagcccaaagagacagagaacaccaagcagcccagcaagagctgccacaagcccaaggccatcgtgcacaccgagaaagtgaacatgatgagcctgaccgtgctgggcctgcggatgctgttcgccaaaaccgtggccgtgaacttcctgctgaccgccaagctgttcttcctcctcaccgcc

SEQ ID NO: 38036 - DNA, 2595 bp, synthetic construct
  source 1..2595: mol_type = other DNA
atggccttaccagtgaccgccttgctcctgccgctggccttgctgctccacgccgccaggccggaagtgcagctggttgaatctggcggaggactggttcagcctggcggatctctgagactgtcttgtgccgccagcggcttcagcttcagcgacttttggatgagctgggtccgacaggcccctggcaaaggacttgaatgggtcgccacaatcagccaggccggcagcgagaaggactacgtggactctgtgaagggcagattcaccatcagccgggacaacgccaagaagtccctgtacctccagatgaacagcctgagagccgaggacaccgccgtgtactattgtgcctctggcgtgtacagcttcgactacagaggccagggcaccctggtcacagtctcttctggtaccggcggaggcggatctggcggcggaggtagcggtggcggaggatctgaattcgacatccagttgacccagtcccccagctcactcagcgccagtgtgggggaccgggtgaccattacctgtaaagccagtcagagtgtggactatgagggggatagcttcctgaattggtatcagcagaagcctggcaaagccccaaagctgctgatctacgctgcatctaatctggagtcaggcgtgccttctaggttctccggtagtgggtctgggaccgatttcacattgaccatttcatccctccaacccgaggatttcgctacatattactgtcagcagtccaatgaggaccctctcacctttggccagggcaccaaagttgaaattaagagactcgagatccagaaccctgatcctgccgtgtaccagctgcgggatagcaagagcagcgacaagagcgtgtgtctgttcaccgacttcgacagccagaccaacgtgtcccagagcaaggactccgacgtgtacatcaccgataagtgcgtgctggacatgcggagcatggacttcaagagcaactccgccgtggcctggtccaacaagtccgatttcgcctgcgccaacgccttcaacaacagcattatccccgaggacacattcttcccaagccccgagagcagcgactccaccgaccacgtgaagcccaaagagacagagaacaccaagcagcccagcaagagctgccacaagcccaaggccatcgtgcacaccgagaaagtgaacatgatgagcctgaccgtgctgggcctgcggatgctgttcgccaaaaccgtggccgtgaacttcctgctgaccgccaagctgttcttcctcctcaccgcccgcgccaagagaagcggatctggcgtgaagcagaccctgaatttcgacctgctgaagctggctggcgacgtggaatccaacccaggccctactagtatggactggatttggcgcatccttttccttgtcggcgctgctaccggcgcgcattccttcgaagaagtccaacttgtggagtctggagggggcctggtgcagcccggcggctctctcagactgtcttgtgcggcaagcggctacaccttcacctcttactggatagaatgggtgaggcaggcacctggaaagggactggagtggattggagagattctgccaggagggggagatacaaattacaatgaaatcttcaaggggcgggccaccttttcagcggataccagcaagaatacagcttacctgcagatgaatagcctccgggcagaagataccgctgtttattattgcacgagacgggtgccaataagactggactattgggggcaagggactcttgtcaccgtcagttcaacgcgtgaggacctgaagaacgtgttcccacctgaggtggccgtgttcgagcctagcgaggccgagatcagccacacccagaaagccaccctcgtgtgcctggctaccggcttctaccccgaccatgtggaactgtcttggtgggtcaacggcaaagaggtgcacagcggcgtgtgtaccgacccccagccactgaaagaacagcccgccctgaacgacagccggtactgcctgagcagcagactgagagtgtccgccaccttctggcagaacccccggaaccacttcagatgccaggtgcagttctacggcctgagcgagaacgacgagtggacccaggacagagccaagcccgtgacccagatcgtgtctgccgaagcctggggcagagccgatgatgtgattaagatccactggcaggaaaagaagtccaacaccatcctgggcagccaggaaggcaacaccatgaagaccaacgacacctacatgaagttcagctggctgaccgtgcccgagaagtccctggacaaagaacacagatgcatcgtgcggcacgaaaacaacaagaacggcgtggaccaggaaatcatcttcccacccatcaagaccgatgtgattacaatggaccccaaggacaactgctccaaggacgccaacgataccctgctgctccagctgaccaacaccagcgcctactacatgtacttgttgctgctgctgaagtccgtggtgtacttcgccatcatcacatgctgcctgctgatggctatggtcaagcggaaggacagccgggga

SEQ ID NO: 38037 - DNA, 2994 bp, synthetic construct
  source 1..2994: mol_type = other DNA
atggccttaccagtgaccgccttgctcctgccgctggccttgctgctccacgccgccaggccggaagtgcagctggttgaatctggcggaggactggttcagcctggcggatctctgagactgtcttgtgccgccagcggcttcagcttcagcgacttttggatgagctgggtccgacaggcccctggcaaaggacttgaatgggtcgccacaatcagccaggccggcagcgagaaggactacgtggactctgtgaagggcagattcaccatcagccgggacaacgccaagaagtccctgtacctccagatgaacagcctgagagccgaggacaccgccgtgtactattgtgcctctggcgtgtacagcttcgactacagaggccagggcaccctggtcacagtctcttctggtaccggcggaggcggatctggcggcggaggtagcggtggcggaggatctgaattcgacatccagttgacccagtcccccagctcactcagcgccagtgtgggggaccgggtgaccattacctgtaaagccagtcagagtgtggactatgagggggatagcttcctgaattggtatcagcagaagcctggcaaagccccaaagctgctgatctacgctgcatctaatctggagtcaggcgtgccttctaggttctccggtagtgggtctgggaccgatttcacattgaccatttcatccctccaacccgaggatttcgctacatattactgtcagcagtccaatgaggaccctctcacctttggccagggcaccaaagttgaaattaagagactcgaggacctgaagaacgtgttcccacctgaggtggccgtgttcgagcctagcgaggccgagatcagccacacccagaaagccaccctcgtgtgcctggctaccggcttctaccccgaccatgtggaactgtcttggtgggtcaacggcaaagaggtgcacagcggcgtgtgtaccgacccccagccactgaaagaacagcccgccctgaacgacagccggtactgcctgagcagcagactgagagtgtccgccaccttctggcagaacccccggaaccacttcagatgccaggtgcagttctacggcctgagcgagaacgacgagtggacccaggacagagccaagcccgtgacccagatcgtgtctgccgaagcctggggcagagccgatgatgtgattaagatccactggcaggaaaagaagtccaacaccatcctgggcagccaggaaggcaacaccatgaagaccaacgacacctacatgaagttcagctggctgaccgtgcccgagaagtccctggacaaagaacacagatgcatcgtgcggcacgaaaacaacaagaacggcgtggaccaggaaatcatcttcccacccatcaagaccgatgtgattacaatggaccccaaggacaactgctccaaggacgccaacgataccctgctgctccagctgaccaacaccagcgcctactacatgtacttgttgctgctgctgaagtccgtggtgtacttcgccatcatcacatgctgcctgctgatggctatggtcaagcggaaggacagccggggaagggccaagcgatctggatctggagcaacaaacttctcactactcaaacaagcaggtgacgtggaggagaatcccgggcctactagtatggactggatttggcgcatccttttccttgtcggcgctgctaccggcgcgcattccgggccccagctccagctgcaagagtctggacctggcctggtcaagcctagcgagacactgagcctgacctgtaccgtgtccggcgatagcatcagcagcggcgattactactggggctggatcagacagcctcctggcaaaggactggaatggatcggccacatctactacagcggcgtgacctactacaaccccagcctgaagtccagagtgaccatcagcgtggacaccagccggaaccagttctccctgaagctgtctagcgtgacagccgccgataccgccgtgtactactgcaccagagaggacagcagcaactggcggagtagaggccagggaacactggtcacagttagctctggatccggcggaggcggaagtggaggcggaggatctggcggcggaggctctttcgaagaagtccaacttgtggagtctggagggggcctggtgcagcccggcggctctctcagactgtcttgtgcggcaagcggctacaccttcacctcttactggatagaatgggtgaggcaggcacctggaaagggactggagtggattggagagattctgccaggagggggagatacaaattacaatgaaatcttcaaggggcgggccaccttttcagcggataccagcaagaatacagcttacctgcagatgaatagcctccgggcagaagataccgctgtttattattgcacgagacgggtgccaataagactggactattgggggcaagggactcttgtcaccgtcagttcaacgcgtatccagaaccctgatcctgccgtgtaccagctgcgggatagcaagagcagcgacaagagcgtgtgtctgttcaccgacttcgacagccagaccaacgtgtcccagagcaaggactccgacgtgtacatcaccgataagtgcgtgctggacatgcggagcatggacttcaagagcaactccgccgtggcctggtccaacaagtccgatttcgcctgcgccaacgccttcaacaacagcattatccccgaggacacattcttcccaagccccgagagcagcgactccaccgaccacgtgaagcccaaagagacagagaacaccaagcagcccagcaagagctgccacaagcccaaggccatcgtgcacaccgagaaagtgaacatgatgagcctgaccgtgctgggcctgcggatgctgttcgccaaaaccgtggccgtgaacttcctgctgaccgccaagctgttcttcctcctcaccgcc

SEQ ID NO: 38038 - DNA, 3006 bp, synthetic construct
  source 1..3006: mol_type = other DNA
atggccttaccagtgaccgccttgctcctgccgctggccttgctgctccacgccgccaggccggaagtgcagctggttgaatctggcggaggactggttcagcctggcggatctctgagactgtcttgtgccgccagcggcttcagcttcagcgacttttggatgagctgggtccgacaggcccctggcaaaggacttgaatgggtcgccacaatcagccaggccggcagcgagaaggactacgtggactctgtgaagggcagattcaccatcagccgggacaacgccaagaagtccctgtacctccagatgaacagcctgagagccgaggacaccgccgtgtactattgtgcctctggcgtgtacagcttcgactacagaggccagggcaccctggtcacagtctcttctggtaccggcggaggcggatctggcggcggaggtagcggtggcggaggatctgaattcgacatccagttgacccagtcccccagctcactcagcgccagtgtgggggaccgggtgaccattacctgtaaagccagtcagagtgtggactatgagggggatagcttcctgaattggtatcagcagaagcctggcaaagccccaaagctgctgatctacgctgcatctaatctggagtcaggcgtgccttctaggttctccggtagtgggtctgggaccgatttcacattgaccatttcatccctccaacccgaggatttcgctacatattactgtcagcagtccaatgaggaccctctcacctttggccagggcaccaaagttgaaattaagagactcgagatccagaaccctgatcctgccgtgtaccagctgcgggatagcaagagcagcgacaagagcgtgtgtctgttcaccgacttcgacagccagaccaacgtgtcccagagcaaggactccgacgtgtacatcaccgataagtgcgtgctggacatgcggagcatggacttcaagagcaactccgccgtggcctggtccaacaagtccgatttcgcctgcgccaacgccttcaacaacagcattatccccgaggacacattcttcccaagccccgagagcagcgactccaccgaccacgtgaagcccaaagagacagagaacaccaagcagcccagcaagagctgccacaagcccaaggccatcgtgcacaccgagaaagtgaacatgatgagcctgaccgtgctgggcctgcggatgctgttcgccaaaaccgtggccgtgaacttcctgctgaccgccaagctgttcttcctcctcaccgcccgcgccaagagaagcggatctggcgtgaagcagaccctgaatttcgacctgctgaagctggctggcgacgtggaatccaacccaggccctactagtatggactggatttggcgcatccttttccttgtcggcgctgctaccggcgcgcattccgggccccagctccagctgcaagagtctggacctggcctggtcaagcctagcgagacactgagcctgacctgtaccgtgtccggcgatagcatcagcagcggcgattactactggggctggatcagacagcctcctggcaaaggactggaatggatcggccacatctactacagcggcgtgacctactacaaccccagcctgaagtccagagtgaccatcagcgtggacaccagccggaaccagttctccctgaagctgtctagcgtgacagccgccgataccgccgtgtactactgcaccagagaggacagcagcaactggcggagtagaggccagggaacactggtcacagttagctctggatccggcggaggcggaagtggaggcggaggatctggcggcggaggctctttcgaagaagtccaacttgtggagtctggagggggcctggtgcagcccggcggctctctcagactgtcttgtgcggcaagcggctacaccttcacctcttactggatagaatgggtgaggcaggcacctggaaagggactggagtggattggagagattctgccaggagggggagatacaaattacaatgaaatcttcaaggggcgggccaccttttcagcggataccagcaagaatacagcttacctgcagatgaatagcctccgggcagaagataccgctgtttattattgcacgagacgggtgccaataagactggactattgggggcaagggactcttgtcaccgtcagttcaacgcgtgaggacctgaagaacgtgttcccacctgaggtggccgtgttcgagcctagcgaggccgagatcagccacacccagaaagccaccctcgtgtgcctggctaccggcttctaccccgaccatgtggaactgtcttggtgggtcaacggcaaagaggtgcacagcggcgtgtgtaccgacccccagccactgaaagaacagcccgccctgaacgacagccggtactgcctgagcagcagactgagagtgtccgccaccttctggcagaacccccggaaccacttcagatgccaggtgcagttctacggcctgagcgagaacgacgagtggacccaggacagagccaagcccgtgacccagatcgtgtctgccgaagcctggggcagagccgatgatgtgattaagatccactggcaggaaaagaagtccaacaccatcctgggcagccaggaaggcaacaccatgaagaccaacgacacctacatgaagttcagctggctgaccgtgcccgagaagtccctggacaaagaacacagatgcatcgtgcggcacgaaaacaacaagaacggcgtggaccaggaaatcatcttcccacccatcaagaccgatgtgattacaatggaccccaaggacaactgctccaaggacgccaacgataccctgctgctccagctgaccaacaccagcgcctactacatgtacttgttgctgctgctgaagtccgtggtgtacttcgccatcatcacatgctgcctgctgatggctatggtcaagcggaaggacagccgggga

SEQ ID NO: 38039 - DNA, 2172 bp, synthetic construct
  source 1..2172: mol_type = other DNA
atggccttaccagtgaccgccttgctcctgccgctggccttgctgctccacgccgccaggccggacatccagttgacccagtcccccagctcactcagcgccagtgtgggggaccgggtgaccattacctgtaaagccagtcagagtgtggactatgagggggatagcttcctgaattggtatcagcagaagcctggcaaagccccaaagctgctgatctacgctgcatctaatctggagtcaggcgtgccttctaggttctccggtagtgggtctgggaccgatttcacattgaccatttcatccctccaacccgaggatttcgctacatattactgtcagcagtccaatgaggaccctctcacctttggccagggcaccaaagttgaaattaagagactcgaggacctgaagaacgtgttcccacctgaggtggccgtgttcgagcctagcgaggccgagatcagccacacccagaaagccaccctcgtgtgcctggctaccggcttctaccccgaccatgtggaactgtcttggtgggtcaacggcaaagaggtgcacagcggcgtgtgtaccgacccccagccactgaaagaacagcccgccctgaacgacagccggtactgcctgagcagcagactgagagtgtccgccaccttctggcagaacccccggaaccacttcagatgccaggtgcagttctacggcctgagcgagaacgacgagtggacccaggacagagccaagcccgtgacccagatcgtgtctgccgaagcctggggcagagccgatgatgtgattaagatccactggcaggaaaagaagtccaacaccatcctgggcagccaggaaggcaacaccatgaagaccaacgacacctacatgaagttcagctggctgaccgtgcccgagaagtccctggacaaagaacacagatgcatcgtgcggcacgaaaacaacaagaacggcgtggaccaggaaatcatcttcccacccatcaagaccgatgtgattacaatggaccccaaggacaactgctccaaggacgccaacgataccctgctgctccagctgaccaacaccagcgcctactacatgtacttgttgctgctgctgaagtccgtggtgtacttcgccatcatcacatgctgcctgctgcggagaaccgccttctgctgcaacggcgagaagtctagggccaagcgatctggatctggagcaacaaacttctcactactcaaacaagcaggtgacgtggaggagaatcccgggcctactagtatggactggatttggcgcatccttttccttgtcggcgctgctaccggcgcgcattccttcgaagaagtccaacttgtggagtctggagggggcctggtgcagcccggcggctctctcagactgtcttgtgcggcaagcggctacaccttcacctcttactggatagaatgggtgaggcaggcacctggaaagggactggagtggattggagagattctgccaggagggggagatacaaattacaatgaaatcttcaaggggcgggccaccttttcagcggataccagcaagaatacagcttacctgcagatgaatagcctccgggcagaagataccgctgtttattattgcacgagacgggtgccaataagactggactattgggggcaagggactcttgtcaccgtcagttcaacgcgtatccagaaccctgatcctgccgtgtaccagctgcgggatagcaagagcagcgacaagagcgtgtgtctgttcaccgacttcgacagccagaccaacgtgtcccagagcaaggactccgacgtgtacatcaccgataagtgcgtgctggacatgcggagcatggacttcaagagcaactccgccgtggcctggtccaacaagtccgatttcgcctgcgccaacgccttcaacaacagcattatccccgaggacacattcttcccaagccccgagagcagcgactccaccgaccacgtgaagcccaaagagacagagaacaccaagcagcccagcaagagctgccacaagcccaaggccatcgtgcacaccgagaaagtgaacatgatgagcctgaccgtgctgggcctgcggatgctgttcgccaaaaccgtggccgtgaacttcctgctgaccgccaagctgttcttcctc

SEQ ID NO: 38040 - DNA, 2184 bp, synthetic construct
  source 1..2184: mol_type = other DNA
atggccttaccagtgaccgccttgctcctgccgctggccttgctgctccacgccgccaggccggacatccagttgacccagtcccccagctcactcagcgccagtgtgggggaccgggtgaccattacctgtaaagccagtcagagtgtggactatgagggggatagcttcctgaattggtatcagcagaagcctggcaaagccccaaagctgctgatctacgctgcatctaatctggagtcaggcgtgccttctaggttctccggtagtgggtctgggaccgatttcacattgaccatttcatccctccaacccgaggatttcgctacatattactgtcagcagtccaatgaggaccctctcacctttggccagggcaccaaagttgaaattaagagactcgagatccagaaccctgatcctgccgtgtaccagctgcgggatagcaagagcagcgacaagagcgtgtgtctgttcaccgacttcgacagccagaccaacgtgtcccagagcaaggactccgacgtgtacatcaccgataagtgcgtgctggacatgcggagcatggacttcaagagcaactccgccgtggcctggtccaacaagtccgatttcgcctgcgccaacgccttcaacaacagcattatccccgaggacacattcttcccaagccccgagagcagcgactccaccgaccacgtgaagcccaaagagacagagaacaccaagcagcccagcaagagctgccacaagcccaaggccatcgtgcacaccgagaaagtgaacatgatgagcctgaccgtgctgggcctgcggatgctgttcgccaaaaccgtggccgtgaacttcctgctgaccgccaagctgttcttcctccgcgccaagagaagcggatctggcgtgaagcagaccctgaatttcgacctgctgaagctggctggcgacgtggaatccaacccaggccctactagtatggactggatttggcgcatccttttccttgtcggcgctgctaccggcgcgcattccttcgaagaagtccaacttgtggagtctggagggggcctggtgcagcccggcggctctctcagactgtcttgtgcggcaagcggctacaccttcacctcttactggatagaatgggtgaggcaggcacctggaaagggactggagtggattggagagattctgccaggagggggagatacaaattacaatgaaatcttcaaggggcgggccaccttttcagcggataccagcaagaatacagcttacctgcagatgaatagcctccgggcagaagataccgctgtttattattgcacgagacgggtgccaataagactggactattgggggcaagggactcttgtcaccgtcagttcaacgcgtgaggacctgaagaacgtgttcccacctgaggtggccgtgttcgagcctagcgaggccgagatcagccacacccagaaagccaccctcgtgtgcctggctaccggcttctaccccgaccatgtggaactgtcttggtgggtcaacggcaaagaggtgcacagcggcgtgtgtaccgacccccagccactgaaagaacagcccgccctgaacgacagccggtactgcctgagcagcagactgagagtgtccgccaccttctggcagaacccccggaaccacttcagatgccaggtgcagttctacggcctgagcgagaacgacgagtggacccaggacagagccaagcccgtgacccagatcgtgtctgccgaagcctggggcagagccgatgatgtgattaagatccactggcaggaaaagaagtccaacaccatcctgggcagccaggaaggcaacaccatgaagaccaacgacacctacatgaagttcagctggctgaccgtgcccgagaagtccctggacaaagaacacagatgcatcgtgcggcacgaaaacaacaagaacggcgtggaccaggaaatcatcttcccacccatcaagaccgatgtgattacaatggaccccaaggacaactgctccaaggacgccaacgataccctgctgctccagctgaccaacaccagcgcctactacatgtacttgttgctgctgctgaagtccgtggtgtacttcgccatcatcacatgctgcctgctgcggagaaccgccttctgctgcaacggcgagaagtct

SEQ ID NO: 38041 - DNA, 2577 bp, synthetic construct
  source 1..2577: mol_type = other DNA
atggccttaccagtgaccgccttgctcctgccgctggccttgctgctccacgccgccaggccggaagtgcagctggttgaatctggcggaggactggttcagcctggcggatctctgagactgtcttgtgccgccagcggcttcagcttcagcgacttttggatgagctgggtccgacaggcccctggcaaaggacttgaatgggtcgccacaatcagccaggccggcagcgagaaggactacgtggactctgtgaagggcagattcaccatcagccgggacaacgccaagaagtccctgtacctccagatgaacagcctgagagccgaggacaccgccgtgtactattgtgcctctggcgtgtacagcttcgactacagaggccagggcaccctggtcacagtctcttctggtaccggcggaggcggatctggcggcggaggtagcggtggcggaggatctgaattcgacatccagttgacccagtcccccagctcactcagcgccagtgtgggggaccgggtgaccattacctgtaaagccagtcagagtgtggactatgagggggatagcttcctgaattggtatcagcagaagcctggcaaagccccaaagctgctgatctacgctgcatctaatctggagtcaggcgtgccttctaggttctccggtagtgggtctgggaccgatttcacattgaccatttcatccctccaacccgaggatttcgctacatattactgtcagcagtccaatgaggaccctctcacctttggccagggcaccaaagttgaaattaagagactcgaggacctgaagaacgtgttcccacctgaggtggccgtgttcgagcctagcgaggccgagatcagccacacccagaaagccaccctcgtgtgcctggctaccggcttctaccccgaccatgtggaactgtcttggtgggtcaacggcaaagaggtgcacagcggcgtgtgtaccgacccccagccactgaaagaacagcccgccctgaacgacagccggtactgcctgagcagcagactgagagtgtccgccaccttctggcagaacccccggaaccacttcagatgccaggtgcagttctacggcctgagcgagaacgacgagtggacccaggacagagccaagcccgtgacccagatcgtgtctgccgaagcctggggcagagccgatgatgtgattaagatccactggcaggaaaagaagtccaacaccatcctgggcagccaggaaggcaacaccatgaagaccaacgacacctacatgaagttcagctggctgaccgtgcccgagaagtccctggacaaagaacacagatgcatcgtgcggcacgaaaacaacaagaacggcgtggaccaggaaatcatcttcccacccatcaagaccgatgtgattacaatggaccccaaggacaactgctccaaggacgccaacgataccctgctgctccagctgaccaacaccagcgcctactacatgtacttgttgctgctgctgaagtccgtggtgtacttcgccatcatcacatgctgcctgctgcggagaaccgccttctgctgcaacggcgagaagtctagggccaagcgatctggatctggagcaacaaacttctcactactcaaacaagcaggtgacgtggaggagaatcccgggcctactagtatggactggatttggcgcatccttttccttgtcggcgctgctaccggcgcgcattccttcgaagaagtccaacttgtggagtctggagggggcctggtgcagcccggcggctctctcagactgtcttgtgcggcaagcggctacaccttcacctcttactggatagaatgggtgaggcaggcacctggaaagggactggagtggattggagagattctgccaggagggggagatacaaattacaatgaaatcttcaaggggcgggccaccttttcagcggataccagcaagaatacagcttacctgcagatgaatagcctccgggcagaagataccgctgtttattattgcacgagacgggtgccaataagactggactattgggggcaagggactcttgtcaccgtcagttcaacgcgtatccagaaccctgatcctgccgtgtaccagctgcgggatagcaagagcagcgacaagagcgtgtgtctgttcaccgacttcgacagccagaccaacgtgtcccagagcaaggactccgacgtgtacatcaccgataagtgcgtgctggacatgcggagcatggacttcaagagcaactccgccgtggcctggtccaacaagtccgatttcgcctgcgccaacgccttcaacaacagcattatccccgaggacacattcttcccaagccccgagagcagcgactccaccgaccacgtgaagcccaaagagacagagaacaccaagcagcccagcaagagctgccacaagcccaaggccatcgtgcacaccgagaaagtgaacatgatgagcctgaccgtgctgggcctgcggatgctgttcgccaaaaccgtggccgtgaacttcctgctgaccgccaagctgttcttcctc

SEQ ID NO: 38042 - DNA, 2988 bp, synthetic construct
  source 1..2988: mol_type = other DNA
atggccttaccagtgaccgccttgctcctgccgctggccttgctgctccacgccgccaggccggaagtgcagctggttgaatctggcggaggactggttcagcctggcggatctctgagactgtcttgtgccgccagcggcttcagcttcagcgacttttggatgagctgggtccgacaggcccctggcaaaggacttgaatgggtcgccacaatcagccaggccggcagcgagaaggactacgtggactctgtgaagggcagattcaccatcagccgggacaacgccaagaagtccctgtacctccagatgaacagcctgagagccgaggacaccgccgtgtactattgtgcctctggcgtgtacagcttcgactacagaggccagggcaccctggtcacagtctcttctggtaccggcggaggcggatctggcggcggaggtagcggtggcggaggatctgaattcgacatccagttgacccagtcccccagctcactcagcgccagtgtgggggaccgggtgaccattacctgtaaagccagtcagagtgtggactatgagggggatagcttcctgaattggtatcagcagaagcctggcaaagccccaaagctgctgatctacgctgcatctaatctggagtcaggcgtgccttctaggttctccggtagtgggtctgggaccgatttcacattgaccatttcatccctccaacccgaggatttcgctacatattactgtcagcagtccaatgaggaccctctcacctttggccagggcaccaaagttgaaattaagagactcgaggacctgaagaacgtgttcccacctgaggtggccgtgttcgagcctagcgaggccgagatcagccacacccagaaagccaccctcgtgtgcctggctaccggcttctaccccgaccatgtggaactgtcttggtgggtcaacggcaaagaggtgcacagcggcgtgtgtaccgacccccagccactgaaagaacagcccgccctgaacgacagccggtactgcctgagcagcagactgagagtgtccgccaccttctggcagaacccccggaaccacttcagatgccaggtgcagttctacggcctgagcgagaacgacgagtggacccaggacagagccaagcccgtgacccagatcgtgtctgccgaagcctggggcagagccgatgatgtgattaagatccactggcaggaaaagaagtccaacaccatcctgggcagccaggaaggcaacaccatgaagaccaacgacacctacatgaagttcagctggctgaccgtgcccgagaagtccctggacaaagaacacagatgcatcgtgcggcacgaaaacaacaagaacggcgtggaccaggaaatcatcttcccacccatcaagaccgatgtgattacaatggaccccaaggacaactgctccaaggacgccaacgataccctgctgctccagctgaccaacaccagcgcctactacatgtacttgttgctgctgctgaagtccgtggtgtacttcgccatcatcacatgctgcctgctgcggagaaccgccttctgctgcaacggcgagaagtctagggccaagcgatctggatctggagcaacaaacttctcactactcaaacaagcaggtgacgtggaggagaatcccgggcctactagtatggactggatttggcgcatccttttccttgtcggcgctgctaccggcgcgcattccgggccccagctccagctgcaagagtctggacctggcctggtcaagcctagcgagacactgagcctgacctgtaccgtgtccggcgatagcatcagcagcggcgattactactggggctggatcagacagcctcctggcaaaggactggaatggatcggccacatctactacagcggcgtgacctactacaaccccagcctgaagtccagagtgaccatcagcgtggacaccagccggaaccagttctccctgaagctgtctagcgtgacagccgccgataccgccgtgtactactgcaccagagaggacagcagcaactggcggagtagaggccagggaacactggtcacagttagctctggatccggcggaggcggaagtggaggcggaggatctggcggcggaggctctttcgaagaagtccaacttgtggagtctggagggggcctggtgcagcccggcggctctctcagactgtcttgtgcggcaagcggctacaccttcacctcttactggatagaatgggtgaggcaggcacctggaaagggactggagtggattggagagattctgccaggagggggagatacaaattacaatgaaatcttcaaggggcgggccaccttttcagcggataccagcaagaatacagcttacctgcagatgaatagcctccgggcagaagataccgctgtttattattgcacgagacgggtgccaataagactggactattgggggcaagggactcttgtcaccgtcagttcaacgcgtatccagaaccctgatcctgccgtgtaccagctgcgggatagcaagagcagcgacaagagcgtgtgtctgttcaccgacttcgacagccagaccaacgtgtcccagagcaaggactccgacgtgtacatcaccgataagtgcgtgctggacatgcggagcatggacttcaagagcaactccgccgtggcctggtccaacaagtccgatttcgcctgcgccaacgccttcaacaacagcattatccccgaggacacattcttcccaagccccgagagcagcgactccaccgaccacgtgaagcccaaagagacagagaacaccaagcagcccagcaagagctgccacaagcccaaggccatcgtgcacaccgagaaagtgaacatgatgagcctgaccgtgctgggcctgcggatgctgttcgccaaaaccgtggccgtgaacttcctgctgaccgccaagctgttcttcctc

SEQ ID NO: 38043 - DNA, 1866 bp, synthetic construct
  source 1..1866: mol_type = other DNA
atggccttaccagtgaccgccttgctcctgccgctggccttgctgctccacgccgccaggccggacatccagttgacccagtcccccagctcactcagcgccagtgtgggggaccgggtgaccattacctgtaaagccagtcagagtgtggactatgagggggatagcttcctgaattggtatcagcagaagcctggcaaagccccaaagctgctgatctacgctgcatctaatctggagtcaggcgtgccttctaggttctccggtagtgggtctgggaccgatttcacattgaccatttcatccctccaacccgaggatttcgctacatattactgtcagcagtccaatgaggaccctctcacctttggccagggcaccaaagttgaaattaagagactcgaggacctgaagaacgtgttcccacctgaggtggccgtgttcgagcctagcgaggccgagatcagccacacccagaaagccaccctcgtgtgcctggctaccggcttctaccccgaccatgtggaactgtcttggtgggtcaacggcaaagaggtgcacagcggcgtgtctaccgacccccagccactgaaagaacagcccgccctgaacgacagccggtactgcctgagcagcagactgagagtgtccgccaccttctggcagaacccccggaaccacttcagatgccaggtgcagttctacggcctgagcgagaacgacgagtggacccaggacagagccaagcccgtgacccagatcgtgtctgccgaagcctggggcagagccgattgcgacgtgaagctggtggaaaagagcttcgagacagacaccaacctgaacttccagaacctgagcgtgatcggcttcagaatcctgctgctgaaagtggccggctttaacctgctgatgaccctgcggctgtggtccagcagggccaagcgatctggatctggagcaacaaacttctcactactcaaacaagcaggtgacgtggaggagaatcccgggcctactagtatggactggatttggcgcatccttttccttgtcggcgctgctaccggcgcgcattccttcgaagaagtccaacttgtggagtctggagggggcctggtgcagcccggcggctctctcagactgtcttgtgcggcaagcggctacaccttcacctcttactggatagaatgggtgaggcaggcacctggaaagggactggagtggattggagagattctgccaggagggggagatacaaattacaatgaaatcttcaaggggcgggccaccttttcagcggataccagcaagaatacagcttacctgcagatgaatagcctccgggcagaagataccgctgtttattattgcacgagacgggtgccaataagactggactattgggggcaagggactcttgtcaccgtcagttcaacgcgtatccagaaccctgatcctgccgtgtaccagctgcgggatagcaagagcagcgacaagagcgtgtgtctgttcaccgacttcgacagccagaccaacgtgtcccagagcaaggactccgacgtgtacatcaccgataagaccgtgctggacatgcggagcatggacttcaagagcaactccgccgtggcctggtccaacaagtccgatttcgcctgcgccaacgccttcaacaacagcattatccccgaggacacattcttcccaagccccgagagcagctgcggctttaccagcgagagctaccagcagggcgtgctgagcgccaccatcctgtacgagatcctgctgggcaaggccaccctgtacgccgtgctggtgtctgccctggtgctgatggctatggtcaagcggaaggacagccgggga

SEQ ID NO: 38044 - DNA, 1866 bp, synthetic construct
  source 1..1866: mol_type = other DNA
atggccttaccagtgaccgccttgctcctgccgctggccttgctgctccacgccgccaggccggacatccagttgacccagtcccccagctcactcagcgccagtgtgggggaccgggtgaccattacctgtaaagccagtcagagtgtggactatgagggggatagcttcctgaattggtatcagcagaagcctggcaaagccccaaagctgctgatctacgctgcatctaatctggagtcaggcgtgccttctaggttctccggtagtgggtctgggaccgatttcacattgaccatttcatccctccaacccgaggatttcgctacatattactgtcagcagtccaatgaggaccctctcacctttggccagggcaccaaagttgaaattaagagactcgaggacctgaagaacgtgttcccacctgaggtggccgtgttcgagcctagcgaggccgagatcagccacacccagaaagccaccctcgtgtgcctggctaccggcttctaccccgaccatgtggaactgtcttggtgggtcaacggcaaagaggtgcacagcggcgtgtctaccgacccccagccactgaaagaacagcccgccctgaacgacagccggtactgcctgagcagcagactgagagtgtccgccaccttctggcagaacccccggaaccacttcagatgccaggtgcagttctacggcctgagcgagaacgacgagtggacccaggacagagccaagcccgtgacccagatcgtgtctgccgaagcctggggcagagccgattgcggctttaccagcgagagctaccagcagggcgtgctgagcgccaccaacctgagcgtgatcggcttcagaatcctgctgctgaaagtggccggctttaacctgctgatgaccctgcggctgtggtccagcagggccaagcgatctggatctggagcaacaaacttctcactactcaaacaagcaggtgacgtggaggagaatcccgggcctactagtatggactggatttggcgcatccttttccttgtcggcgctgctaccggcgcgcattccttcgaagaagtccaacttgtggagtctggagggggcctggtgcagcccggcggctctctcagactgtcttgtgcggcaagcggctacaccttcacctcttactggatagaatgggtgaggcaggcacctggaaagggactggagtggattggagagattctgccaggagggggagatacaaattacaatgaaatcttcaaggggcgggccaccttttcagcggataccagcaagaatacagcttacctgcagatgaatagcctccgggcagaagataccgctgtttattattgcacgagacgggtgccaataagactggactattgggggcaagggactcttgtcaccgtcagttcaacgcgtatccagaaccctgatcctgccgtgtaccagctgcgggatagcaagagcagcgacaagagcgtgtgtctgttcaccgacttcgacagccagaccaacgtgtcccagagcaaggactccgacgtgtacatcaccgataagaccgtgctggacatgcggagcatggacttcaagagcaactccgccgtggcctggtccaacaagtccgatttcgcctgcgccaacgccttcaacaacagcattatccccgaggacacattcttcccaagccccgagagcagctgcgacgtgaagctggtggaaaagagcttcgagacagacaccaacctgaacttccagatcctgtacgagatcctgctgggcaaggccaccctgtacgccgtgctggtgtctgccctggtgctgatggctatggtcaagcggaaggacagccgggga

SEQ ID NO: 38045 - DNA, 2178 bp, synthetic construct
  source 1..2178: mol_type = other DNA
atggccttaccagtgaccgccttgctcctgccgctggccttgctgctccacgccgccaggccggacatccagttgacccagtcccccagctcactcagcgccagtgtgggggaccgggtgaccattacctgtaaagccagtcagagtgtggactatgagggggatagcttcctgaattggtatcagcagaagcctggcaaagccccaaagctgctgatctacgctgcatctaatctggagtcaggcgtgccttctaggttctccggtagtgggtctgggaccgatttcacattgaccatttcatccctccaacccgaggatttcgctacatattactgtcagcagtccaatgaggaccctctcacctttggccagggcaccaaagttgaaattaagagactcgaggacctgaagaacgtgttcccacctgaggtggccgtgttcgagcctagcgaggccgagatcagccacacccagaaagccaccctcgtgtgcctggctaccggcttctaccccgaccatgtggaactgtcttggtgggtcaacggcaaagaggtgcacagcggcgtgtctaccgacccccagccactgaaagaacagcccgccctgaacgacagccggtactgcctgagcagcagactgagagtgtccgccaccttctggcagaacccccggaaccacttcagatgccaggtgcagttctacggcctgagcgagaacgacgagtggacccaggacagagccaagcccgtgacccagatcgtgtctgccgaagcctggggcagagccgatgatgtgattaagatccactggcaggaaaagaagtccaacaccatcctgggcagccaggaaggcaacaccatgaagaccaacgacacctacatgaagttcagctggctgaccgtgcccgagaagtccctggacaaagaacacagatgcatcgtgcggcacgaaaacaacaagaacggcgtggaccaggaaatcatcttcccacccatcaagaccgatgtgattacaatggaccccaaggacaactgctccaaggacgccaacgataccctgctgctccagctgaccaacaccagcgcctactacatgtacttgttgctgctgctgaagtccgtggtgtacttcgccatcatcacatgctgcctgctgatggctatggtcaagcggaaggacagccggggaagggccaagcgatctggatctggagcaacaaacttctcactactcaaacaagcaggtgacgtggaggagaatcccgggcctactagtatggactggatttggcgcatccttttccttgtcggcgctgctaccggcgcgcattccttcgaagaagtccaacttgtggagtctggagggggcctggtgcagcccggcggctctctcagactgtcttgtgcggcaagcggctacaccttcacctcttactggatagaatgggtgaggcaggcacctggaaagggactggagtggattggagagattctgccaggagggggagatacaaattacaatgaaatcttcaaggggcgggccaccttttcagcggataccagcaagaatacagcttacctgcagatgaatagcctccgggcagaagataccgctgtttattattgcacgagacgggtgccaataagactggactattgggggcaagggactcttgtcaccgtcagttcaacgcgtatccagaaccctgatcctgccgtgtaccagctgcgggatagcaagagcagcgacaagagcgtgtgtctgttcaccgacttcgacagccagaccaacgtgtcccagagcaaggactccgacgtgtacatcaccgataagaccgtgctggacatgcggagcatggacttcaagagcaactccgccgtggcctggtccaacaagtccgatttcgcctgcgccaacgccttcaacaacagcattatccccgaggacacattcttcccaagccccgagagcagcgactccaccgaccacgtgaagcccaaagagacagagaacaccaagcagcccagcaagagctgccacaagcccaaggccatcgtgcacaccgagaaagtgaacatgatgagcctgaccgtgctgggcctgcggatgctgttcgccaaaaccgtggccgtgaacttcctgctgaccgccaagctgttcttcctcctcaccgcc

SEQ ID NO: 38046 - DNA, 2172 bp, synthetic construct
  source 1..2172: mol_type = other DNA
atggccttaccagtgaccgccttgctcctgccgctggccttgctgctccacgccgccaggccggacatccagttgacccagtcccccagctcactcagcgccagtgtgggggaccgggtgaccattacctgtaaagccagtcagagtgtggactatgagggggatagcttcctgaattggtatcagcagaagcctggcaaagccccaaagctgctgatctacgctgcatctaatctggagtcaggcgtgccttctaggttctccggtagtgggtctgggaccgatttcacattgaccatttcatccctccaacccgaggatttcgctacatattactgtcagcagtccaatgaggaccctctcacctttggccagggcaccaaagttgaaattaagagactcgaggacctgaagaacgtgttcccacctgaggtggccgtgttcgagcctagcgaggccgagatcagccacacccagaaagccaccctcgtgtgcctggctaccggcttctaccccgaccatgtggaactgtcttggtgggtcaacggcaaagaggtgcacagcggcgtgtctaccgacccccagccactgaaagaacagcccgccctgaacgacagccggtactgcctgagcagcagactgagagtgtccgccaccttctggcagaacccccggaaccacttcagatgccaggtgcagttctacggcctgagcgagaacgacgagtggacccaggacagagccaagcccgtgacccagatcgtgtctgccgaagcctggggcagagccgatgatgtgattaagatccactggcaggaaaagaagtccaacaccatcctgggcagccaggaaggcaacaccatgaagaccaacgacacctacatgaagttcagctggctgaccgtgcccgagaagtccctggacaaagaacacagatgcatcgtgcggcacgaaaacaacaagaacggcgtggaccaggaaatcatcttcccacccatcaagaccgatgtgattacaatggaccccaaggacaactgctccaaggacgccaacgataccctgctgctccagctgaccaacaccagcgcctactacatgtacttgttgctgctgctgaagtccgtggtgtacttcgccatcatcacatgctgcctgctgcggagaaccgccttctgctgcaacggcgagaagtctagggccaagcgatctggatctggagcaacaaacttctcactactcaaacaagcaggtgacgtggaggagaatcccgggcctactagtatggactggatttggcgcatccttttccttgtcggcgctgctaccggcgcgcattccttcgaagaagtccaacttgtggagtctggagggggcctggtgcagcccggcggctctctcagactgtcttgtgcggcaagcggctacaccttcacctcttactggatagaatgggtgaggcaggcacctggaaagggactggagtggattggagagattctgccaggagggggagatacaaattacaatgaaatcttcaaggggcgggccaccttttcagcggataccagcaagaatacagcttacctgcagatgaatagcctccgggcagaagataccgctgtttattattgcacgagacgggtgccaataagactggactattgggggcaagggactcttgtcaccgtcagttcaacgcgtatccagaaccctgatcctgccgtgtaccagctgcgggatagcaagagcagcgacaagagcgtgtgtctgttcaccgacttcgacagccagaccaacgtgtcccagagcaaggactccgacgtgtacatcaccgataagaccgtgctggacatgcggagcatggacttcaagagcaactccgccgtggcctggtccaacaagtccgatttcgcctgcgccaacgccttcaacaacagcattatccccgaggacacattcttcccaagccccgagagcagcgactccaccgaccacgtgaagcccaaagagacagagaacaccaagcagcccagcaagagctgccacaagcccaaggccatcgtgcacaccgagaaagtgaacatgatgagcctgaccgtgctgggcctgcggatgctgttcgccaaaaccgtggccgtgaacttcctgctgaccgccaagctgttcttcctc

SEQ ID NO: 38047 - DNA, 2604 bp, synthetic construct
  source 1..2604: mol_type = other DNA
atggccttaccagtgaccgccttgctcctgccgctggccttgctgctccacgccgccaggccgctcgaggaggacctgaagaacgtgttcccacctgaggtggccgtgttcgagcctagcgaggccgagatcagccacacccagaaagccaccctcgtgtgcctggctaccggcttctaccccgaccatgtggaactgtcttggtgggtcaacggcaaagaggtgcacagcggcgtgtgtaccgacccccagccactgaaagaacagcccgccctgaacgacagccggtactgcctgagcagcagactgagagtgtccgccaccttctggcagaacccccggaaccacttcagatgccaggtgcagttctacggcctgagcgagaacgacgagtggacccaggacagagccaagcccgtgacccagatcgtgtctgccgaagcctggggcagagccgattgcggctttaccagcgagagctaccagcagggcgtgctgagcgccaccaacctgagcgtgatcggcttcagaatcctgctgctgaaagtggccggctttaacctgctgatgaccctgcggctgtggtccagcagggccaagcgatctggatctggagcaacaaacttctcactactcaaacaagcaggtgacgtggaggagaatcccgggcctactagcatggccttaccagtgaccgccttgctcctgccgctggccttgctgctccacgccgccaggccggacatccagttgacccagtcccccagctcactcagcgccagtgtgggggaccgggtgaccattacctgtaaagccagtcagagtgtggactatgagggggatagcttcctgaattggtatcagcagaagcctggcaaagccccaaagctgctgatctacgctgcatctaatctggagtcaggcgtgccttctaggttctccggtagtgggtctgggaccgatttcacattgaccatttcatccctccaacccgaggatttcgctacatattactgtcagcagtccaatgaggaccctctcacctttggccagggcaccaaagttgaaattaagagaggcggaggcggaagtggaggcggaggatctggcggcggaggctctgaagtccaacttgtggagtctggagggggcctggtgcagcccggcggctctctcagactgtcttgtgcggcaagcggctacaccttcacctcttactggatagaatgggtgaggcaggcacctggaaagggactggagtggattggagagattctgccaggagggggagatacaaattacaatgaaatcttcaaggggcgggccaccttttcagcggataccagcaagaatacagcttacctgcagatgaatagcctccgggcagaagataccgctgtttattattgcacgagacgggtgccaataagactggactattgggggcaagggactcttgtcaccgtcagttcaacgcgtatccagaaccctgatcctgccgtgtaccagctgcgggatagcaagagcagcgacaagagcgtgtgtctgttcaccgacttcgacagccagaccaacgtgtcccagagcaaggactccgacgtgtacatcaccgataagtgcgtgctggacatgcggagcatggacttcaagagcaactccgccgtggcctggtccaacaagtccgatttcgcctgcgccaacgccttcaacaacagcattatccccgaggacacattcttcccaagccccgagagcagctgcgacgtgaagctggtggaaaagagcttcgagacagacaccaacctgaacttccagatcctgtacgaggtgatcggcttcagaatcctgctgctgaaagtggccggctttaacctgctgatgaccctgcggctgtggtccagccgcgccaagagaagcggatctggcgtgaagcagaccctgaatttcgacctgctgaagctggctggcgacgtggaatccaacccaggcccttctagaggccatatgaccgagtacaagcccacggtgcgcctcgccacccgcgacgacgtccccagggccgtacgcaccctcgccgccgcgttcgccgactaccccgccacgcgccacaccgtcgatccggaccgccacatcgagcgggtcaccgagctgcaagaactcttcctcacgcgcgtcgggctcgacatcggcaaggtgtgggtcgcggacgacggcgccgcggtggcggtctggaccacgccggagagcgtcgaagcgggggcggtgttcgccgagatcggcccgcgcatggccgagttgagcggttcccggctggccgcgcagcaacagatggaaggcctcctggcgccgcaccggcccaaggagcccgcgtggttcctggccaccgtcggcgtctcgcccgaccaccagggcaagggtctgggcagcgccgtcgtgctccccggagtggaggcggccgagcgcgccggggtgcccgccttcctggagacctccgcgccccgcaacctccccttctacgagcggctcggcttcaccgtcaccgccgacgtcgaggtgcccgaaggaccgcgcacctggtgcatgacccgcaagcccggtgcctga

SEQ ID NO: 38048 - DNA, 2604 bp, synthetic construct
  source 1..2604: mol_type = other DNA
atggccttaccagtgaccgccttgctcctgccgctggccttgctgctccacgccgccaggccgctcgagatccagaaccctgatcctgccgtgtaccagctgcgggatagcaagagcagcgacaagagcgtgtgtctgttcaccgacttcgacagccagaccaacgtgtcccagagcaaggactccgacgtgtacatcaccgataagtgcgtgctggacatgcggagcatggacttcaagagcaactccgccgtggcctggtccaacaagtccgatttcgcctgcgccaacgccttcaacaacagcattatccccgaggacacattcttcccaagccccgagagcagctgcgacgtgaagctggtggaaaagagcttcgagacagacaccaacctgaacttccagatcctgtacgaggtgatcggcttcagaatcctgctgctgaaagtggccggctttaacctgctgatgaccctgcggctgtggtccagcagggccaagcgatctggatctggagcaacaaacttctcactactcaaacaagcaggtgacgtggaggagaatcccgggcctactagcatggccttaccagtgaccgccttgctcctgccgctggccttgctgctccacgccgccaggccggacatccagttgacccagtcccccagctcactcagcgccagtgtgggggaccgggtgaccattacctgtaaagccagtcagagtgtggactatgagggggatagcttcctgaattggtatcagcagaagcctggcaaagccccaaagctgctgatctacgctgcatctaatctggagtcaggcgtgccttctaggttctccggtagtgggtctgggaccgatttcacattgaccatttcatccctccaacccgaggatttcgctacatattactgtcagcagtccaatgaggaccctctcacctttggccagggcaccaaagttgaaattaagagaggcggaggcggaagtggaggcggaggatctggcggcggaggctctgaagtccaacttgtggagtctggagggggcctggtgcagcccggcggctctctcagactgtcttgtgcggcaagcggctacaccttcacctcttactggatagaatgggtgaggcaggcacctggaaagggactggagtggattggagagattctgccaggagggggagatacaaattacaatgaaatcttcaaggggcgggccaccttttcagcggataccagcaagaatacagcttacctgcagatgaatagcctccgggcagaagataccgctgtttattattgcacgagacgggtgccaataagactggactattgggggcaagggactcttgtcaccgtcagttcaacgcgtgaggacctgaagaacgtgttcccacctgaggtggccgtgttcgagcctagcgaggccgagatcagccacacccagaaagccaccctcgtgtgcctggctaccggcttctaccccgaccatgtggaactgtcttggtgggtcaacggcaaagaggtgcacagcggcgtgtgtaccgacccccagccactgaaagaacagcccgccctgaacgacagccggtactgcctgagcagcagactgagagtgtccgccaccttctggcagaacccccggaaccacttcagatgccaggtgcagttctacggcctgagcgagaacgacgagtggacccaggacagagccaagcccgtgacccagatcgtgtctgccgaagcctggggcagagccgattgcggctttaccagcgagagctaccagcagggcgtgctgagcgccaccaacctgagcgtgatcggcttcagaatcctgctgctgaaagtggccggctttaacctgctgatgaccctgcggctgtggtccagccgcgccaagagaagcggatctggcgtgaagcagaccctgaatttcgacctgctgaagctggctggcgacgtggaatccaacccaggcccttctagaggccatatgaccgagtacaagcccacggtgcgcctcgccacccgcgacgacgtccccagggccgtacgcaccctcgccgccgcgttcgccgactaccccgccacgcgccacaccgtcgatccggaccgccacatcgagcgggtcaccgagctgcaagaactcttcctcacgcgcgtcgggctcgacatcggcaaggtgtgggtcgcggacgacggcgccgcggtggcggtctggaccacgccggagagcgtcgaagcgggggcggtgttcgccgagatcggcccgcgcatggccgagttgagcggttcccggctggccgcgcagcaacagatggaaggcctcctggcgccgcaccggcccaaggagcccgcgtggttcctggccaccgtcggcgtctcgcccgaccaccagggcaagggtctgggcagcgccgtcgtgctccccggagtggaggcggccgagcgcgccggggtgcccgccttcctggagacctccgcgccccgcaacctccccttctacgagcggctcggcttcaccgtcaccgccgacgtcgaggtgcccgaaggaccgcgcacctggtgcatgacccgcaagcccggtgcctga

SEQ ID NO: 38049 - DNA, 2604 bp, synthetic construct; identical to SEQ ID NO: 38047
  source 1..2604: mol_type = other DNA

SEQ ID NO: 38050 - DNA, 2928 bp, synthetic construct
  source 1..2928: mol_type = other DNA
atggccttaccagtgaccgccttgctcctgccgctggccttgctgctccacgccgccaggccgctcgaggaggacctgaagaacgtgttcccacctgaggtggccgtgttcgagcctagcgaggccgagatcagccacacccagaaagccaccctcgtgtgcctggctaccggcttctaccccgaccatgtggaactgtcttggtgggtcaacggcaaagaggtgcacagcggcgtgtctaccgacccccagccactgaaagaacagcccgccctgaacgacagccggtactgcctgagcagcagactgagagtgtccgccaccttctggcagaacccccggaaccacttcagatgccaggtgcagttctacggcctgagcgagaacgacgagtggacccaggacagagccaagcccgtgacccagatcgtgtctgccgaagcctggggcagagccgatgatgtgattaagatccactggcaggaaaagaagtccaacaccatcctgggcagccaggaaggcaacaccatgaagaccaacgacacctacatgaagttcagctggctgaccgtgcccgagaagtccctggacaaagaacacagatgcatcgtgcggcacgaaaacaacaagaacggcgtggaccaggaaatcatcttcccacccatcaagaccgatgtgattacaatggaccccaaggacaactgctccaaggacgccaacgataccctgctgctccagctgaccaacaccagcgcctactacatgtacttgttgctgctgctgaagtccgtggtgtacttcgccatcatcacatgctgcctgctgatggctatggtcaagcggaaggacagccggggaagggccaagcgatctggatctggagcaacaaacttctcactactcaaacaagcaggtgacgtggaggagaatcccgggcctactagcatggccttaccagtgaccgccttgctcctgccgctggccttgctgctccacgccgccaggccggacatccagttgacccagtcccccagctcactcagcgccagtgtgggggaccgggtgaccattacctgtaaagccagtcagagtgtggactatgagggggatagcttcctgaattggtatcagcagaagcctggcaaagccccaaagctgctgatctacgctgcatctaatctggagtcaggcgtgccttctaggttctccggtagtgggtctgggaccgatttcacattgaccatttcatccctccaacccgaggatttcgctacatattactgtcagcagtccaatgaggaccctctcacctttggccagggcaccaaagttgaaattaagagaggcggaggcggaagtggaggcggaggatctggcggcggaggctctgaagtccaacttgtggagtctggagggggcctggtgcagcccggcggctctctcagactgtcttgtgcggcaagcggctacaccttcacctcttactggatagaatgggtgaggcaggcacctggaaagggactggagtggattggagagattctgccaggagggggagatacaaattacaatgaaatcttcaaggggcgggccaccttttcagcggataccagcaagaatacagcttacctgcagatgaatagcctccgggcagaagataccgctgtttattattgcacgagacgggtgccaataagactggactattgggggcaagggactcttgtcaccgtcagttcaacgcgtatccagaaccctgatcctgccgtgtaccagctgcgggatagcaagagcagcgacaagagcgtgtgtctgttcaccgacttcgacagccagaccaacgtgtcccagagcaaggactccgacgtgtacatcaccgataagaccgtgctggacatgcggagcatggacttcaagagcaactccgccgtggcctggtccaacaagtccgatttcgcctgcgccaacgccttcaacaacagcattatccccgaggacacattcttcccaagccccgagagcagcgactccaccgaccacgtgaagcccaaagagacagagaacaccaagcagcccagcaagagctgccacaagcccaaggccatcgtgcacaccgagaaagtgaacatgatgagcctgaccgtgctgggcctgcggatgctgttcgccaaaaccgtggccgtgaacttcctgctgaccgccaagctgttcttcctcctcaccgcccgcgccaagagaagcggatctggcgtgaagcagaccctgaatttcgacctgctgaagctggctggcgacgtggaatccaacccaggcccttctagaggccatatgaccgagtacaagcccacggtgcgcctcgccacccgcgacgacgtccccagggccgtacgcaccctcgccgccgcgttcgccgactaccccgccacgcgccacaccgtcgatccggaccgccacatcgagcgggtcaccgagctgcaagaactcttcctcacgcgcgtcgggctcgacatcggcaaggtgtgggtcgcggacgacggcgccgcggtggcggtctggaccacgccggagagcgtcgaagcgggggcggtgttcgccgagatcggcccgcgcatggccgagttgagcggttcccggctggccgcgcagcaacagatggaaggcctcctggcgccgcaccggcccaaggagcccgcgtggttcctggccaccgtcggcgtctcgcccgaccaccagggcaagggtctgggcagcgccgtcgtgctccccggagtggaggcggccgagcgcgccggggtgcccgccttcctggagacctccgcgccccgcaacctccccttctacgagcggctcggcttcaccgtcaccgccgacgtcgaggtgcccgaaggaccgcgcacctggtgcatgacccgcaagcccggtgcctga

SEQ ID NO: 38051 - DNA, 2928 bp, synthetic construct
  source 1..2928: mol_type = other DNA
atggccttaccagtgaccgccttgctcctgccgctggccttgctgctccacgccgccaggccgctcgagatccagaaccctgatcctgccgtgtaccagctgcgggatagcaagagcagcgacaagagcgtgtgtctgttcaccgacttcgacagccagaccaacgtgtcccagagcaaggactccgacgtgtacatcaccgataagaccgtgctggacatgcggagcatggacttcaagagcaactccgccgtggcctggtccaacaagtccgatttcgcctgcgccaacgccttcaacaacagcattatccccgaggacacattcttcccaagccccgagagcagcgactccaccgaccacgtgaagcccaaagagacagagaacaccaagcagcccagcaagagctgccacaagcccaaggccatcgtgcacaccgagaaagtgaacatgatgagcctgaccgtgctgggcctgcggatgctgttcgccaaaaccgtggccgtgaacttcctgctgaccgccaagctgttcttcctcctcaccgccagggccaagcgatctggatctggagcaacaaacttctcactactcaaacaagcaggtgacgtggaggagaatcccgggcctactagcatggccttaccagtgaccgccttgctcctgccgctggccttgctgctccacgccgccaggccggacatccagttgacccagtcccccagctcactcagcgccagtgtgggggaccgggtgaccattacctgtaaagccagtcagagtgtggactatgagggggatagcttcctgaattggtatcagcagaagcctggcaaagccccaaagctgctgatctacgctgcatctaatctggagtcaggcgtgccttctaggttctccggtagtgggtctgggaccgatttcacattgaccatttcatccctccaacccgaggatttcgctacatattactgtcagcagtccaatgaggaccctctcacctttggccagggcaccaaagttgaaattaagagaggcggaggcggaagtggaggcggaggatctggcggcggaggctctgaagtccaacttgtggagtctggagggggcctggtgcagcccggcggctctctcagactgtcttgtgcggcaagcggctacaccttcacctcttactggatagaatgggtgaggcaggcacctggaaagggactggagtggattggagagattctgccaggagggggagatacaaattacaatgaaatcttcaaggggcgggccaccttttcagcggataccagcaagaatacagcttacctgcagatgaatagcctccgggcagaagataccgctgtttattattgcacgagacgggtgccaataagactggactattgggggcaagggactcttgtcaccgtcagttcaacgcgtgaggacctgaagaacgtgttcccacctgaggtggccgtgttcgagcctagcgaggccgagatcagccacacccagaaagccaccctcgtgtgcctggctaccggcttctaccccgaccatgtggaactgtcttggtgggtcaacggcaaagaggtgcacagcggcgtgtctaccgacccccagccactgaaagaacagcccgccctgaacgacagccggtactgcctgagcagcagactgagagtgtccgccaccttctggcagaacccccggaaccacttcagatgccaggtgcagttctacggcctgagcgagaacgacgagtggacccaggacagagccaagcccgtgacccagatcgtgtctgccgaagcctggggcagagccgatgatgtgattaagatccactggcaggaaaagaagtccaacaccatcctgggcagccaggaaggcaacaccatgaagaccaacgacacctacatgaagttcagctggctgaccgtgcccgagaagtccctggacaaagaacacagatgcatcgtgcggcacgaaaacaacaagaacggcgtggaccaggaaatcatcttcccacccatcaagaccgatgtgattacaatggaccccaaggacaactgctccaaggacgccaacgataccctgctgctccagctgaccaacaccagcgcctactacatgtacttgttgctgctgctgaagtccgtggtgtacttcgccatcatcacatgctgcctgctgatggctatggtcaagcggaaggacagccggggacgcgccaagagaagcggatctggcgtgaagcagaccctgaatttcgacctgctgaagctggctggcgacgtggaatccaacccaggcccttctagaggccatatgaccgagtacaagcccacggtgcgcctcgccacccgcgacgacgtccccagggccgtacgcaccctcgccgccgcgttcgccgactaccccgccacgcgccacaccgtcgatccggaccgccacatcgagcgggtcaccgagctgcaagaactcttcctcacgcgcgtcgggctcgacatcggcaaggtgtgggtcgcggacgacggcgccgcggtggcggtctggaccacgccggagagcgtcgaagcgggggcggtgttcgccgagatcggcccgcgcatggccgagttgagcggttcccggctggccgcgcagcaacagatggaaggcctcctggcgccgcaccggcccaaggagcccgcgtggttcctggccaccgtcggcgtctcgcccgaccaccagggcaagggtctgggcagcgccgtcgtgctccccggagtggaggcggccgagcgcgccggggtgcccgccttcctggagacctccgcgccccgcaacctccccttctacgagcggctcggcttcaccgtcaccgccgacgtcgaggtgcccgaaggaccgcgcacctggtgcatgacccgcaagcccggtgcctga

SEQ ID NO: 38052 - DNA, 2922 bp, synthetic construct
  source 1..2922: mol_type = other DNA
atggccttaccagtgaccgccttgctcctgccgctggccttgctgctccacgccgccaggccgctcgaggaggacctgaagaacgtgttcccacctgaggtggccgtgttcgagcctagcgaggccgagatcagccacacccagaaagccaccctcgtgtgcctggctaccggcttctaccccgaccatgtggaactgtcttggtgggtcaacggcaaagaggtgcacagcggcgtgtgtaccgacccccagccactgaaagaacagcccgccctgaacgacagccggtactgcctgagcagcagactgagagtgtccgccaccttctggcagaacccccggaaccacttcagatgccaggtgcagttctacggcctgagcgagaacgacgagtggacccaggacagagccaagcccgtgacccagatcgtgtctgccgaagcctggggcagagccgatgatgtgattaagatccactggcaggaaaagaagtccaacaccatcctgggcagccaggaaggcaacaccatgaagaccaacgacacctacatgaagttcagctggctgaccgtgcccgagaagtccctggacaaagaacacagatgcatcgtgcggcacgaaaacaacaagaacggcgtggaccaggaaatcatcttcccacccatcaagaccgatgtgattacaatggaccccaaggacaactgctccaaggacgccaacgataccctgctgctccagctgaccaacaccagcgcctactacatgtacttgttgctgctgctgaagtccgtggtgtacttcgccatcatcacatgctgcctgctgcggagaaccgccttctgctgcaacggcgagaagtctagggccaagcgatctggatctggagcaacaaacttctcactactcaaacaagcaggtgacgtggaggagaatcccgggcctactagcatggccttaccagtgaccgccttgctcctgccgctggccttgctgctccacgccgccaggccggacatccagttgacccagtcccccagctcactcagcgccagtgtgggggaccgggtgaccattacctgtaaagccagtcagagtgtggactatgagggggatagcttcctgaattggtatcagcagaagcctggcaaagccccaaagctgctgatctacgctgcatctaatctggagtcaggcgtgccttctaggttctccggtagtgggtctgggaccgatttcacattgaccatttcatccctccaacccgaggatttcgctacatattactgtcagcagtccaatgaggaccctctcacctttggccagggcaccaaagttgaaattaagagaggcggaggcggaagtggaggcggaggatctggcggcggaggctctgaagtccaacttgtggagtctggagggggcctggtgcagcccggcggctctctcagactgtcttgtgcggcaagcggctacaccttcacctcttactggatagaatgggtgaggcaggcacctggaaagggactggagtggattggagagattctgccaggagggggagatacaaattacaatgaaatcttcaaggggcgggccaccttttcagcggataccagcaagaatacagcttacctgcagatgaatagcctccgggcagaagataccgctgtttattattgcacgagacgggtgccaataagactggactattgggggcaagggactcttgtcaccgtcagttcaacgcgtatccagaaccctgatcctgccgtgtaccagctgcgggatagcaagagcagcgacaagagcgtgtgtctgttcaccgacttcgacagccagaccaacgtgtcccagagcaaggactccgacgtgtacatcaccgataagtgcgtgctggacatgcggagcatggacttcaagagcaactccgccgtggcctggtccaacaagtccgatttcgcctgcgccaacgccttcaacaacagcattatccccgaggacacattcttcccaagccccgagagcagcgactccaccgaccacgtgaagcccaaagagacagagaacaccaagcagcccagcaagagctgccacaagcccaaggccatcgtgcacaccgagaaagtgaacatgatgagcctgaccgtgctgggcctgcggatgctgttcgccaaaaccgtggccgtgaacttcctgctgaccgccaagctgttcttcctccgcgccaagagaagcggatctggcgtgaagcagaccctgaatttcgacctgctgaagctggctggcgacgtggaatccaacccaggcccttctagaggccatatgaccgagtacaagcccacggtgcgcctcgccacccgcgacgacgtccccagggccgtacgcaccctcgccgccgcgttcgccgactaccccgccacgcgccacaccgtcgatccggaccgccacatcgagcgggtcaccgagctgcaagaactcttcctcacgcgcgtcgggctcgacatcggcaaggtgtgggtcgcggacgacggcgccgcggtggcggtctggaccacgccggagagcgtcgaagcgggggcggtgttcgccgagatcggcccgcgcatggccgagttgagcggttcccggctggccgcgcagcaacagatggaaggcctcctggcgccgcaccggcccaaggagcccgcgtggttcctggccaccgtcggcgtctcgcccgaccaccagggcaagggtctgggcagcgccgtcgtgctccccggagtggaggcggccgagcgcgccggggtgcccgccttcctggagacctccgcgccccgcaacctccccttctacgagcggctcggcttcaccgtcaccgccgacgtcgaggtgcccgaaggaccgcgcacctggtgcatgacccgcaagcccggtgcctga

SEQ ID NO: 38053 - DNA, 2922 bp, synthetic construct
  source 1..2922: mol_type = other DNA
atggccttaccagtgaccgccttgctcctgccgctggccttgctgctccacgccgccaggccgctcgagatccagaaccctgatcctgccgtgtaccagctgcgggatagcaagagcagcgacaagagcgtgtgtctgttcaccgacttcgacagccagaccaacgtgtcccagagcaaggactccgacgtgtacatcaccgataagtgcgtgctggacatgcggagcatggacttcaagagcaactccgccgtggcctggtccaacaagtccgatttcgcctgcgccaacgccttcaacaacagcattatccccgaggacacattcttcccaagccccgagagcagcgactccaccgaccacgtgaagcccaaagagacagagaacaccaagcagcccagcaagagctgccacaagcccaaggccatcgtgcacaccgagaaagtgaacatgatgagcctgaccgtgctgggcctgcggatgctgttcgccaaaaccgtggccgtgaacttcctgctgaccgccaagctgttcttcctcagggccaagcgatctggatctggagcaacaaacttctcactactcaaacaagcaggtgacgtggaggagaatcccgggcctactagcatggccttaccagtgaccgccttgctcctgccgctggccttgctgctccacgccgccaggccggacatccagttgacccagtcccccagctcactcagcgccagtgtgggggaccgggtgaccattacctgtaaagccagtcagagtgtggactatgagggggatagcttcctgaattggtatcagcagaagcctggcaaagccccaaagctgctgatctacgctgcatctaatctggagtcaggcgtgccttctaggttctccggtagtgggtctgggaccgatttcacattgaccatttcatccctccaacccgaggatttcgctacatattactgtcagcagtccaatgaggaccctctcacctttggccagggcaccaaagttgaaattaagagaggcggaggcggaagtggaggcggaggatctggcggcggaggctctgaagtccaacttgtggagtctggagggggcctggtgcagcccggcggctctctcagactgtcttgtgcggcaagcggctacaccttcacctcttactggatagaatgggtgaggcaggcacctggaaagggactggagtggattggagagattctgccaggagggggagatacaaattacaatgaaatcttcaaggggcgggccaccttttcagcggataccagcaagaatacagcttacctgcagatgaatagcctccgggcagaagataccgctgtttattattgcacgagacgggtgccaataagactggactattgggggcaagggactcttgtcaccgtcagttcaacgcgtgaggacctgaagaacgtgttcccacctgaggtggccgtgttcgagcctagcgaggccgagatcagccacacccagaaagccaccctcgtgtgcctggctaccggcttctaccccgaccatgtggaactgtcttggtgggtcaacggcaaagaggtgcacagcggcgtgtgtaccgacccccagccactgaaagaacagcccgccctgaacgacagccggtactgcctgagcagcagactgagagtgtccgccaccttctggcagaacccccggaaccacttcagatgccaggtgcagttctacggcctgagcgagaacgacgagtggacccaggacagagccaagcccgtgacccagatcgtgtctgccgaagcctggggcagagccgatgatgtgattaagatccactggcaggaaaagaagtccaacaccatcctgggcagccaggaaggcaacaccatgaagaccaacgacacctacatgaagttcagctggctgaccgtgcccgagaagtccctggacaaagaacacagatgcatcgtgcggcacgaaaacaacaagaacggcgtggaccaggaaatcatcttcccacccatcaagaccgatgtgattacaatggaccccaaggacaactgctccaaggacgccaacgataccctgctgctccagctgaccaacaccagcgcctactacatgtacttgttgctgctgctgaagtccgtggtgtacttcgccatcatcacatgctgcctgctgcggagaaccgccttctgctgcaacggcgagaagtctcgcgccaagagaagcggatctggcgtgaagcagaccctgaatttcgacctgctgaagctggctggcgacgtggaatccaacccaggcccttctagaggccatatgaccgagtacaagcccacggtgcgcctcgccacccgcgacgacgtccccagggccgtacgcaccctcgccgccgcgttcgccgactaccccgccacgcgccacaccgtcgatccggaccgccacatcgagcgggtcaccgagctgcaagaactcttcctcacgcgcgtcgggctcgacatcggcaaggtgtgggtcgcggacgacggcgccgcggtggcggtctggaccacgccggagagcgtcgaagcgggggcggtgttcgccgagatcggcccgcgcatggccgagttgagcggttcccggctggccgcgcagcaacagatggaaggcctcctggcgccgcaccggcccaaggagcccgcgtggttcctggccaccgtcggcgtctcgcccgaccaccagggcaagggtctgggcagcgccgtcgtgctccccggagtggaggcggccgagcgcgccggggtgcccgccttcctggagacctccgcgccccgcaacctccccttctacgagcggctcggcttcaccgtcaccgccgacgtcgaggtgcccgaaggaccgcgcacctggtgcatgacccgcaagcccggtgcctga

SEQ ID NO: 38054 - DNA, 2922 bp, synthetic construct
  source 1..2922: mol_type = other DNA
atggccttaccagtgaccgccttgctcctgccgctggccttgctgctccacgccgccaggccgctcgaggaggacctgaagaacgtgttcccacctgaggtggccgtgttcgagcctagcgaggccgagatcagccacacccagaaagccaccctcgtgtgcctggctaccggcttctaccccgaccatgtggaactgtcttggtgggtcaacggcaaagaggtgcacagcggcgtgtctaccgacccccagccactgaaagaacagcccgccctgaacgacagccggtactgcctgagcagcagactgagagtgtccgccaccttctggcagaacccccggaaccacttcagatgccaggtgcagttctacggcctgagcgagaacgacgagtggacccaggacagagccaagcccgtgacccagatcgtgtctgccgaagcctggggcagagccgatgatgtgattaagatccactggcaggaaaagaagtccaacaccatcctgggcagccaggaaggcaacaccatgaagaccaacgacacctacatgaagttcagctggctgaccgtgcccgagaagtccctggacaaagaacacagatgcatcgtgcggcacgaaaacaacaagaacggcgtggaccaggaaatcatcttcccacccatcaagaccgatgtgattacaatggaccccaaggacaactgctccaaggacgccaacgataccctgctgctccagctgaccaacaccagcgcctactacatgtacttgttgctgctgctgaagtccgtggtgtacttcgccatcatcacatgctgcctgctgcggagaaccgccttctgctgcaacggcgagaagtctagggccaagcgatctggatctggagcaacaaacttctcactactcaaacaagcaggtgacgtggaggagaatcccgggcctactagcatggccttaccagtgaccgccttgctcctgccgctggccttgctgctccacgccgccaggccggacatccagttgacccagtcccccagctcactcagcgccagtgtgggggaccgggtgaccattacctgtaaagccagtcagagtgtggactatgagggggatagcttcctgaattggtatcagcagaagcctggcaaagccccaaagctgctgatctacgctgcatctaatctggagtcaggcgtgccttctaggttctccggtagtgggtctgggaccgatttcacattgaccatttcatccctccaacccgaggatttcgctacatattactgtcagcagtccaatgaggaccctctcacctttggccagggcaccaaagttgaaattaagagaggcggaggcggaagtggaggcggaggatctggcggcggaggctctgaagtccaacttgtggagtctggagggggcctggtgcagcccggcggctctctcagactgtcttgtgcggcaagcggctacaccttcacctcttactggatagaatgggtgaggcaggcacctggaaagggactggagtggattggagagattctgccaggagggggagatacaaattacaatgaaatcttcaaggggcgggccaccttttcagcggataccagcaagaatacagcttacctgcagatgaatagcctccgggcagaagataccgctgtttattattgcacgagacgggtgccaataagactggactattgggggcaagggactcttgtcaccgtcagttcaacgcgtatccagaaccctgatcctgccgtgtaccagctgcgggatagcaagagcagcgacaagagcgtgtgtctgttcaccgacttcgacagccagaccaacgtgtcccagagcaaggactccgacgtgtacatcaccgataagaccgtgctggacatgcggagcatggacttcaagagcaactccgccgtggcctggtccaacaagtccgatttcgcctgcgccaacgccttcaacaacagcattatccccgaggacacattcttcccaagccccgagagcagcgactccaccgaccacgtgaagcccaaagagacagagaacaccaagcagcccagcaagagctgccacaagcccaaggccatcgtgcacaccgagaaagtgaacatgatgagcctgaccgtgctgggcctgcggatgctgttcgccaaaaccgtggccgtgaacttcctgctgaccgccaagctgttcttcctccgcgccaagagaagcggatctggcgtgaagcagaccctgaatttcgacctgctgaagctggctggcgacgtggaatccaacccaggcccttctagaggccatatgaccgagtacaagcccacggtgcgcctcgccacccgcgacgacgtccccagggccgtacgcaccctcgccgccgcgttcgccgactaccccgccacgcgccacaccgtcgatccggaccgccacatcgagcgggtcaccgagctgcaagaactcttcctcacgcgcgtcgggctcgacatcggcaaggtgtgggtcgcggacgacggcgccgcggtggcggtctggaccacgccggagagcgtcgaagcgggggcggtgttcgccgagatcggcccgcgcatggccgagttgagcggttcccggctggccgcgcagcaacagatggaaggcctcctggcgccgcaccggcccaaggagcccgcgtggttcctggccaccgtcggcgtctcgcccgaccaccagggcaagggtctgggcagcgccgtcgtgctccccggagtggaggcggccgagcgcgccggggtgcccgccttcctggagacctccgcgccccgcaacctccccttctacgagcggctcggcttcaccgtcaccgccgacgtcgaggtgcccgaaggaccgcgcacctggtgcatgacccgcaagcccggtgcctga

SEQ ID NO: 38055 - DNA, 2922 bp, synthetic construct
  source 1..2922: mol_type = other DNA
atggccttaccagtgaccgccttgctcctgccgctggccttgctgctccacgccgccaggccgctcgagatccagaaccctgatcctgccgtgtaccagctgcgggatagcaagagcagcgacaagagcgtgtgtctgttcaccgacttcgacagccagaccaacgtgtcccagagcaaggactccgacgtgtacatcaccgataagaccgtgctggacatgcggagcatggacttcaagagcaactccgccgtggcctggtccaacaagtccgatttcgcctgcgccaacgccttcaacaacagcattatccccgaggacacattcttcccaagccccgagagcagcgactccaccgaccacgtgaagcccaaagagacagagaacaccaagcagcccagcaagagctgccacaagcccaaggccatcgtgcacaccgagaaagtgaacatgatgagcctgaccgtgctgggcctgcggatgctgttcgccaaaaccgtggccgtgaacttcctgctgaccgccaagctgttcttcctcagggccaagcgatctggatctggagcaacaaacttctcactactcaaacaagcaggtgacgtggaggagaatcccgggcctactagcatggccttaccagtgaccgccttgctcctgccgctggccttgctgctccacgccgccaggccggacatccagttgacccagtcccccagctcactcagcgccagtgtgggggaccgggtgaccattacctgtaaagccagtcagagtgtggactatgagggggatagcttcctgaattggtatcagcagaagcctggcaaagccccaaagctgctgatctacgctgcatctaatctggagtcaggcgtgccttctaggttctccggtagtgggtctgggaccgatttcacattgaccatttcatccctccaacccgaggatttcgctacatattactgtcagcagtccaatgaggaccctctcacctttggccagggcaccaaagttgaaattaagagaggcggaggcggaagtggaggcggaggatctggcggcggaggctctgaagtccaacttgtggagtctggagggggcctggtgcagcccggcggctctctcagactgtcttgtgcggcaagcggctacaccttcacctcttactggatagaatgggtgaggcaggcacctggaaagggactggagtggattggagagattctgccaggagggggagatacaaattacaatgaaatcttcaaggggcgggccaccttttcagcggataccagcaagaatacagcttacctgcagatgaatagcctccgggcagaagataccgctgtttattattgcacgagacgggtgccaataagactggactattgggggcaagggactcttgtcaccgtcagttcaacgcgtgaggacctgaagaacgtgttcccacctgaggtggccgtgttcgagcctagcgaggccgagatcagccacacccagaaagccaccctcgtgtgcctggctaccggcttctaccccgaccatgtggaactgtcttggtgggtcaacggcaaagaggtgcacagcggcgtgtctaccgacccccagccactgaaagaacagcccgccctgaacgacagccggtactgcctgagcagcagactgagagtgtccgccaccttctggcagaacccccggaaccacttcagatgccaggtgcagttctacggcctgagcgagaacgacgagtggacccaggacagagccaagcccgtgacccagatcgtgtctgccgaagcctggggcagagccgatgatgtgattaagatccactggcaggaaaagaagtccaacaccatcctgggcagccaggaaggcaacaccatgaagaccaacgacacctacatgaagttcagctggctgaccgtgcccgagaagtccctggacaaagaacacagatgcatcgtgcggcacgaaaacaacaagaacggcgtggaccaggaaatcatcttcccacccatcaagaccgatgtgattacaatggaccccaaggacaactgctccaaggacgccaacgataccctgctgctccagctgaccaacaccagcgcctactacatgtacttgttgctgctgctgaagtccgtggtgtacttcgccatcatcacatgctgcctgctgcggagaaccgccttctgctgcaacggcgagaagtctcgcgccaagagaagcggatctggcgtgaagcagaccctgaatttcgacctgctgaagctggctggcgacgtggaatccaacccaggcccttctagaggccatatgaccgagtacaagcccacggtgcgcctcgccacccgcgacgacgtccccagggccgtacgcaccctcgccgccgcgttcgccgactaccccgccacgcgccacaccgtcgatccggaccgccacatcgagcgggtcaccgagctgcaagaactcttcctcacgcgcgtcgggctcgacatcggcaaggtgtgggtcgcggacgacggcgccgcggtggcggtctggaccacgccggagagcgtcgaagcgggggcggtgttcgccgagatcggcccgcgcatggccgagttgagcggttcccggctggccgcgcagcaacagatggaaggcctcctggcgccgcaccggcccaaggagcccgcgtggttcctggccaccgtcggcgtctcgcccgaccaccagggcaagggtctgggcagcgccgtcgtgctccccggagtggaggcggccgagcgcgccggggtgcccgccttcctggagacctccgcgccccgcaacctccccttctacgagcggctcggcttcaccgtcaccgccgacgtcgaggtgcccgaaggaccgcgcacctggtgcatgacccgcaagcccggtgcctga

SEQ ID NO: 38056 - DNA, 2616 bp, synthetic construct
  source 1..2616: mol_type = other DNA
atggccttaccagtgaccgccttgctcctgccgctggccttgctgctccacgccgccaggccgctcgaggaggacctgaagaacgtgttcccacctgaggtggccgtgttcgagcctagcaaggccgagatcgcccacacccagaaagccaccctcgtgtgcctggctaccggcttctaccccgaccatgtggaactgtcttggtgggtcaacggcaaagaggtgcacagcggcgtgtgtaccgacccccagccactgaaagaacagcccgccctgaacgacagccggtactgcctgagcagcagactgagagtgtccgccaccttctggcagaacccccggaaccacttcagatgccaggtgcagttctacggcctgagcgagaacgacgagtggacccaggacagagccaagcccgtgacccagatcgtgtctgccgaagcctggggcagagccgattgcggcatcaccagcgccagctaccaccagggcgtgctgagcgccaccatcctgtacgagatcctgctgggcaaggccaccctgtacgccgtgctggtgtctgccctggtgctgatggctatggtcaagcggaaggacagccggggaagggccaagcgatctggatctggagcaacaaacttctcactactcaaacaagcaggtgacgtggaggagaatcccgggcctactagcatggccttaccagtgaccgccttgctcctgccgctggccttgctgctccacgccgccaggccggacatccagttgacccagtcccccagctcactcagcgccagtgtgggggaccgggtgaccattacctgtaaagccagtcagagtgtggactatgagggggatagcttcctgaattggtatcagcagaagcctggcaaagccccaaagctgctgatctacgctgcatctaatctggagtcaggcgtgccttctaggttctccggtagtgggtctgggaccgatttcacattgaccatttcatccctccaacccgaggatttcgctacatattactgtcagcagtccaatgaggaccctctcacctttggccagggcaccaaagttgaaattaagagaggcggaggcggaagtggaggcggaggatctggcggcggaggctctgaagtccaacttgtggagtctggagggggcctggtgcagcccggcggctctctcagactgtcttgtgcggcaagcggctacaccttcacctcttactggatagaatgggtgaggcaggcacctggaaagggactggagtggattggagagattctgccaggagggggagatacaaattacaatgaaatcttcaaggggcgggccaccttttcagcggataccagcaagaatacagcttacctgcagatgaatagcctccgggcagaagataccgctgtttattattgcacgagacgggtgccaataagactggactattgggggcaagggactcttgtcaccgtcagttcaacgcgtatccagaaccctgatcctgccgtgtaccagctgcgggatagcaagagcagcgacaagagcgtgtgtctgttcaccgacttcgacagccagaccaacgtgtcccagagcaaggactccgacgtgtacatcaccgataagtgcgtgctggacatgcggagcatggacttcaagagcaactccgccgtggcctggtccaacaagtccgatttcgcctgcgccaacgccttcaacaacagcattatccccgaggacacattcttcccaagcagcgacgtgccctgcgacgtgaagctggtggaaaagagcttcgagacagacaccaacctgaacttccagaacctgagcgtgatcggcttcagaatcctgctgctgaaagtggccggctttaacctgctgatgaccctgcggctgtggtccagccgcgccaagagaagcggatctggcgtgaagcagaccctgaatttcgacctgctgaagctggctggcgacgtggaatccaacccaggcccttctagaggccatatgaccgagtacaagcccacggtgcgcctcgccacccgcgacgacgtccccagggccgtacgcaccctcgccgccgcgttcgccgactaccccgccacgcgccacaccgtcgatccggaccgccacatcgagcgggtcaccgagctgcaagaactcttcctcacgcgcgtcgggctcgacatcggcaaggtgtgggtcgcggacgacggcgccgcggtggcggtctggaccacgccggagagcgtcgaagcgggggcggtgttcgccgagatcggcccgcgcatggccgagttgagcggttcccggctggccgcgcagcaacagatggaaggcctcctggcgccgcaccggcccaaggagcccgcgtggttcctggccaccgtcggcgtctcgcccgaccaccagggcaagggtctgggcagcgccgtcgtgctccccggagtggaggcggccgagcgcgccggggtgcccgccttcctggagacctccgcgccccgcaacctccccttctacgagcggctcggcttcaccgtcaccgccgacgtcgaggtgcccgaaggaccgcgcacctggtgcatgacccgcaagcccggtgcctga

SEQ ID NO: 38057 - DNA, 2616 bp, synthetic construct
  source 1..2616: mol_type = other DNA
atggccttaccagtgaccgccttgctcctgccgctggccttgctgctccacgccgccaggccgctcgagatccagaaccctgatcctgccgtgtaccagctgcgggatagcaagagcagcgacaagagcgtgtgtctgttcaccgacttcgacagccagaccaacgtgtcccagagcaaggactccgacgtgtacatcaccgataagtgcgtgctggacatgcggagcatggacttcaagagcaactccgccgtggcctggtccaacaagtccgatttcgcctgcgccaacgccttcaacaacagcattatccccgaggacacattcttcccaagcagcgacgtgccctgcgacgtgaagctggtggaaaagagcttcgagacagacaccaacctgaacttccagaacctgagcgtgatcggcttcagaatcctgctgctgaaagtggccggctttaacctgctgatgaccctgcggctgtggtccagcagggccaagcgatctggatctggagcaacaaacttctcactactcaaacaagcaggtgacgtggaggagaatcccgggcctactagcatggccttaccagtgaccgccttgctcctgccgctggccttgctgctccacgccgccaggccggacatccagttgacccagtcccccagctcactcagcgccagtgtgggggaccgggtgaccattacctgtaaagccagtcagagtgtggactatgagggggatagcttcctgaattggtatcagcagaagcctggcaaagccccaaagctgctgatctacgctgcatctaatctggagtcaggcgtgccttctaggttctccggtagtgggtctgggaccgatttcacattgaccatttcatccctccaacccgaggatttcgctacatattactgtcagcagtccaatgaggaccctctcacctttggccagggcaccaaagttgaaattaagagaggcggaggcggaagtggaggcggaggatctggcggcggaggctctgaagtccaacttgtggagtctggagggggcctggtgcagcccggcggctctctcagactgtcttgtgcggcaagcggctacaccttcacctcttactggatagaatgggtgaggcaggcacctggaaagggactggagtggattggagagattctgccaggagggggagatacaaattacaatgaaatcttcaaggggcgggccaccttttcagcggataccagcaagaatacagcttacctgcagatgaatagcctccgggcagaagataccgctgtttattattgcacgagacgggtgccaataagactggactattgggggcaagggactcttgtcaccgtcagttcaacgcgtgaggacctgaagaacgtgttcccacctgaggtggccgtgttcgagcctagcaaggccgagatcgcccacacccagaaagccaccctcgtgtgcctggctaccggcttctaccccgaccatgtggaactgtcttggtgggtcaacggcaaagaggtgcacagcggcgtgtgtaccgacccccagccactgaaagaacagcccgccctgaacgacagccggtactgcctgagcagcagactgagagtgtccgccaccttctggcagaacccccggaaccacttcagatgccaggtgcagttctacggcctgagcgagaacgacgagtggacccaggacagagccaagcccgtgacccagatcgtgtctgccgaagcctggggcagagccgattgcggcatcaccagcgccagctaccaccagggcgtgctgagcgccaccatcctgtacgagatcctgctgggcaaggccaccctgtacgccgtgctggtgtctgccctggtgctgatggctatggtcaagcggaaggacagccggggacgcgccaagagaagcggatctggcgtgaagcagaccctgaatttcgacctgctgaagctggctggcgacgtggaatccaacccaggcccttctagaggccatatgaccgagtacaagcccacggtgcgcctcgccacccgcgacgacgtccccagggccgtacgcaccctcgccgccgcgttcgccgactaccccgccacgcgccacaccgtcgatccggaccgccacatcgagcgggtcaccgagctgcaagaactcttcctcacgcgcgtcgggctcgacatcggcaaggtgtgggtcgcggacgacggcgccgcggtggcggtctggaccacgccggagagcgtcgaagcgggggcggtgttcgccgagatcggcccgcgcatggccgagttgagcggttcccggctggccgcgcagcaacagatggaaggcctcctggcgccgcaccggcccaaggagcccgcgtggttcctggccaccgtcggcgtctcgcccgaccaccagggcaagggtctgggcagcgccgtcgtgctccccggagtggaggcggccgagcgcgccggggtgcccgccttcctggagacctccgcgccccgcaacctccccttctacgagcggctcggcttcaccgtcaccgccgacgtcgaggtgcccgaaggaccgcgcacctggtgcatgacccgcaagcccggtgcctga

SEQ ID NO: 38058 - DNA, 2295 bp, synthetic construct
  source 1..2295: mol_type = other DNA
atggccttaccagtgaccgccttgctcctgccgctggccttgctgctccacgccgccaggccgctcgagcagagttttgggttgttggaccctaaattgtgctatctgttggacggaatcctgttcatttacggagtgatcctgaccgcattgttcctgcgggttaagttttccagatccgcagacgcacccgcttaccaacaagggcagaaccaactctacaatgaacttaatttggggcggagggaagagtacgacgttctggacaaaaggaggggacgagatcccgagatgggcggaaagcctcagcgaaggaagaatccgcaagaggggctttataacgaactccagaaagataaaatggcagaagcctatagtgagattgggatgaagggagaaaggaggaggggtaaaggtcacgatgggttgtaccaaggattgagcacagccactaaagatacctatgatgcgctccacatgcaggccctgccgccaagaagggccaagcgatctggatctggagcaacaaacttctcactactcaaacaagcaggtgacgtggaggagaatcccgggcctactagcatggccttaccagtgaccgccttgctcctgccgctggccttgctgctccacgccgccaggccggacatccagttgacccagtcccccagctcactcagcgccagtgtgggggaccgggtgaccattacctgtaaagccagtcagagtgtggactatgagggggatagcttcctgaattggtatcagcagaagcctggcaaagccccaaagctgctgatctacgctgcatctaatctggagtcaggcgtgccttctaggttctccggtagtgggtctgggaccgatttcacattgaccatttcatccctccaacccgaggatttcgctacatattactgtcagcagtccaatgaggaccctctcacctttggccagggcaccaaagttgaaattaagagaggcggaggcggaagtggaggcggaggatctggcggcggaggctctgaagtccaacttgtggagtctggagggggcctggtgcagcccggcggctctctcagactgtcttgtgcggcaagcggctacaccttcacctcttactggatagaatgggtgaggcaggcacctggaaagggactggagtggattggagagattctgccaggagggggagatacaaattacaatgaaatcttcaaggggcgggccaccttttcagcggataccagcaagaatacagcttacctgcagatgaatagcctccgggcagaagataccgctgtttattattgcacgagacgggtgccaataagactggactattgggggcaagggactcttgtcaccgtcagttcaacgcgtgagctgggagagcctcagctgtgctatatcctggacgccatcctgtttctgtacggcatcgtgctgaccctgctgtactgccggctgaagatccaagtgcggaaggccgccatcaccagctacgagaaatccgacggcgtgtacaccggcctgagcaccagaaatcaagagacatacgagacactgaagcacgaaaagcctccacaacgcgccaagagaagcggatctggcgtgaagcagaccctgaatttcgacctgctgaagctggctggcgacgtggaatccaacccaggcccttctagaggccatatgaccgagtacaagcccacggtgcgcctcgccacccgcgacgacgtccccagggccgtacgcaccctcgccgccgcgttcgccgactaccccgccacgcgccacaccgtcgatccggaccgccacatcgagcgggtcaccgagctgcaagaactcttcctcacgcgcgtcgggctcgacatcggcaaggtgtgggtcgcggacgacggcgccgcggtggcggtctggaccacgccggagagcgtcgaagcgggggcggtgttcgccgagatcggcccgcgcatggccgagttgagcggttcccggctggccgcgcagcaacagatggaaggcctcctggcgccgcaccggcccaaggagcccgcgtggttcctggccaccgtcggcgtctcgcccgaccaccagggcaagggtctgggcagcgccgtcgtgctccccggagtggaggcggccgagcgcgccggggtgcccgccttcctggagacctccgcgccccgcaacctccccttctacgagcggctcggcttcaccgtcaccgccgacgtcgaggtgcccgaaggaccgcgcacctggtgcatgacccgcaagcccggtgcctga

SEQ ID NO: 38059 - DNA, 2928 bp, synthetic construct; identical to SEQ ID NO: 38050
  source 1..2928: mol_type = other DNA

SEQ ID NO: 38060 - DNA, 2928 bp, synthetic construct; identical to SEQ ID NO: 38051
  source 1..2928: mol_type = other DNA

SEQ ID NO: 38061 - DNA, 2925 bp, synthetic construct
  source 1..2925: mol_type = other DNA
atggccttaccagtgaccgccttgctcctgccgctggccttgctgctccacgccgccaggccgctcgaggaggaggacctgaagaacgtgttcccacctgaggtggccgtgttcgagcctagcgaggccgagatcagccacacccagaaagccaccctcgtgtgcctggctaccggcttctaccccgaccatgtggaactgtcttggtgggtcaacggcaaagaggtgcacagcggcgtgtgtaccgacccccagccactgaaagaacagcccgccctgaacgacagccggtactgcctgagcagcagactgagagtgtccgccaccttctggcagaacccccggaaccacttcagatgccaggtgcagttctacggcctgagcgagaacgacgagtggacccaggacagagccaagcccgtgacccagatcgtgtctgccgaagcctggggcagagccgatgatgtgattaagatccactggcaggaaaagaagtccaacaccatcctgggcagccaggaaggcaacaccatgaagaccaacgacacctacatgaagttcagctggctgaccgtgcccgagaagtccctggacaaagaacacagatgcatcgtgcggcacgaaaacaacaagaacggcgtggaccaggaaatcatcttcccacccatcaagaccgatgtgattacaatggaccccaaggacaactgctccaaggacgccaacgataccctgctgctccagctgaccaacaccagcgcctactacatgtacttgttgctgctgctgaagtccgtggtgtacttcgccatcatcacatgctgcctgctgcggagaaccgccttctgctgcaacggcgagaagtctagggccaagcgatctggatctggagcaacaaacttctcactactcaaacaagcaggtgacgtggaggagaatcccgggcctactagcatggccttaccagtgaccgccttgctcctgccgctggccttgctgctccacgccgccaggccggacatccagttgacccagtcccccagctcactcagcgccagtgtgggggaccgggtgaccattacctgtaaagccagtcagagtgtggactatgagggggatagcttcctgaattggtatcagcagaagcctggcaaagccccaaagctgctgatctacgctgcatctaatctggagtcaggcgtgccttctaggttctccggtagtgggtctgggaccgatttcacattgaccatttcatccctccaacccgaggatttcgctacatattactgtcagcagtccaatgaggaccctctcacctttggccagggcaccaaagttgaaattaagagaggcggaggcggaagtggaggcggaggatctggcggcggaggctctgaagtccaacttgtggagtctggagggggcctggtgcagcccggcggctctctcagactgtcttgtgcggcaagcggctacaccttcacctcttactggatagaatgggtgaggcaggcacctggaaagggactggagtggattggagagattctgccaggagggggagatacaaattacaatgaaatcttcaaggggcgggccaccttttcagcggataccagcaagaatacagcttacctgcagatgaatagcctccgggcagaagataccgctgtttattattgcacgagacgggtgccaataagactggactattgggggcaagggactcttgtcaccgtcagttcaacgcgtatccagaaccctgatcctgccgtgtaccagctgcgggatagcaagagcagcgacaagagcgtgtgtctgttcaccgacttcgacagccagaccaacgtgtcccagagcaaggactccgacgtgtacatcaccgataagtgcgtgctggacatgcggagcatggacttcaagagcaactccgccgtggcctggtccaacaagtccgatttcgcctgcgccaacgccttcaacaacagcattatccccgaggacacattcttcccaagccccgagagcagcgactccaccgaccacgtgaagcccaaagagacagagaacaccaagcagcccagcaagagctgccacaagcccaaggccatcgtgcacaccgagaaagtgaacatgatgagcctgaccgtgctgggcctgcggatgctgttcgccaaaaccgtggccgtgaacttcctgctgaccgccaagctgttcttcctccgcgccaagagaagcggatctggcgtgaagcagaccctgaatttcgacctgctgaagctggctggcgacgtggaatccaacccaggcccttctagaggccatatgaccgagtacaagcccacggtgcgcctcgccacccgcgacgacgtccccagggccgtacgcaccctcgccgccgcgttcgccgactaccccgccacgcgccacaccgtcgatccggaccgccacatcgagcgggtcaccgagctgcaagaactcttcctcacgcgcgtcgggctcgacatcggcaaggtgtgggtcgcggacgacggcgccgcggtggcggtctggaccacgccggagagcgtcgaagcgggggcggtgttcgccgagatcggcccgcgcatggccgagttgagcggttcccggctggccgcgcagcaacagatggaaggcctcctggcgccgcaccggcccaaggagcccgcgtggttcctggccaccgtcggcgtctcgcccgaccaccagggcaagggtctgggcagcgccgtcgtgctccccggagtggaggcggccgagcgcgccggggtgcccgccttcctggagacctccgcgccccgcaacctccccttctacgagcggctcggcttcaccgtcaccgccgacgtcgaggtgcccgaaggaccgcgcacctggtgcatgacccgcaagcccggtgcctga

SEQ ID NO: 38062 - DNA, 2925 bp, synthetic construct
  source 1..2925: mol_type = other DNA
atggccttaccagtgaccgccttgctcctgccgctggccttgctgctccacgccgccaggccgctcgagatccagaaccctgatcctgccgtgtaccagctgcgggatagcaagagcagcgacaagagcgtgtgtctgttcaccgacttcgacagccagaccaacgtgtcccagagcaaggactccgacgtgtacatcaccgataagtgcgtgctggacatgcggagcatggacttcaagagcaactccgccgtggcctggtccaacaagtccgatttcgcctgcgccaacgccttcaacaacagcattatccccgaggacacattcttcccaagccccgagagcagcgactccaccgaccacgtgaagcccaaagagacagagaacaccaagcagcccagcaagagctgccacaagcccaaggccatcgtgcacaccgagaaagtgaacatgatgagcctgaccgtgctgggcctgcggatgctgttcgccaaaaccgtggccgtgaacttcctgctgaccgccaagctgttcttcctcagggccaagcgatctggatctggagcaacaaacttctcactactcaaacaagcaggtgacgtggaggagaatcccgggcctactagcatggccttaccagtgaccgccttgctcctgccgctggccttgctgctccacgccgccaggccggacatccagttgacccagtcccccagctcactcagcgccagtgtgggggaccgggtgaccattacctgtaaagccagtcagagtgtggactatgagggggatagcttcctgaattggtatcagcagaagcctggcaaagccccaaagctgctgatctacgctgcatctaatctggagtcaggcgtgccttctaggttctccggtagtgggtctgggaccgatttcacattgaccatttcatccctccaacccgaggatttcgctacatattactgtcagcagtccaatgaggaccctctcacctttggccagggcaccaaagttgaaattaagagaggcggaggcggaagtggaggcggaggatctggcggcggaggctctgaagtccaacttgtggagtctggagggggcctggtgcagcccggcggctctctcagactgtcttgtgcggcaagcggctacaccttcacctcttactggatagaatgggtgaggcaggcacctggaaagggactggagtggattggagagattctgccaggagggggagatacaaattacaatgaaatcttcaaggggcgggccaccttttcagcggataccagcaagaatacagcttacctgcagatgaatagcctccgggcagaagataccgctgtttattattgcacgagacgggtgccaataagactggactattgggggcaagggactcttgtcaccgtcagttcaacgcgtgaggaggacctgaagaacgtgttcccacctgaggtggccgtgttcgagcctagcgaggccgagatcagccacacccagaaagccaccctcgtgtgcctggctaccggcttctaccccgaccatgtggaactgtcttggtgggtcaacggcaaagaggtgcacagcggcgtgtgtaccgacccccagccactgaaagaacagcccgccctgaacgacagccggtactgcctgagcagcagactgagagtgtccgccaccttctggcagaacccccggaaccacttcagatgccaggtgcagttctacggcctgagcgagaacgacgagtggacccaggacagagccaagcccgtgacccagatcgtgtctgccgaagcctggggcagagccgatgatgtgattaagatccactggcaggaaaagaagtccaacaccatcctgggcagccaggaaggcaacaccatgaagaccaacgacacctacatgaagttcagctggctgaccgtgcccgagaagtccctggacaaagaacacagatgcatcgtgcggcacgaaaacaacaagaacggcgtggaccaggaaatcatcttcccacccatcaagaccgatgtgattacaatggaccccaaggacaactgctccaaggacgccaacgataccctgctgctccagctgaccaacaccagcgcctactacatgtacttgttgctgctgctgaagtccgtggtgtacttcgccatcatcacatgctgcctgctgcggagaaccgccttctgctgcaacggcgagaagtctcgcgccaagagaagcggatctggcgtgaagcagaccctgaatttcgacctgctgaagctggctggcgacgtggaatccaacccaggcccttctagaggccatatgaccgagtacaagcccacggtgcgcctcgccacccgcgacgacgtccccagggccgtacgcaccctcgccgccgcgttcgccgactaccccgccacgcgccacaccgtcgatccggaccgccacatcgagcgggtcaccgagctgcaagaactcttcctcacgcgcgtcgggctcgacatcggcaaggtgtgggtcgcggacgacggcgccgcggtggcggtctggaccacgccggagagcgtcgaagcgggggcggtgttcgccgagatcggcccgcgcatggccgagttgagcggttcccggctggccgcgcagcaacagatggaaggcctcctggcgccgcaccggcccaaggagcccgcgtggttcctggccaccgtcggcgtctcgcccgaccaccagggcaagggtctgggcagcgccgtcgtgctccccggagtggaggcggccgagcgcgccggggtgcccgccttcctggagacctccgcgccccgcaacctccccttctacgagcggctcggcttcaccgtcaccgccgacgtcgaggtgcccgaaggaccgcgcacctggtgcatgacccgcaagcccggtgcctga

SEQ ID NO: 38063 - DNA, 2616 bp, synthetic construct
  source 1..2616: mol_type = other DNA
atggccttaccagtgaccgccttgctcctgccgctggccttgctgctccacgccgccaggccgctcgaggaggacctgaagaacgtgttcccacctgaggtggccgtgttcgagcctagcgaggccgagatcagccacacccagaaagccaccctcgtgtgcctggctaccggcttctaccccgaccatgtggaactgtcttggtgggtcaacggcaaagaggtgcacagcggcgtgtctaccgacccccagccactgaaagaacagcccgccctgaacgacagccggtactgcctgagcagcagactgagagtgtccgccaccttctggcagaacccccggaaccacttcagatgccaggtgcagttctacggcctgagcgagaacgacgagtggacccaggacagagccaagcccgtgacccagatcgtgtctgccgaagcctggggcagagccgattgcggctttaccagcgagagctaccagcagggcgtgctgagcgccaccaacctgagcgtgatcggcttcagaatcctgctgctgaaagtggccggctttaacctgctgatgaccctgcggctgtggtccagcagggccaagcgatctggatctggagcaacaaacttctcactactcaaacaagcaggtgacgtggaggagaatcccgggcctactagcatggccttaccagtgaccgccttgctcctgccgctggccttgctgctccacgccgccaggccggacatccagttgacccagtcccccagctcactcagcgccagtgtgggggaccgggtgaccattacctgtaaagccagtcagagtgtggactatgagggggatagcttcctgaattggtatcagcagaagcctggcaaagccccaaagctgctgatctacgctgcatctaatctggagtcaggcgtgccttctaggttctccggtagtgggtctgggaccgatttcacattgaccatttcatccctccaacccgaggatttcgctacatattactgtcagcagtccaatgaggaccctctcacctttggccagggcaccaaagttgaaattaagagaggcggaggcggaagtggaggcggaggatctggcggcggaggctctgaagtccaacttgtggagtctggagggggcctggtgcagcccggcggctctctcagactgtcttgtgcggcaagcggctacaccttcacctcttactggatagaatgggtgaggcaggcacctggaaagggactggagtggattggagagattctgccaggagggggagatacaaattacaatgaaatcttcaaggggcgggccaccttttcagcggataccagcaagaatacagcttacctgcagatgaatagcctccgggcagaagataccgctgtttattattgcacgagacgggtgccaataagactggactattgggggcaagggactcttgtcaccgtcagttcaacgcgtatccagaaccctgatcctgccgtgtaccagctgcgggatagcaagagcagcgacaagagcgtgtgtctgttcaccgacttcgacagccagaccaacgtgtcccagagcaaggactccgacgtgtacatcaccgataagaccgtgctggacatgcggagcatggacttcaagagcaactccgccgtggcctggtccaacaagtccgatttcgcctgcgccaacgccttcaacaacagcattatccccgaggacacattcttcccaagccccgagagcagctgcgacgtgaagctggtggaaaagagcttcgagacagacaccaacctgaacttccagatcctgtacgagatcctgctgggcaaggccaccctgtacgccgtgctggtgtctgccctggtgctgatggctatggtcaagcggaaggacagccggggacgcgccaagagaagcggatctggcgtgaagcagaccctgaatttcgacctgctgaagctggctggcgacgtggaatccaacccaggcccttctagaggccatatgaccgagtacaagcccacggtgcgcctcgccacccgcgacgacgtccccagggccgtacgcaccctcgccgccgcgttcgccgactaccccgccacgcgccacaccgtcgatccggaccgccacatcgagcgggtcaccgagctgcaagaactcttcctcacgcgcgtcgggctcgacatcggcaaggtgtgggtcgcggacgacggcgccgcggtggcggtctggaccacgccggagagcgtcgaagcgggggcggtgttcgccgagatcggcccgcgcatggccgagttgagcggttcccggctggccgcgcagcaacagatggaaggcctcctggcgccgcaccggcccaaggagcccgcgtggttcctggccaccgtcggcgtctcgcccgaccaccagggcaagggtctgggcagcgccgtcgtgctccccggagtggaggcggccgagcgcgccggggtgcccgccttcctggagacctccgcgccccgcaacctccccttctacgagcggctcggcttcaccgtcaccgccgacgtcgaggtgcccgaaggaccgcgcacctggtgcatgacccgcaagcccggtgcctga

SEQ ID NO: 38064 - DNA, 2616 bp, synthetic construct
  source 1..2616: mol_type = other DNA
atggccttaccagtgaccgccttgctcctgccgctggccttgctgctccacgccgccaggccgctcgagatccagaaccctgatcctgccgtgtaccagctgcgggatagcaagagcagcgacaagagcgtgtgtctgttcaccgacttcgacagccagaccaacgtgtcccagagcaaggactccgacgtgtacatcaccgataagaccgtgctggacatgcggagcatggacttcaagagcaactccgccgtggcctggtccaacaagtccgatttcgcctgcgccaacgccttcaacaacagcattatccccgaggacacattcttcccaagccccgagagcagctgcgacgtgaagctggtggaaaagagcttcgagacagacaccaacctgaacttccagatcctgtacgagatcctgctgggcaaggccaccctgtacgccgtgctggtgtctgccctggtgctgatggctatggtcaagcggaaggacagccggggaagggccaagcgatctggatctggagcaacaaacttctcactactcaaacaagcaggtgacgtggaggagaatcccgggcctactagcatggccttaccagtgaccgccttgctcctgccgctggccttgctgctccacgccgccaggccggacatccagttgacccagtcccccagctcactcagcgccagtgtgggggaccgggtgaccattacctgtaaagccagtcagagtgtggactatgagggggatagcttcctgaattggtatcagcagaagcctggcaaagccccaaagctgctgatctacgctgcatctaatctggagtcaggcgtgccttctaggttctccggtagtgggtctgggaccgatttcacattgaccatttcatccctccaacccgaggatttcgctacatattactgtcagcagtccaatgaggaccctctcacctttggccagggcaccaaagttgaaattaagagaggcggaggcggaagtggaggcggaggatctggcggcggaggctctgaagtccaacttgtggagtctggagggggcctggtgcagcccggcggctctctcagactgtcttgtgcggcaagcggctacaccttcacctcttactggatagaatgggtgaggcaggcacctggaaagggactggagtggattggagagattctgccaggagggggagatacaaattacaatgaaatcttcaaggggcgggccaccttttcagcggataccagcaagaatacagcttacctgcagatgaatagcctccgggcagaagataccgctgtttattattgcacgagacgggtgccaataagactggactattgggggcaagggactcttgtcaccgtcagttcaacgcgtgaggacctgaagaacgtgttcccacctgaggtggccgtgttcgagcctagcgaggccgagatcagccacacccagaaagccaccctcgtgtgcctggctaccggcttctaccccgaccatgtggaactgtcttggtgggtcaacggcaaagaggtgcacagcggcgtgtctaccgacccccagccactgaaagaacagcccgccctgaacgacagccggtactgcctgagcagcagactgagagtgtccgccaccttctggcagaacccccggaaccacttcagatgccaggtgcagttctacggcctgagcgagaacgacgagtggacccaggacagagccaagcccgtgacccagatcgtgtctgccgaagcctggggcagagccgattgcggctttaccagcgagagctaccagcagggcgtgctgagcgccaccaacctgagcgtgatcggcttcagaatcctgctgctgaaagtggccggctttaacctgctgatgaccctgcggctgtggtccagccgcgccaagagaagcggatctggcgtgaagcagaccctgaatttcgacctgctgaagctggctggcgacgtggaatccaacccaggcccttctagaggccatatgaccgagtacaagcccacggtgcgcctcgccacccgcgacgacgtccccagggccgtacgcaccctcgccgccgcgttcgccgactaccccgccacgcgccacaccgtcgatccggaccgccacatcgagcgggtcaccgagctgcaagaactcttcctcacgcgcgtcgggctcgacatcggcaaggtgtgggtcgcggacgacggcgccgcggtggcggtctggaccacgccggagagcgtcgaagcgggggcggtgttcgccgagatcggcccgcgcatggccgagttgagcggttcccggctggccgcgcagcaacagatggaaggcctcctggcgccgcaccggcccaaggagcccgcgtggttcctggccaccgtcggcgtctcgcccgaccaccagggcaagggtctgggcagcgccgtcgtgctccccggagtggaggcggccgagcgcgccggggtgcccgccttcctggagacctccgcgccccgcaacctccccttctacgagcggctcggcttcaccgtcaccgccgacgtcgaggtgcccgaaggaccgcgcacctggtgcatgacccgcaagcccggtgcctga

SEQ ID NO: 38065 - DNA, 2616 bp, synthetic construct
  source 1..2616: mol_type = other DNA
atggccttaccagtgaccgccttgctcctgccgctggccttgctgctccacgccgccaggccgctcgaggaggacctgaagaacgtgttcccacctgaggtggccgtgttcgagcctagcgaggccgagatcagccacacccagaaagccaccctcgtgtgcctggctaccggcttctaccccgaccatgtggaactgtcttggtgggtcaacggcaaagaggtgcacagcggcgtgtgtaccgacccccagccactgaaagaacagcccgccctgaacgacagccggtactgcctgagcagcagactgagagtgtccgccaccttctggcagaacccccggaaccacttcagatgccaggtgcagttctacggcctgagcgagaacgacgagtggacccaggacagagccaagcccgtgacccagatcgtgtctgccgaagcctggggcagagccgattgcgacgtgaagctggtggaaaagagcttcgagacagacaccaacctgaacttccagaacctgagcgtgatcggcttcagaatcctgctgctgaaagtggccggctttaacctgctgatgaccctgcggctgtggtccagcagggccaagcgatctggatctggagcaacaaacttctcactactcaaacaagcaggtgacgtggaggagaatcccgggcctactagcatggccttaccagtgaccgccttgctcctgccgctggccttgctgctccacgccgccaggccggacatccagttgacccagtcccccagctcactcagcgccagtgtgggggaccgggtgaccattacctgtaaagccagtcagagtgtggactatgagggggatagcttcctgaattggtatcagcagaagcctggcaaagccccaaagctgctgatctacgctgcatctaatctggagtcaggcgtgccttctaggttctccggtagtgggtctgggaccgatttcacattgaccatttcatccctccaacccgaggatttcgctacatattactgtcagcagtccaatgaggaccctctcacctttggccagggcaccaaagttgaaattaagagaggcggaggcggaagtggaggcggaggatctggcggcggaggctctgaagtccaacttgtggagtctggagggggcctggtgcagcccggcggctctctcagactgtcttgtgcggcaagcggctacaccttcacctcttactggatagaatgggtgaggcaggcacctggaaagggactggagtggattggagagattctgccaggagggggagatacaaattacaatgaaatcttcaaggggcgggccaccttttcagcggataccagcaagaatacagcttacctgcagatgaatagcctccgggcagaagataccgctgtttattattgcacgagacgggtgccaataagactggactattgggggcaagggactcttgtcaccgtcagttcaacgcgtatccagaaccctgatcctgccgtgtaccagctgcgggatagcaagagcagcgacaagagcgtgtgtctgttcaccgacttcgacagccagaccaacgtgtcccagagcaaggactccgacgtgtacatcaccgataagtgcgtgctggacatgcggagcatggacttcaagagcaactccgccgtggcctggtccaacaagtccgatttcgcctgcgccaacgccttcaacaacagcattatccccgaggacacattcttcccaagccccgagagcagctgcggctttaccagcgagagctaccagcagggcgtgctgagcgccaccatcctgtacgagatcctgctgggcaaggccaccctgtacgccgtgctggtgtctgccctggtgctgatggctatggtcaagcggaaggacagccggggacgcgccaagagaagcggatctggcgtgaagcagaccctgaatttcgacctgctgaagctggctggcgacgtggaatccaacccaggcccttctagaggccatatgaccgagtacaagcccacggtgcgcctcgccacccgcgacgacgtccccagggccgtacgcaccctcgccgccgcgttcgccgactaccccgccacgcgccacaccgtcgatccggaccgccacatcgagcgggtcaccgagctgcaagaactcttcctcacgcgcgtcgggctcgacatcggcaaggtgtgggtcgcggacgacggcgccgcggtggcggtctggaccacgccggagagcgtcgaagcgggggcggtgttcgccgagatcggcccgcgcatggccgagttgagcggttcccggctggccgcgcagcaacagatggaaggcctcctggcgccgcaccggcccaaggagcccgcgtggttcctggccaccgtcggcgtctcgcccgaccaccagggcaagggtctgggcagcgccgtcgtgctccccggagtggaggcggccgagcgcgccggggtgcccgccttcctggagacctccgcgccccgcaacctccccttctacgagcggctcggcttcaccgtcaccgccgacgtcgaggtgcccgaaggaccgcgcacctggtgcatgacccgcaagcccggtgcctga

SEQ ID NO: 38066 - DNA, 2616 bp, synthetic construct
  source 1..2616: mol_type = other DNA
atggccttaccagtgaccgccttgctcctgccgctggccttgctgctccacgccgccaggccgctcgaggaggacctgaagaacgtgttcccacctgaggtggccgtgttcgagcctagcgaggccgagatcagccacacccagaaagccaccctcgtgtgcctggctaccggcttctaccccgaccatgtggaactgtcttggtgggtcaacggcaaagaggtgcacagcggcgtgtctaccgacccccagccactgaaagaacagcccgccctgaacgacagccggtactgcctgagcagcagactgagagtgtccgccaccttctggcagaacccccggaaccacttcagatgccaggtgcagttctacggcctgagcgagaacgacgagtggacccaggacagagccaagcccgtgacccagatcgtgtctgccgaagcctggggcagagccgattgcgacgtgaagctggtggaaaagagcttcgagacagacaccaacctgaacttccagaacctgagcgtgatcggcttcagaatcctgctgctgaaagtggccggctttaacctgctgatgaccctgcggctgtggtccagcagggccaagcgatctggatctggagcaacaaacttctcactactcaaacaagcaggtgacgtggaggagaatcccgggcctactagcatggccttaccagtgaccgccttgctcctgccgctggccttgctgctccacgccgccaggccggacatccagttgacccagtcccccagctcactcagcgccagtgtgggggaccgggtgaccattacctgtaaagccagtcagagtgtggactatgagggggatagcttcctgaattggtatcagcagaagcctggcaaagccccaaagctgctgatctacgctgcatctaatctggagtcaggcgtgccttctaggttctccggtagtgggtctgggaccgatttcacattgaccatttcatccctccaacccgaggatttcgctacatattactgtcagcagtccaatgaggaccctctcacctttggccagggcaccaaagttgaaattaagagaggcggaggcggaagtggaggcggaggatctggcggcggaggctctgaagtccaacttgtggagtctggagggggcctggtgcagcccggcggctctctcagactgtcttgtgcggcaagcggctacaccttcacctcttactggatagaatgggtgaggcaggcacctggaaagggactggagtggattggagagattctgccaggagggggagatacaaattacaatgaaatcttcaaggggcgggccaccttttcagcggataccagcaagaatacagcttacctgcagatgaatagcctccgggcagaagataccgctgtttattattgcacgagacgggtgccaataagactggactattgggggcaagggactcttgtcaccgtcagttcaacgcgtatccagaaccctgatcctgccgtgtaccagctgcgggatagcaagagcagcgacaagagcgtgtgtctgttcaccgacttcgacagccagaccaacgtgtcccagagcaaggactccgacgtgtacatcaccgataagaccgtgctggacatgcggagcatggacttcaagagcaactccgccgtggcctggtccaacaagtccgatttcgcctgcgccaacgccttcaacaacagcattatccccgaggacacattcttcccaagccccgagagcagctgcggctttaccagcgagagctaccagcagggcgtgctgagcgccaccatcctgtacgagatcctgctgggcaaggccaccctgtacgccgtgctggtgtctgccctggtgctgatggctatggtcaagcggaaggacagccggggacgcgccaagagaagcggatctggcgtgaagcagaccctgaatttcgacctgctgaagctggctggcgacgtggaatccaacccaggcccttctagaggccatatgaccgagtacaagcccacggtgcgcctcgccacccgcgacgacgtccccagggccgtacgcaccctcgccgccgcgttcgccgactaccccgccacgcgccacaccgtcgatccggaccgccacatcgagcgggtcaccgagctgcaagaactcttcctcacgcgcgtcgggctcgacatcggcaaggtgtgggtcgcggacgacggcgccgcggtggcggtctggaccacgccggagagcgtcgaagcgggggcggtgttcgccgagatcggcccgcgcatggccgagttgagcggttcccggctggccgcgcagcaacagatggaaggcctcctggcgccgcaccggcccaaggagcccgcgtggttcctggccaccgtcggcgtctcgcccgaccaccagggcaagggtctgggcagcgccgtcgtgctccccggagtggaggcggccgagcgcgccggggtgcccgccttcctggagacctccgcgccccgcaacctccccttctacgagcggctcggcttcaccgtcaccgccgacgtcgaggtgcccgaaggaccgcgcacctggtgcatgacccgcaagcccggtgcctga

SEQ ID NO: 38067 - DNA, 2925 bp, synthetic construct
  source 1..2925: mol_type = other DNA
atggccttaccagtgaccgccttgctcctgccgctggccttgctgctccacgccgccaggccgctcgaggaggaggacctgaagaacgtgttcccacctgaggtggccgtgttcgagcctagcgaggccgagatcagccacacccagaaagccaccctcgtgtgcctggctaccggcttctaccccgaccatgtggaactgtcttggtgggtcaacggcaaagaggtgcacagcggcgtgtctaccgacccccagccactgaaagaacagcccgccctgaacgacagccggtactgcctgagcagcagactgagagtgtccgccaccttctggcagaacccccggaaccacttcagatgccaggtgcagttctacggcctgagcgagaacgacgagtggacccaggacagagccaagcccgtgacccagatcgtgtctgccgaagcctggggcagagccgatgatgtgattaagatccactggcaggaaaagaagtccaacaccatcctgggcagccaggaaggcaacaccatgaagaccaacgacacctacatgaagttcagctggctgaccgtgcccgagaagtccctggacaaagaacacagatgcatcgtgcggcacgaaaacaacaagaacggcgtggaccaggaaatcatcttcccacccatcaagaccgatgtgattacaatggaccccaaggacaactgctccaaggacgccaacgataccctgctgctccagctgaccaacaccagcgcctactacatgtacttgttgctgctgctgaagtccgtggtgtacttcgccatcatcacatgctgcctgctgcggagaaccgccttctgctgcaacggcgagaagtctagggccaagcgatctggatctggagcaacaaacttctcactactcaaacaagcaggtgacgtggaggagaatcccgggcctactagcatggccttaccagtgaccgccttgctcctgccgctggccttgctgctccacgccgccaggccggacatccagttgacccagtcccccagctcactcagcgccagtgtgggggaccgggtgaccattacctgtaaagccagtcagagtgtggactatgagggggatagcttcctgaattggtatcagcagaagcctggcaaagccccaaagctgctgatctacgctgcatctaatctggagtcaggcgtgccttctaggttctccggtagtgggtctgggaccgatttcacattgaccatttcatccctccaacccgaggatttcgctacatattactgtcagcagtccaatgaggaccctctcacctttggccagggcaccaaagttgaaattaagagaggcggaggcggaagtggaggcggaggatctggcggcggaggctctgaagtccaacttgtggagtctggagggggcctggtgcagcccggcggctctctcagactgtcttgtgcggcaagcggctacaccttcacctcttactggatagaatgggtgaggcaggcacctggaaagggactggagtggattggagagattctgccaggagggggagatacaaattacaatgaaatcttcaaggggcgggccaccttttcagcggataccagcaagaatacagcttacctgcagatgaatagcctccgggcagaagataccgctgtttattattgcacgagacgggtgccaataagactggactattgggggcaagggactcttgtcaccgtcagttcaacgcgtatccagaaccctgatcctgccgtgtaccagctgcgggatagcaagagcagcgacaagagcgtgtgtctgttcaccgacttcgacagccagaccaacgtgtcccagagcaaggactccgacgtgtacatcaccgataagaccgtgctggacatgcggagcatggacttcaagagcaactccgccgtggcctggtccaacaagtccgatttcgcctgcgccaacgccttcaacaacagcattatccccgaggacacattcttcccaagccccgagagcagcgactccaccgaccacgtgaagcccaaagagacagagaacaccaagcagcccagcaagagctgccacaagcccaaggccatcgtgcacaccgagaaagtgaacatgatgagcctgaccgtgctgggcctgcggatgctgttcgccaaaaccgtggccgtgaacttcctgctgaccgccaagctgttcttcctccgcgccaagagaagcggatctggcgtgaagcagaccctgaatttcgacctgctgaagctggctggcgacgtggaatccaacccaggcccttctagaggccatatgaccgagtacaagcccacggtgcgcctcgccacccgcgacgacgtccccagggccgtacgcaccctcgccgccgcgttcgccgactaccccgccacgcgccacaccgtcgatccggaccgccacatcgagcgggtcaccgagctgcaagaactcttcctcacgcgcgtcgggctcgacatcggcaaggtgtgggtcgcggacgacggcgccgcggtggcggtctggaccacgccggagagcgtcgaagcgggggcggtgttcgccgagatcggcccgcgcatggccgagttgagcggttcccggctggccgcgcagcaacagatggaaggcctcctggcgccgcaccggcccaaggagcccgcgtggttcctggccaccgtcggcgtctcgcccgaccaccagggcaagggtctgggcagcgccgtcgtgctccccggagtggaggcggccgagcgcgccggggtgcccgccttcctggagacctccgcgccccgcaacctccccttctacgagcggctcggcttcaccgtcaccgccgacgtcgaggtgcccgaaggaccgcgcacctggtgcatgacccgcaagcccggtgcctga

SEQ ID NO: 38068 - DNA, 2616 bp, synthetic construct
  source 1..2616: mol_type = other DNA
atggccttaccagtgaccgccttgctcctgccgctggccttgctgctccacgccgccaggccgctcgaggaggacctgaagaacgtgttcccacctgaggtggccgtgttcgagcctagcgaggccgagatcagccacacccagaaagccaccctcgtgtgcctggctaccggcttctaccccgaccatgtggaactgtcttggtgggtcaacggcaaagaggtgcacagcggcgtgtgtaccgacccccagccactgaaagaacagcccgccctgaacgacagccggtactgcctgagcagcagactgagagtgtccgccaccttctggcagaacccccggaaccacttcagatgccaggtgcagttctacggcctgagcgagaacgacgagtggacccaggacagagccaagcccgtgacccagatcgtgtctgccgaagcctggggcagagccgattgcggctttaccagcgagagctaccagcagggcgtgctgagcgccaccaacctgagcgtgatcggcttcagaatcctgctgctgaaagtggccggctttaacctgctgatgaccctgcggctgtggtccagcagggccaagcgatctggatctggagcaacaaacttctcactactcaaacaagcaggtgacgtggaggagaatcccgggcctactagcatggccttaccagtgaccgccttgctcctgccgctggccttgctgctccacgccgccaggccggacatccagttgacccagtcccccagctcactcagcgccagtgtgggggaccgggtgaccattacctgtaaagccagtcagagtgtggactatgagggggatagcttcctgaattggtatcagcagaagcctggcaaagccccaaagctgctgatctacgctgcatctaatctggagtcaggcgtgccttctaggttctccggtagtgggtctgggaccgatttcacattgaccatttcatccctccaacccgaggatttcgctacatattactgtcagcagtccaatgaggaccctctcacctttggccagggcaccaaagttgaaattaagagaggcggaggcggaagtggaggcggaggatctggcggcggaggctctgaagtccaacttgtggagtctggagggggcctggtgcagcccggcggctctctcagactgtcttgtgcggcaagcggctacaccttcacctcttactggatagaatgggtgaggcaggcacctggaaagggactggagtggattggagagattctgccaggagggggagatacaaattacaatgaaatcttcaaggggcgggccaccttttcagcggataccagcaagaatacagcttacctgcagatgaatagcctccgggcagaagataccgctgtttattattgcacgagacgggtgccaataagactggactattgggggcaagggactcttgtcaccgtcagttcaacgcgtatccagaaccctgatcctgccgtgtaccagctgcgggatagcaagagcagcgacaagagcgtgtgtctgttcaccgacttcgacagccagaccaacgtgtcccagagcaaggactccgacgtgtacatcaccgataagtgcgtgctggacatgcggagcatggacttcaagagcaactccgccgtggcctggtccaacaagtccgatttcgcctgcgccaacgccttcaacaacagcattatccccgaggacacattcttcccaagccccgagagcagctgcgacgtgaagctggtggaaaagagcttcgagacagacaccaacctgaacttccagatcctgtacgagatcctgctgggcaaggccaccctgtacgccgtgctggtgtctgccctggtgctgatggctatggtcaagcggaaggacagccggggacgcgccaagagaagcggatctggcgtgaagcagaccctgaatttcgacctgctgaagctggctggcgacgtggaatccaacccaggcccttctagaggccatatgaccgagtacaagcccacggtgcgcctcgccacccgcgacgacgtccccagggccgtacgcaccctcgccgccgcgttcgccgactaccccgccacgcgccacaccgtcgatccggaccgccacatcgagcgggtcaccgagctgcaagaactcttcctcacgcgcgtcgggctcgacatcggcaaggtgtgggtcgcggacgacggcgccgcggtggcggtctggaccacgccggagagcgtcgaagcgggggcggtgttcgccgagatcggcccgcgcatggccgagttgagcggttcccggctggccgcgcagcaacagatggaaggcctcctggcgccgcaccggcccaaggagcccgcgtggttcctggccaccgtcggcgtctcgcccgaccaccagggcaagggtctgggcagcgccgtcgtgctccccggagtggaggcggccgagcgcgccggggtgcccgccttcctggagacctccgcgccccgcaacctccccttctacgagcggctcggcttcaccgtcaccgccgacgtcgaggtgcccgaaggaccgcgcacctggtgcatgacccgcaagcccggtgcctga

SEQ ID NO: 38069 - DNA, 2703 bp, synthetic construct
  source 1..2703: mol_type = other DNA
atggccttaccagtgaccgccttgctcctgccgctggccttgctgctccacgccgccaggccgctcgaggaggaggacctgaagaacgtgttcccacctgaggtggccgtgttcgagcctagcgaggccgagatcagccacacccagaaagccaccctcgtgtgcctggctaccggcttctaccccgaccatgtggaactgtcttggtgggtcaacggcaaagaggtgcacagcggcgtgtgtaccgacccccagccactgaaagaacagcccgccctgaacgacagccggtactgcctgagcagcagactgagagtgtccgccaccttctggcagaacccccggaaccacttcagatgccaggtgcagttctacggcctgagcgagaacgacgagtggacccaggacagagccaagcccgtgacccagatcgtgtctgccgaagcctggggcagagccgattgcggctttaccagcgagagctaccagcagggcgtgctgagcgccaccaacctgagcgtgatcggcttcagaatcctgctgctgaaagtggccggctttaacctgctgatgaccctgcggctgtggtccagcagggccaagcgatctggatctggagcaacaaacttctcactactcaaacaagcaggtgacgtggaggagaatcccgggcctactagcatggccttaccagtgaccgccttgctcctgccgctggccttgctgctccacgccgccaggccggacatccagttgacccagtcccccagctcactcagcgccagtgtgggggaccgggtgaccattacctgtaaagccagtcagagtgtggactatgagggggatagcttcctgaattggtatcagcagaagcctggcaaagccccaaagctgctgatctacgctgcatctaatctggagtcaggcgtgccttctaggttctccggtagtgggtctgggaccgatttcacattgaccatttcatccctccaacccgaggatttcgctacatattactgtcagcagtccaatgaggaccctctcacctttggccagggcaccaaagttgaaattaagagaggcggaggcggaagtggaggcggaggatctggcggcggaggctctgaagtccaacttgtggagtctggagggggcctggtgcagcccggcggctctctcagactgtcttgtgcggcaagcggctacaccttcacctcttactggatagaatgggtgaggcaggcacctggaaagggactggagtggattggagagattctgccaggagggggagatacaaattacaatgaaatcttcaaggggcgggccaccttttcagcggataccagcaagaatacagcttacctgcagatgaatagcctccgggcagaagataccgctgtttattattgcacgagacgggtgccaataagactggactattgggggcaagggactcttgtcaccgtcagttcaacgcgtggacagcctaaggccaatcctaccgtgacactgttccctccaagcagcgaagaactccaggccaacaaggccacacttgtgtgcctgatctccgacttctaccctggggctgtgacagtggcttggaaggccgatggatctcctgtgaaagccggcgtggaaaccaccaagccatccaagcagagcaacaacaaatacgccgccagctcctacctgagcctgacacctgagcagtggaagtcccacagatcctacagctgccaagtgacccacgaaggcagcaccgtggaaaagacagtggcccctacagagtgcagccccatcaagaccgatgtgattacaatggaccccaaggacaactgctccaaggacgccaacgataccctgctgctccagctgaccaacaccagcgcctactacatgtacttgttgctgctgctgaagtccgtggtgtacttcgccatcatcacatgctgcctgctgcggagaaccgccttctgctgcaacggcgagaagtctcgcgccaagagaagcggatctggcgtgaagcagaccctgaatttcgacctgctgaagctggctggcgacgtggaatccaacccaggcccttctagaggccatatgaccgagtacaagcccacggtgcgcctcgccacccgcgacgacgtccccagggccgtacgcaccctcgccgccgcgttcgccgactaccccgccacgcgccacaccgtcgatccggaccgccacatcgagcgggtcaccgagctgcaagaactcttcctcacgcgcgtcgggctcgacatcggcaaggtgtgggtcgcggacgacggcgccgcggtggcggtctggaccacgccggagagcgtcgaagcgggggcggtgttcgccgagatcggcccgcgcatggccgagttgagcggttcccggctggccgcgcagcaacagatggaaggcctcctggcgccgcaccggcccaaggagcccgcgtggttcctggccaccgtcggcgtctcgcccgaccaccagggcaagggtctgggcagcgccgtcgtgctccccggagtggaggcggccgagcgcgccggggtgcccgccttcctggagacctccgcgccccgcaacctccccttctacgagcggctcggcttcaccgtcaccgccgacgtcgaggtgcccgaaggaccgcgcacctggtgcatgacccgcaagcccggtgcctga

SEQ ID NO: 38070 - DNA, 2703 bp, synthetic construct
  source 1..2703: mol_type = other DNA
atggccttaccagtgaccgccttgctcctgccgctggccttgctgctccacgccgccaggccgctcgagggacagcctaaggccaatcctaccgtgacactgttccctccaagcagcgaagaactccaggccaacaaggccacacttgtgtgcctgatctccgacttctaccctggggctgtgacagtggcttggaaggccgatggatctcctgtgaaagccggcgtggaaaccaccaagccatccaagcagagcaacaacaaatacgccgccagctcctacctgagcctgacacctgagcagtggaagtcccacagatcctacagctgccaagtgacccacgaaggcagcaccgtggaaaagacagtggcccctacagagtgcagccccatcaagaccgatgtgattacaatggaccccaaggacaactgctccaaggacgccaacgataccctgctgctccagctgaccaacaccagcgcctactacatgtacttgttgctgctgctgaagtccgtggtgtacttcgccatcatcacatgctgcctgctgcggagaaccgccttctgctgcaacggcgagaagtctagggccaagcgatctggatctggagcaacaaacttctcactactcaaacaagcaggtgacgtggaggagaatcccgggcctactagcatggccttaccagtgaccgccttgctcctgccgctggccttgctgctccacgccgccaggccggacatccagttgacccagtcccccagctcactcagcgccagtgtgggggaccgggtgaccattacctgtaaagccagtcagagtgtggactatgagggggatagcttcctgaattggtatcagcagaagcctggcaaagccccaaagctgctgatctacgctgcatctaatctggagtcaggcgtgccttctaggttctccggtagtgggtctgggaccgatttcacattgaccatttcatccctccaacccgaggatttcgctacatattactgtcagcagtccaatgaggaccctctcacctttggccagggcaccaaagttgaaattaagagaggcggaggcggaagtggaggcggaggatctggcggcggaggctctgaagtccaacttgtggagtctggagggggcctggtgcagcccggcggctctctcagactgtcttgtgcggcaagcggctacaccttcacctcttactggatagaatgggtgaggcaggcacctggaaagggactggagtggattggagagattctgccaggagggggagatacaaattacaatgaaatcttcaaggggcgggccaccttttcagcggataccagcaagaatacagcttacctgcagatgaatagcctccgggcagaagataccgctgtttattattgcacgagacgggtgccaataagactggactattgggggcaagggactcttgtcaccgtcagttcaacgcgtgaggaggacctgaagaacgtgttcccacctgaggtggccgtgttcgagcctagcgaggccgagatcagccacacccagaaagccaccctcgtgtgcctggctaccggcttctaccccgaccatgtggaactgtcttggtgggtcaacggcaaagaggtgcacagcggcgtgtgtaccgacccccagccactgaaagaacagcccgccctgaacgacagccggtactgcctgagcagcagactgagagtgtccgccaccttctggcagaacccccggaaccacttcagatgccaggtgcagttctacggcctgagcgagaacgacgagtggacccaggacagagccaagcccgtgacccagatcgtgtctgccgaagcctggggcagagccgattgcggctttaccagcgagagctaccagcagggcgtgctgagcgccaccaacctgagcgtgatcggcttcagaatcctgctgctgaaagtggccggctttaacctgctgatgaccctgcggctgtggtccagccgcgccaagagaagcggatctggcgtgaagcagaccctgaatttcgacctgctgaagctggctggcgacgtggaatccaacccaggcccttctagaggccatatgaccgagtacaagcccacggtgcgcctcgccacccgcgacgacgtccccagggccgtacgcaccctcgccgccgcgttcgccgactaccccgccacgcgccacaccgtcgatccggaccgccacatcgagcgggtcaccgagctgcaagaactcttcctcacgcgcgtcgggctcgacatcggcaaggtgtgggtcgcggacgacggcgccgcggtggcggtctggaccacgccggagagcgtcgaagcgggggcggtgttcgccgagatcggcccgcgcatggccgagttgagcggttcccggctggccgcgcagcaacagatggaaggcctcctggcgccgcaccggcccaaggagcccgcgtggttcctggccaccgtcggcgtctcgcccgaccaccagggcaagggtctgggcagcgccgtcgtgctccccggagtggaggcggccgagcgcgccggggtgcccgccttcctggagacctccgcgccccgcaacctccccttctacgagcggctcggcttcaccgtcaccgccgacgtcgaggtgcccgaaggaccgcgcacctggtgcatgacccgcaagcccggtgcctga

SEQ ID NO: 38071 - DNA, 2694 bp, synthetic construct
  source 1..2694: mol_type = other DNA
atggccttaccagtgaccgccttgctcctgccgctggccttgctgctccacgccgccaggccgctcgaggaggcctctacaaagggaccctccgtgtttcctctggctcccagcagcaagtctacaagcggaggaacagccgctctgggctgcctggtcaaggattactttcccgagcctgtgaccgtgtcctggaatagcggagcactgacaagcggcgtgcacacctttccagccgtgctgcaaagcagcggcctgtactctctgagcagcgtggtcacagtgcctagctctagcctgggcacccagacctacatctgcaatgtgaaccacaagcctagcaacaccaaggtggacaagagagtggaacccaagagctgtcccatcaagaccgatgtgattacaatggaccccaaggacaactgctccaaggacgccaacgataccctgctgctccagctgaccaacaccagcgcctactacatgtacttgttgctgctgctgaagtccgtggtgtacttcgccatcatcacatgctgcctgctgcggagaaccgccttctgctgcaacggcgagaagtctagggccaagcgatctggatctggagcaacaaacttctcactactcaaacaagcaggtgacgtggaggagaatcccgggcctactagcatggccttaccagtgaccgccttgctcctgccgctggccttgctgctccacgccgccaggccggacatccagttgacccagtcccccagctcactcagcgccagtgtgggggaccgggtgaccattacctgtaaagccagtcagagtgtggactatgagggggatagcttcctgaattggtatcagcagaagcctggcaaagccccaaagctgctgatctacgctgcatctaatctggagtcaggcgtgccttctaggttctccggtagtgggtctgggaccgatttcacattgaccatttcatccctccaacccgaggatttcgctacatattactgtcagcagtccaatgaggaccctctcacctttggccagggcaccaaagttgaaattaagagaggcggaggcggaagtggaggcggaggatctggcggcggaggctctgaagtccaacttgtggagtctggagggggcctggtgcagcccggcggctctctcagactgtcttgtgcggcaagcggctacaccttcacctcttactggatagaatgggtgaggcaggcacctggaaagggactggagtggattggagagattctgccaggagggggagatacaaattacaatgaaatcttcaaggggcgggccaccttttcagcggataccagcaagaatacagcttacctgcagatgaatagcctccgggcagaagataccgctgtttattattgcacgagacgggtgccaataagactggactattgggggcaagggactcttgtcaccgtcagttcaacgcgtggacagcctaaggccaatcctaccgtgacactgttccctccaagcagcgaagaactccaggccaacaaggccacacttgtgtgcctgatctccgacttctaccctggggctgtgacagtggcttggaaggccgatggatctcctgtgaaagccggcgtggaaaccaccaagccatccaagcagagcaacaacaaatacgccgccagctcctacctgagcctgacacctgagcagtggaagtcccacagatcctacagctgccaagtgacccacgaaggcagcaccgtggaaaagacagtggcccctacagagtgcagcgaagtgaaaaccgactccaccgaccacgtgaagcccaaagagacagagaacaccaagcagcccagcaagagctgccacaagcccaaggccatcgtgcacaccgagaaagtgaacatgatgagcctgaccgtgctgggcctgcggatgctgttcgccaaaaccgtggccgtgaacttcctgctgaccgccaagctgttcttcctccgcgccaagagaagcggatctggcgtgaagcagaccctgaatttcgacctgctgaagctggctggcgacgtggaatccaacccaggcccttctagaggccatatgaccgagtacaagcccacggtgcgcctcgccacccgcgacgacgtccccagggccgtacgcaccctcgccgccgcgttcgccgactaccccgccacgcgccacaccgtcgatccggaccgccacatcgagcgggtcaccgagctgcaagaactcttcctcacgcgcgtcgggctcgacatcggcaaggtgtgggtcgcggacgacggcgccgcggtggcggtctggaccacgccggagagcgtcgaagcgggggcggtgttcgccgagatcggcccgcgcatggccgagttgagcggttcccggctggccgcgcagcaacagatggaaggcctcctggcgccgcaccggcccaaggagcccgcgtggttcctggccaccgtcggcgtctcgcccgaccaccagggcaagggtctgggcagcgccgtcgtgctccccggagtggaggcggccgagcgcgccggggtgcccgccttcctggagacctccgcgccccgcaacctccccttctacgagcggctcggcttcaccgtcaccgccgacgtcgaggtgcccgaaggaccgcgcacctggtgcatgacccgcaagcccggtgcctga

SEQ ID NO: 38072 - DNA, 2628 bp, synthetic construct
  source 1..2628: mol_type = other DNA
atggccttaccagtgaccgccttgctcctgccgctggccttgctgctccacgccgccaggccgctcgaggaggcctctacaaagggaccctccgtgtttcctctggctcccagcagcaagtctacaagcggaggaacagccgctctgggctgcctggtcaaggattactttcccgagcctgtgaccgtgtcctggaatagcggagcactgacaagcggcgtgcacacctttccagccgtgctgcaaagcagcggcctgtactctctgagcagcgtggtcacagtgcctagctctagcctgggcacccagacctacatctgcaatgtgaaccacaagcctagcaacaccaaggtggacaagagagtggaacccaagagctgtggcagagccgattgcggctttaccagcgagagctaccagcagggcgtgctgagcgccaccatcctgtacgagatcctgctgggcaaggccaccctgtacgccgtgctggtgtctgccctggtgctgatggctatggtcaagcggaaggacagccggggaagggccaagcgatctggatctggagcaacaaacttctcactactcaaacaagcaggtgacgtggaggagaatcccgggcctactagcatggccttaccagtgaccgccttgctcctgccgctggccttgctgctccacgccgccaggccggacatccagttgacccagtcccccagctcactcagcgccagtgtgggggaccgggtgaccattacctgtaaagccagtcagagtgtggactatgagggggatagcttcctgaattggtatcagcagaagcctggcaaagccccaaagctgctgatctacgctgcatctaatctggagtcaggcgtgccttctaggttctccggtagtgggtctgggaccgatttcacattgaccatttcatccctccaacccgaggatttcgctacatattactgtcagcagtccaatgaggaccctctcacctttggccagggcaccaaagttgaaattaagagaggcggaggcggaagtggaggcggaggatctggcggcggaggctctgaagtccaacttgtggagtctggagggggcctggtgcagcccggcggctctctcagactgtcttgtgcggcaagcggctacaccttcacctcttactggatagaatgggtgaggcaggcacctggaaagggactggagtggattggagagattctgccaggagggggagatacaaattacaatgaaatcttcaaggggcgggccaccttttcagcggataccagcaagaatacagcttacctgcagatgaatagcctccgggcagaagataccgctgtttattattgcacgagacgggtgccaataagactggactattgggggcaagggactcttgtcaccgtcagttcaacgcgtggacagcctaaggccaatcctaccgtgacactgttccctccaagcagcgaagaactccaggccaacaaggccacacttgtgtgcctgatctccgacttctaccctggggctgtgacagtggcttggaaggccgatggatctcctgtgaaagccggcgtggaaaccaccaagccatccaagcagagcaacaacaaatacgccgccagctcctacctgagcctgacacctgagcagtggaagtcccacagatcctacagctgccaagtgacccacgaaggcagcaccgtggaaaagacagtggcccctacagagtgcagcatccccgaggacacattcttcccaagccccgagagcagctgcgacgtgaagctggtggaaaagagcttcgagacagacaccaacctgaacttccagaacctgagcgtgatcggcttcagaatcctgctgctgaaagtggccggctttaacctgctgatgaccctgcggctgtggtccagccgcgccaagagaagcggatctggcgtgaagcagaccctgaatttcgacctgctgaagctggctggcgacgtggaatccaacccaggcccttctagaggccatatgaccgagtacaagcccacggtgcgcctcgccacccgcgacgacgtccccagggccgtacgcaccctcgccgccgcgttcgccgactaccccgccacgcgccacaccgtcgatccggaccgccacatcgagcgggtcaccgagctgcaagaactcttcctcacgcgcgtcgggctcgacatcggcaaggtgtgggtcgcggacgacggcgccgcggtggcggtctggaccacgccggagagcgtcgaagcgggggcggtgttcgccgagatcggcccgcgcatggccgagttgagcggttcccggctggccgcgcagcaacagatggaaggcctcctggcgccgcaccggcccaaggagcccgcgtggttcctggccaccgtcggcgtctcgcccgaccaccagggcaagggtctgggcagcgccgtcgtgctccccggagtggaggcggccgagcgcgccggggtgcccgccttcctggagacctccgcgccccgcaacctccccttctacgagcggctcggcttcaccgtcaccgccgacgtcgaggtgcccgaaggaccgcgcacctggtgcatgacccgcaagcccggtgcctga

SEQ ID NO: 38073 - DNA, 2628 bp, synthetic construct
  source 1..2628: mol_type = other DNA
atggccttaccagtgaccgccttgctcctgccgctggccttgctgctccacgccgccaggccgctcgaggaggcctctacaaagggaccctccgtgtttcctctggctcccagcagcaagtctacaagcggaggaacagccgctctgggctgcctggtcaaggattactttcccgagcctgtgaccgtgtcctggaatagcggagcactgacaagcggcgtgcacacctttccagccgtgctgcaaagcagcggcctgtactctctgagcagcgtggtcacagtgcctagctctagcctgggcacccagacctacatctgcaatgtgaaccacaagcctagcaacaccaaggtggacaagagagtggaacccaagagctgtatccccgaggacacattcttcccaagccccgagagcagctgcgacgtgaagctggtggaaaagagcttcgagacagacaccaacctgaacttccagaacctgagcgtgatcggcttcagaatcctgctgctgaaagtggccggctttaacctgctgatgaccctgcggctgtggtccagcagggccaagcgatctggatctggagcaacaaacttctcactactcaaacaagcaggtgacgtggaggagaatcccgggcctactagcatggccttaccagtgaccgccttgctcctgccgctggccttgctgctccacgccgccaggccggacatccagttgacccagtcccccagctcactcagcgccagtgtgggggaccgggtgaccattacctgtaaagccagtcagagtgtggactatgagggggatagcttcctgaattggtatcagcagaagcctggcaaagccccaaagctgctgatctacgctgcatctaatctggagtcaggcgtgccttctaggttctccggtagtgggtctgggaccgatttcacattgaccatttcatccctccaacccgaggatttcgctacatattactgtcagcagtccaatgaggaccctctcacctttggccagggcaccaaagttgaaattaagagaggcggaggcggaagtggaggcggaggatctggcggcggaggctctgaagtccaacttgtggagtctggagggggcctggtgcagcccggcggctctctcagactgtcttgtgcggcaagcggctacaccttcacctcttactggatagaatgggtgaggcaggcacctggaaagggactggagtggattggagagattctgccaggagggggagatacaaattacaatgaaatcttcaaggggcgggccaccttttcagcggataccagcaagaatacagcttacctgcagatgaatagcctccgggcagaagataccgctgtttattattgcacgagacgggtgccaataagactggactattgggggcaagggactcttgtcaccgtcagttcaacgcgtggacagcctaaggccaatcctaccgtgacactgttccctccaagcagcgaagaactccaggccaacaaggccacacttgtgtgcctgatctccgacttctaccctggggctgtgacagtggcttggaaggccgatggatctcctgtgaaagccggcgtggaaaccaccaagccatccaagcagagcaacaacaaatacgccgccagctcctacctgagcctgacacctgagcagtggaagtcccacagatcctacagctgccaagtgacccacgaaggcagcaccgtggaaaagacagtggcccctacagagtgcagcggcagagccgattgcggctttaccagcgagagctaccagcagggcgtgctgagcgccaccatcctgtacgagatcctgctgggcaaggccaccctgtacgccgtgctggtgtctgccctggtgctgatggctatggtcaagcggaaggacagccggggacgcgccaagagaagcggatctggcgtgaagcagaccctgaatttcgacctgctgaagctggctggcgacgtggaatccaacccaggcccttctagaggccatatgaccgagtacaagcccacggtgcgcctcgccacccgcgacgacgtccccagggccgtacgcaccctcgccgccgcgttcgccgactaccccgccacgcgccacaccgtcgatccggaccgccacatcgagcgggtcaccgagctgcaagaactcttcctcacgcgcgtcgggctcgacatcggcaaggtgtgggtcgcggacgacggcgccgcggtggcggtctggaccacgccggagagcgtcgaagcgggggcggtgttcgccgagatcggcccgcgcatggccgagttgagcggttcccggctggccgcgcagcaacagatggaaggcctcctggcgccgcaccggcccaaggagcccgcgtggttcctggccaccgtcggcgtctcgcccgaccaccagggcaagggtctgggcagcgccgtcgtgctccccggagtggaggcggccgagcgcgccggggtgcccgccttcctggagacctccgcgccccgcaacctccccttctacgagcggctcggcttcaccgtcaccgccgacgtcgaggtgcccgaaggaccgcgcacctggtgcatgacccgcaagcccggtgcctga

SEQ ID NO: 38074 - DNA, 1866 bp, synthetic construct
  source 1..1866: mol_type = other DNA
atggccttaccagtgaccgccttgctcctgccgctggccttgctgctccacgccgccaggccggacatccagttgacccagtcccccagctcactcagcgccagtgtgggggaccgggtgaccattacctgtaaagccagtcagagtgtggactatgagggggatagcttcctgaattggtatcagcagaagcctggcaaagccccaaagctgctgatctacgctgcatctaatctggagtcaggcgtgccttctaggttctccggtagtgggtctgggaccgatttcacattgaccatttcatccctccaacccgaggatttcgctacatattactgtcagcagtccaatgaggaccctctcacctttggccagggcaccaaagttgaaattaagagactcgaggacctgaagaacgtgttcccacctgaggtggccgtgttcgagcctagcgaggccgagatcagccacacccagaaagccaccctcgtgtgcctggctaccggcttctaccccgaccatgtggaactgtcttggtgggtcaacggcaaagaggtgcacagcggcgtgtgtaccgacccccagccactgaaagaacagcccgccctgaacgacagccggtactgcctgagcagcagactgagagtgtccgccaccttctggcagaacccccggaaccacttcagatgccaggtgcagttctacggcctgagcgagaacgacgagtggacccaggacagagccaagcccgtgacccagatcgtgtctgccgaagcctggggcagagccgatagcggctttaccagcgagagctaccagcagggcgtgctgagcgccaccatcctgtacgagatcctgctgggcaaggccaccctgtacgccgtgctggtgtctgccctggtgctgatggctatggtcaagcggaaggacagccggggaagggccaagcgatctggatctggagcaacaaacttctcactactcaaacaagcaggtgacgtggaggagaatcccgggcctactagtatggactggatttggcgcatccttttccttgtcggcgctgctaccggcgcgcattccttcgaagaagtccaacttgtggagtctggagggggcctggtgcagcccggcggctctctcagactgtcttgtgcggcaagcggctacaccttcacctcttactggatagaatgggtgaggcaggcacctggaaagggactggagtggattggagagattctgccaggagggggagatacaaattacaatgaaatcttcaaggggcgggccaccttttcagcggataccagcaagaatacagcttacctgcagatgaatagcctccgggcagaagataccgctgtttattattgcacgagacgggtgccaataagactggactattgggggcaagggactcttgtcaccgtcagttcaacgcgtatccagaaccctgatcctgccgtgtaccagctgcgggatagcaagagcagcgacaagagcgtgtgtctgttcaccgacttcgacagccagaccaacgtgtcccagagcaaggactccgacgtgtacatcaccgataagtgcgtgctggacatgcggagcatggacttcaagagcaactccgccgtggcctggtccaacaagtccgatttcgcctgcgccaacgccttcaacaacagcattatccccgaggacacattcttcccaagccccgagagcagcagcgacgtgaagctggtggaaaagagcttcgagacagacaccaacctgaacttccagaacctgagcgtgatcggcttcagaatcctgctgctgaaagtggccggctttaacctgctgatgaccctgcggctgtggtccagc

SEQ ID NO: 38075 - DNA, 2706 bp, synthetic construct
  source 1..2706: mol_type = other DNA
atggccttaccagtgaccgccttgctcctgccgctggccttgctgctccacgccgccaggccggaggttcagctgcttgagtctggcggaggactggttcaacctggcggaagcctgagactgtcttgtgccgcctctggcagaaccttcagcatgggctggtatagacaggcccctggcaagggcctcgaatttgtgtctgccatcacatacagcggcggcagcccttactacgccgattctgtgaagggcagattcaccatcagccgggacaacagcaagaacaccgtgtacctccagatgaacagcctgagagccgaggacaccgccgtgtactactgtgccgccaatccaacctacggcagcgactggaatgccgagaattggggccagggcacactggtcacagtgtctagtggtaccggcggaggcggatctggcggcggaggtagcggtggcggaggatctgaattcgacatccagttgacccagtcccccagctcactcagcgccagtgtgggggaccgggtgaccattacctgtaaagccagtcagagtgtggactatgagggggatagcttcctgaattggtatcagcagaagcctggcaaagccccaaagctgctgatctacgctgcatctaatctggagtcaggcgtgccttctaggttctccggtagtgggtctgggaccgatttcacattgaccatttcatccctccaacccgaggatttcgctacatattactgtcagcagtccaatgaggaccctctcacctttggccagggcaccaaagttgaaattaagagactcgagatccagaaccctgatcctgccgtgtaccagctgcgggatagcaagagcagcgacaagagcgtgtgtctgttcaccgacttcgacagccagaccaacgtgtcccagagcaaggactccgacgtgtacatcaccgataagtgcgtgctggacatgcggagcatggacttcaagagcaactccgccgtggcctggtccaacaagtccgatttcgcctgcgccaacgccttcaacaacagcattatccccgaggacacattcttcccaagcagcgacgtgccctgcgacgtgaagctggtggaaaagagcttcgagacagacaccaacctgaacttccagaacctgagcgtgatcggcttcagaatcctgctgctgaaagtggccggctttaacctgctgatgaccctgcggctgtggtccagccgcgccaagagaagcggatctggcgtgaagcagaccctgaatttcgacctgctgaagctggctggcgacgtggaatccaacccaggccctactagtaccatggactggatttggcgcatccttttccttgtcggcgctgctaccggcacccattccgggcccgaagtgcaactggttgaatccggtggcggcctggtgcaacccggcggatctctcagacttagctgtgccgcctccggcagaaccttcacaatgggatggtacaggcaggctccagggaaagagagagagttcgtcgccgccatctctctgtctcccacactggcctactacgccgactctgtgaaaggccggttcaccatctccagagataatagcaagaacaccgtggtgctgcaaatgaactctctgagagccgaggatacagccctgtactattgtgccgctgaccggaagtccgtgatgagcatcagacccgattactggggacagggcacactggtcacagtgtctagtggatccggcggcggaggatctggcggaggcggatctgggggcggaggctctttcgaagaagtccaacttgtggagtctggagggggcctggtgcagcccggcggctctctcagactgtcttgtgcggcaagcggctacaccttcacctcttactggatagaatgggtgaggcaggcacctggaaagggactggagtggattggagagattctgccaggagggggagatacaaattacaatgaaatcttcaaggggcgggccaccttttcagcggataccagcaagaatacagcttacctgcagatgaatagcctccgggcagaagataccgctgtttattattgcacgagacgggtgccaataagactggactattgggggcaagggactcttgtcaccgtcagttcaacgcgtgaggacctgaagaacgtgttcccacctgaggtggccgtgttcgagcctagcaaggccgagatcgcccacacccagaaagccaccctcgtgtgcctggctaccggcttctaccccgaccatgtggaactgtcttggtgggtcaacggcaaagaggtgcacagcggcgtgtgtaccgacccccagccactgaaagaacagcccgccctgaacgacagccggtactgcctgagcagcagactgagagtgtccgccaccttctggcagaacccccggaaccacttcagatgccaggtgcagttctacggcctgagcgagaacgacgagtggacccaggacagagccaagcccgtgacccagatcgtgtctgccgaagcctggggcagagccgattgcggcatcaccagcgccagctaccaccagggcgtgctgagcgccaccatcctgtacgagatcctgctgggcaaggccaccctgtacgccgtgctggtgtctgccctggtgctgatggctatggtcaagcggaaggacagccggggataa

SEQ ID NO: 38076 - DNA, 2706 bp, synthetic construct
  source 1..2706: mol_type = other DNA
atggccttaccagtgaccgccttgctcctgccgctggccttgctgctccacgccgccaggccggaagtgcagctggttgaatctggcggaggactggttcaggctggcggatctctgagactgtcttgtgccgccagcggcagaacctttagcatgggctggtttagacaggcccctggcaaagagagagagttcgtcgccgccatcacatactctggcggcagcccttactacgccgactctgtgaagggcagattcaccatcagccgggacaacgccaagaacaccgtgtacctccagatgaacagcctgaagcctgaggacaccgccgtgtactactgcgccgccaatccaacatacggcagcgactggaacgccgagaattggggccagggaacccaagtgacagtgtctagcggtaccggcggaggcggatctggcggcggaggtagcggtggcggaggatctgaattcgacatccagttgacccagtcccccagctcactcagcgccagtgtgggggaccgggtgaccattacctgtaaagccagtcagagtgtggactatgagggggatagcttcctgaattggtatcagcagaagcctggcaaagccccaaagctgctgatctacgctgcatctaatctggagtcaggcgtgccttctaggttctccggtagtgggtctgggaccgatttcacattgaccatttcatccctccaacccgaggatttcgctacatattactgtcagcagtccaatgaggaccctctcacctttggccagggcaccaaagttgaaattaagagactcgagatccagaaccctgatcctgccgtgtaccagctgcgggatagcaagagcagcgacaagagcgtgtgtctgttcaccgacttcgacagccagaccaacgtgtcccagagcaaggactccgacgtgtacatcaccgataagtgcgtgctggacatgcggagcatggacttcaagagcaactccgccgtggcctggtccaacaagtccgatttcgcctgcgccaacgccttcaacaacagcattatccccgaggacacattcttcccaagcagcgacgtgccctgcgacgtgaagctggtggaaaagagcttcgagacagacaccaacctgaacttccagaacctgagcgtgatcggcttcagaatcctgctgctgaaagtggccggctttaacctgctgatgaccctgcggctgtggtccagccgcgccaagagaagcggatctggcgtgaagcagaccctgaatttcgacctgctgaagctggctggcgacgtggaatccaacccaggccctactagtaccatggactggatttggcgcatccttttccttgtcggcgctgctaccggcgcccattccgggcccgaagtgcaactggttgaatccggtggcggcctggtgcaacccggcggatctctcagacttagctgtgccgcctccggcagaaccttcacaatgggatggtacaggcaggctccagggaaagagagagagttcgtcgccgccatctctctgtctcccacactggcctactacgccgactctgtgaaaggccggttcaccatctccagagataatagcaagaacaccgtggtgctgcaaatgaactctctgagagccgaggatacagccctgtactattgtgccgctgaccggaagtccgtgatgagcatcagacccgattactggggacagggcacactggtcacagtgtctagtggatccggcggcggaggatctggcggaggcggatctgggggcggaggctctttcgaagaagtccaacttgtggagtctggagggggcctggtgcagcccggcggctctctcagactgtcttgtgcggcaagcggctacaccttcacctcttactggatagaatgggtgaggcaggcacctggaaagggactggagtggattggagagattctgccaggagggggagatacaaattacaatgaaatcttcaaggggcgggccaccttttcagcggataccagcaagaatacagcttacctgcagatgaatagcctccgggcagaagataccgctgtttattattgcacgagacgggtgccaataagactggactattgggggcaagggactcttgtcaccgtcagttcaacgcgtgaggacctgaagaacgtgttcccacctgaggtggccgtgttcgagcctagcaaggccgagatcgcccacacccagaaagccaccctcgtgtgcctggctaccggcttctaccccgaccatgtggaactgtcttggtgggtcaacggcaaagaggtgcacagcggcgtgtgtaccgacccccagccactgaaagaacagcccgccctgaacgacagccggtactgcctgagcagcagactgagagtgtccgccaccttctggcagaacccccggaaccacttcagatgccaggtgcagttctacggcctgagcgagaacgacgagtggacccaggacagagccaagcccgtgacccagatcgtgtctgccgaagcctggggcagagccgattgcggcatcaccagcgccagctaccaccagggcgtgctgagcgccaccatcctgtacgagatcctgctgggcaaggccaccctgtacgccgtgctggtgtctgccctggtgctgatggctatggtcaagcggaaggacagccggggataa

SEQ ID NO: 38077 - DNA, 2697 bp, synthetic construct
  source 1..2697: mol_type = other DNA
atggccttaccagtgaccgccttgctcctgccgctggccttgctgctccacgccgccaggccggaagtgcagctggttgaatctggcggaggactggttcaggctggcggatctctgagactgtcttgtgccgccagcggcagaacctttagcatgggctggtttagacaggcccctggcaaagagagagagttcgtcgccgccatcacatactctggcggcagcccttactacgccgactctgtgaagggcagattcaccatcagccgggacaacgccaagaacaccgtgtacctccagatgaacagcctgaagcctgaggacaccgccgtgtactactgcgccgccaatccaacatacggcagcgactggaacgccgagaattggggccagggaacccaagtgacagtgtctagcggtaccggcggaggcggatctggcggcggaggtagcggtggcggaggatctgaattcgacatccagttgacccagtcccccagctcactcagcgccagtgtgggggaccgggtgaccattacctgtaaagccagtcagagtgtggactatgagggggatagcttcctgaattggtatcagcagaagcctggcaaagccccaaagctgctgatctacgctgcatctaatctggagtcaggcgtgccttctaggttctccggtagtgggtctgggaccgatttcacattgaccatttcatccctccaacccgaggatttcgctacatattactgtcagcagtccaatgaggaccctctcacctttggccagggcaccaaagttgaaattaagagactcgaggacctgaagaacgtgttcccacctgaggtggccgtgttcgagcctagcgaggccgagatcagccacacccagaaagccaccctcgtgtgcctggctaccggcttctaccccgaccatgtggaactgtcttggtgggtcaacggcaaagaggtgcacagcggcgtgtgtaccgacccccagccactgaaagaacagcccgccctgaacgacagccggtactgcctgagcagcagactgagagtgtccgccaccttctggcagaacccccggaaccacttcagatgccaggtgcagttctacggcctgagcgagaacgacgagtggacccaggacagagccaagcccgtgacccagatcgtgtctgccgaagcctggggcagagccgattgcggctttaccagcgagagctaccagcagggcgtgctgagcgccaccatcctgtacgagatcctgctgggcaaggccaccctgtacgccgtgctggtgtctgccctggtgctgatggctatggtcaagcggaaggacagccggggaagggccaagcgatctggatctggagcaacaaacttctcactactcaaacaagcaggtgacgtggaggagaatcccgggcctactagtgccaccatggactggatttggcgcatccttttccttgtcggcgctgctaccggcgcccattccgggcccgaagtgcaactggttgaatccggtggcggcctggtgcaagcaggcggatctctcagacttagctgtgccgcctccggcagaaccttcacaatgggatggtttaggcaggctccagggaaagagagagagttcgtcgccgccatctctctgtctcccacactggcctactacgccgactctgtgaaaggccggttcaccatctccagagataatgccaagaacaccgtggtgctgcaaatgaactctctgaaacccgaggatacagccctgtactattgtgccgctgaccggaagtccgtgatgagcatcagacccgattactggggacagggcacacaagtcacagtgtcctctggatccggcggcggaggatctggcggaggcggatctgggggcggaggctctttcgaagaagtccaacttgtggagtctggagggggcctggtgcagcccggcggctctctcagactgtcttgtgcggcaagcggctacaccttcacctcttactggatagaatgggtgaggcaggcacctggaaagggactggagtggattggagagattctgccaggagggggagatacaaattacaatgaaatcttcaaggggcgggccaccttttcagcggataccagcaagaatacagcttacctgcagatgaatagcctccgggcagaagataccgctgtttattattgcacgagacgggtgccaataagactggactattgggggcaagggactcttgtcaccgtcagttcaacgcgtatccagaaccctgatcctgccgtgtaccagctgcgggatagcaagagcagcgacaagagcgtgtgtctgttcaccgacttcgacagccagaccaacgtgtcccagagcaaggactccgacgtgtacatcaccgataagtgcgtgctggacatgcggagcatggacttcaagagcaactccgccgtggcctggtccaacaagtccgatttcgcctgcgccaacgccttcaacaacagcattatccccgaggacacattcttcccaagccccgagagcagctgcgacgtgaagctggtggaaaagagcttcgagacagacaccaacctgaacttccagaacctgagcgtgatcggcttcagaatcctgctgctgaaagtggccggctttaacctgctgatgaccctgcggctgtggtccagctaa

SEQ ID NO: 38078 - DNA, 2310 bp, synthetic construct
  source 1..2310: mol_type = other DNA
atggccttaccagtgaccgccttgctcctgccgctggccttgctgctccacgccgccaggccggaagtgcagctggttgaatctggcggaggactggttcagcctggcggatctctgagactgagctgtgaagccagcggcttcgccagcgacgattacatcatcggctggttcagacaggcccctggcaaagagagagagggcgtcagctgcatcagctctaagtacgccaacaccgtgtacaccgacagcgtgaagggcagattcagactgagcagaggcaccgccaagaataccgtgtacctccagatgagcgccctgaagcctgaggataccgccgtgtactactgcgctatggacagccgcagagtgacatgccctgagatcagcaccatgcaccggaacttcgattcttggggccagggcacactggtcacagtgtcatctggtaccggcggaggcggatctggcggcggaggtagcggtggcggaggatctgaattcgacatccagttgacccagtcccccagctcactcagcgccagtgtgggggaccgggtgaccattacctgtaaagccagtcagagtgtggactatgagggggatagcttcctgaattggtatcagcagaagcctggcaaagccccaaagctgctgatctacgctgcatctaatctggagtcaggcgtgccttctaggttctccggtagtgggtctgggaccgatttcacattgaccatttcatccctccaacccgaggatttcgctacatattactgtcagcagtccaatgaggaccctctcacctttggccagggcaccaaagttgaaattaagagactcgaggacctgaagaacgtgttcccacctgaggtggccgtgttcgagcctagcaaggccgagatcgcccacacccagaaagccaccctcgtgtgcctggctaccggcttctaccccgaccatgtggaactgtcttggtgggtcaacggcaaagaggtgcacagcggcgtgtgtaccgacccccagccactgaaagaacagcccgccctgaacgacagccggtactgcctgagcagcagactgagagtgtccgccaccttctggcagaacccccggaaccacttcagatgccaggtgcagttctacggcctgagcgagaacgacgagtggacccaggacagagccaagcccgtgacccagatcgtgtctgccgaagcctggggcagagccgattgcggcatcaccagcgccagctaccaccagggcgtgctgagcgccaccatcctgtacgagatcctgctgggcaaggccaccctgtacgccgtgctggtgtctgccctggtgctgatggctatggtcaagcggaaggacagccggggaagggccaagcgatctggatctggagcaacaaacttctcactactcaaacaagcaggtgacgtggaggagaatcccgggcctactagtatggactggatttggcgcatccttttccttgtcggcgctgctaccggcgcgcattccttcgaagaagtccaacttgtggagtctggagggggcctggtgcagcccggcggctctctcagactgtcttgtgcggcaagcggctacaccttcacctcttactggatagaatgggtgaggcaggcacctggaaagggactggagtggattggagagattctgccaggagggggagatacaaattacaatgaaatcttcaaggggcgggccaccttttcagcggataccagcaagaatacagcttacctgcagatgaatagcctccgggcagaagataccgctgtttattattgcacgagacgggtgccaataagactggactattgggggcaagggactcttgtcaccgtcagttcaacgcgtatccagaaccctgatcctgccgtgtaccagctgcgggatagcaagagcagcgacaagagcgtgtgtctgttcaccgacttcgacagccagaccaacgtgtcccagagcaaggactccgacgtgtacatcaccgataagtgcgtgctggacatgcggagcatggacttcaagagcaactccgccgtggcctggtccaacaagtccgatttcgcctgcgccaacgccttcaacaacagcattatccccgaggacacattcttcccaagcagcgacgtgccctgcgacgtgaagctggtggaaaagagcttcgagacagacaccaacctgaacttccagaacctgagcgtgatcggcttcagaatcctgctgctgaaagtggccggctttaacctgctgatgaccctgcggctgtggtccagctaa

SEQ ID NO: 38079 - DNA, 2283 bp, synthetic construct
  source 1..2283: mol_type = other DNA
atggccttaccagtgaccgccttgctcctgccgctggccttgctgctccacgccgccaggccggacatccagttgacccagtcccccagctcactcagcgccagtgtgggggaccgggtgaccattacctgtaaagccagtcagagtgtggactatgagggggatagcttcctgaattggtatcagcagaagcctggcaaagccccaaagctgctgatctacgctgcatctaatctggagtcaggcgtgccttctaggttctccggtagtgggtctgggaccgatttcacattgaccatttcatccctccaacccgaggatttcgctacatattactgtcagcagtccaatgaggaccctctcacctttggccagggcaccaaagttgaaattaagagactcgaggacctgaagaacgtgttcccacctgaggtggccgtgttcgagcctagcgaggccgagatcagccacacccagaaagccaccctcgtgtgcctggctaccggcttctaccccgaccatgtggaactgtcttggtgggtcaacggcaaagaggtgcacagcggcgtgtgtaccgacccccagccactgaaagaacagcccgccctgaacgacagccggtactgcctgagcagcagactgagagtgtccgccaccttctggcagaacccccggaaccacttcagatgccaggtgcagttctacggcctgagcgagaacgacgagtggacccaggacagagccaagcccgtgacccagatcgtgtctgccgaagcctggggcagagccgattgcggctttaccagcgagagctaccagcagggcgtgctgagcgccaccatcctgtacgagatcctgctgggcaaggccaccctgtacgccgtgctggtgtctgccctggtgctgatggctatggtcaagcggaaggacagccggggaagggccaagcgatctggatctggagcaacaaacttctcactactcaaacaagcaggtgacgtggaggagaatcccgggcctactagtaccatggactggatttggcgcatccttttccttgtcggcgctgctaccggcgcccattccgggcccgaagtgcaactggttgaatccggtggcggcctggtgcaacccggcggatctctcagacttagctgtgccgcctccggcagaaccttcacaatgggatggtacaggcaggctccagggaaagagagagagttcgtcgccgccatctctctgtctcccacactggcctactacgccgactctgtgaaaggccggttcaccatctccagagataatagcaagaacaccgtggtgctgcaaatgaactctctgagagccgaggatacagccctgtactattgtgccgctgaccggaagtccgtgatgagcatcagacccgattactggggacagggcacactggtcacagtgtctagtggatccggcggcggaggatctggcggaggcggatctgggggcggaggctctttcgaagaagtccaacttgtggagtctggagggggcctggtgcagcccggcggctctctcagactgtcttgtgcggcaagcggctacaccttcacctcttactggatagaatgggtgaggcaggcacctggaaagggactggagtggattggagagattctgccaggagggggagatacaaattacaatgaaatcttcaaggggcgggccaccttttcagcggataccagcaagaatacagcttacctgcagatgaatagcctccgggcagaagataccgctgtttattattgcacgagacgggtgccaataagactggactattgggggcaagggactcttgtcaccgtcagttcaacgcgtatccagaaccctgatcctgccgtgtaccagctgcgggatagcaagagcagcgacaagagcgtgtgtctgttcaccgacttcgacagccagaccaacgtgtcccagagcaaggactccgacgtgtacatcaccgataagtgcgtgctggacatgcggagcatggacttcaagagcaactccgccgtggcctggtccaacaagtccgatttcgcctgcgccaacgccttcaacaacagcattatccccgaggacacattcttcccaagccccgagagcagctgcgacgtgaagctggtggaaaagagcttcgagacagacaccaacctgaacttccagaacctgagcgtgatcggcttcagaatcctgctgctgaaagtggccggctttaacctgctgatgaccctgcggctgtggtccagctaa

SEQ ID NO: 38080 - DNA, 2301 bp, synthetic construct
  source 1..2301: mol_type = other DNA
atggccttaccagtgaccgccttgctcctgccgctggccttgctgctccacgccgccaggccggacatccagttgacccagtcccccagctcactcagcgccagtgtgggggaccgggtgaccattacctgtaaagccagtcagagtgtggactatgagggggatagcttcctgaattggtatcagcagaagcctggcaaagccccaaagctgctgatctacgctgcatctaatctggagtcaggcgtgccttctaggttctccggtagtgggtctgggaccgatttcacattgaccatttcatccctccaacccgaggatttcgctacatattactgtcagcagtccaatgaggaccctctcacctttggccagggcaccaaagttgaaattaagagactcgaggacctgaagaacgtgttcccacctgaggtggccgtgttcgagcctagcgaggccgagatcagccacacccagaaagccaccctcgtgtgcctggctaccggcttctaccccgaccatgtggaactgtcttggtgggtcaacggcaaagaggtgcacagcggcgtgtgtaccgacccccagccactgaaagaacagcccgccctgaacgacagccggtactgcctgagcagcagactgagagtgtccgccaccttctggcagaacccccggaaccacttcagatgccaggtgcagttctacggcctgagcgagaacgacgagtggacccaggacagagccaagcccgtgacccagatcgtgtctgccgaagcctggggcagagccgattgcggctttaccagcgagagctaccagcagggcgtgctgagcgccaccatcctgtacgagatcctgctgggcaaggccaccctgtacgccgtgctggtgtctgccctggtgctgatggctatggtcaagcggaaggacagccggggaagggccaagcgatctggatctggagcaacaaacttctcactactcaaacaagcaggtgacgtggaggagaatcccgggcctactagtaccatggactggatttggcgcatccttttccttgtcggcgctgctaccggcgcccattccgggccccaggtgcagctggttgaatctggcggaggactggttcagcctggcggatctctgagactgtcttgtgccgccagcggcaacatcaacagcagaaactgcatgggctggttcagacaggcccctggcaagggaagagaaggcgtggcagctatcggccaagtgaccggcagaacctactacgtggacagcgtgaagggcagattcaccatcagcctggacaacagcaagaacaccctgtacctccagatgaacagcctgagagccgaggacaccgccgtgtactattgtgctgctgcccctggctgtctgctgtctgcacttagaagcgccgactacagaaactggggccagggcacactggtcaccgtttcttctggatccggcggcggaggatctggcggaggcggatctgggggcggaggctctttcgaagaagtccaacttgtggagtctggagggggcctggtgcagcccggcggctctctcagactgtcttgtgcggcaagcggctacaccttcacctcttactggatagaatgggtgaggcaggcacctggaaagggactggagtggattggagagattctgccaggagggggagatacaaattacaatgaaatcttcaaggggcgggccaccttttcagcggataccagcaagaatacagcttacctgcagatgaatagcctccgggcagaagataccgctgtttattattgcacgagacgggtgccaataagactggactattgggggcaagggactcttgtcaccgtcagttcaacgcgtatccagaaccctgatcctgccgtgtaccagctgcgggatagcaagagcagcgacaagagcgtgtgtctgttcaccgacttcgacagccagaccaacgtgtcccagagcaaggactccgacgtgtacatcaccgataagtgcgtgctggacatgcggagcatggacttcaagagcaactccgccgtggcctggtccaacaagtccgatttcgcctgcgccaacgccttcaacaacagcattatccccgaggacacattcttcccaagccccgagagcagctgcgacgtgaagctggtggaaaagagcttcgagacagacaccaacctgaacttccagaacctgagcgtgatcggcttcagaatcctgctgctgaaagtggccggctttaacctgctgatgaccctgcggctgtggtccagc

SEQ ID NO: 38081 - DNA, 2304 bp, synthetic construct
  source 1..2304: mol_type = other DNA
atggccttaccagtgaccgccttgctcctgccgctggccttgctgctccacgccgccaggccggacatccagttgacccagtcccccagctcactcagcgccagtgtgggggaccgggtgaccattacctgtaaagccagtcagagtgtggactatgagggggatagcttcctgaattggtatcagcagaagcctggcaaagccccaaagctgctgatctacgctgcatctaatctggagtcaggcgtgccttctaggttctccggtagtgggtctgggaccgatttcacattgaccatttcatccctccaacccgaggatttcgctacatattactgtcagcagtccaatgaggaccctctcacctttggccagggcaccaaagttgaaattaagagactcgaggacctgaagaacgtgttcccacctgaggtggccgtgttcgagcctagcgaggccgagatcagccacacccagaaagccaccctcgtgtgcctggctaccggcttctaccccgaccatgtggaactgtcttggtgggtcaacggcaaagaggtgcacagcggcgtgtgtaccgacccccagccactgaaagaacagcccgccctgaacgacagccggtactgcctgagcagcagactgagagtgtccgccaccttctggcagaacccccggaaccacttcagatgccaggtgcagttctacggcctgagcgagaacgacgagtggacccaggacagagccaagcccgtgacccagatcgtgtctgccgaagcctggggcagagccgattgcggctttaccagcgagagctaccagcagggcgtgctgagcgccaccatcctgtacgagatcctgctgggcaaggccaccctgtacgccgtgctggtgtctgccctggtgctgatggctatggtcaagcggaaggacagccggggaagggccaagcgatctggatctggagcaacaaacttctcactactcaaacaagcaggtgacgtggaggagaatcccgggcctactagtaccatggactggatttggcgcatccttttccttgtcggcgctgctaccggcgcccattccgggccccaggtgcagctggttgaatctggcggaggatctgttcaggctggcggctctctgagactgtcttgtggcgcttccggcaacatcagcagcagaaactgcatgggctggttcagacaggcccctggcaaagagagagaaggcgttgccgccatcggacaagtgaccggcagatcctactacgtggacagcgtgaagggcagattcaccatcagcctggacaacgccaagaacaccctgtacctccagatgaacacactgaagcccgaggacaccgccatgtactactgtgctgctgcccctggctgtctgctgtctgcacttagaagcgccgactacagaaactggggccagggaacccaagtgacagtgtctagtggatccggcggcggaggatctggcggaggcggatctgggggcggaggctctttcgaagaagtccaacttgtggagtctggagggggcctggtgcagcccggcggctctctcagactgtcttgtgcggcaagcggctacaccttcacctcttactggatagaatgggtgaggcaggcacctggaaagggactggagtggattggagagattctgccaggagggggagatacaaattacaatgaaatcttcaaggggcgggccaccttttcagcggataccagcaagaatacagcttacctgcagatgaatagcctccgggcagaagataccgctgtttattattgcacgagacgggtgccaataagactggactattgggggcaagggactcttgtcaccgtcagttcaacgcgtatccagaaccctgatcctgccgtgtaccagctgcgggatagcaagagcagcgacaagagcgtgtgtctgttcaccgacttcgacagccagaccaacgtgtcccagagcaaggactccgacgtgtacatcaccgataagtgcgtgctggacatgcggagcatggacttcaagagcaactccgccgtggcctggtccaacaagtccgatttcgcctgcgccaacgccttcaacaacagcattatccccgaggacacattcttcccaagccccgagagcagctgcgacgtgaagctggtggaaaagagcttcgagacagacaccaacctgaacttccagaacctgagcgtgatcggcttcagaatcctgctgctgaaagtggccggctttaacctgctgatgaccctgcggctgtggtccagctaa

SEQ ID NO: 38082 - DNA, 2727 bp, synthetic construct
  source 1..2727: mol_type = other DNA
atggccttaccagtgaccgccttgctcctgccgctggccttgctgctccacgccgccaggccggaagtgcagctggttgaatctggcggaggactggttcaggctggcggatctctgagactgtcttgtgccgccagcggcagaacctttagcatgggctggtttagacaggcccctggcaaagagagagagttcgtcgccgccatcacatactctggcggcagcccttactacgccgactctgtgaagggcagattcaccatcagccgggacaacgccaagaacaccgtgtacctccagatgaacagcctgaagcctgaggacaccgccgtgtactactgcgccgccaatccaacatacggcagcgactggaacgccgagaattggggccagggaacccaagtgacagtgtctagcggtaccggcggaggcggatctggcggcggaggtagcggtggcggaggatctgaattcgacatccagttgacccagtcccccagctcactcagcgccagtgtgggggaccgggtgaccattacctgtaaagccagtcagagtgtggactatgagggggatagcttcctgaattggtatcagcagaagcctggcaaagccccaaagctgctgatctacgctgcatctaatctggagtcaggcgtgccttctaggttctccggtagtgggtctgggaccgatttcacattgaccatttcatccctccaacccgaggatttcgctacatattactgtcagcagtccaatgaggaccctctcacctttggccagggcaccaaagttgaaattaagagactcgagatccagaaccctgatcctgccgtgtaccagctgcgggatagcaagagcagcgacaagagcgtgtgtctgttcaccgacttcgacagccagaccaacgtgtcccagagcaaggactccgacgtgtacatcaccgataagtgcgtgctggacatgcggagcatggacttcaagagcaactccgccgtggcctggtccaacaagtccgatttcgcctgcgccaacgccttcaacaacagcattatccccgaggacacattcttcccaagcagcgacgtgccctgcgacgtgaagctggtggaaaagagcttcgagacagacaccaacctgaacttccagaacctgagcgtgatcggcttcagaatcctgctgctgaaagtggccggctttaacctgctgatgaccctgcggctgtggtccagccgcgccaagagaagcggatctggcgtgaagcagaccctgaatttcgacctgctgaagctggctggcgacgtggaatccaacccaggccctactagtaccatggactggatttggcgcatccttttccttgtcggcgctgctaccggcgcccattccgggccccaggtgcagctggttgaatctggcggaggatctgttcaggctggcggctctctgagactgtcttgtggcgcttccggcaacatcagcagcagaaactgcatgggctggttcagacaggcccctggcaaagagagagaaggcgttgccgccatcggacaagtgaccggcagatcctactacgtggacagcgtgaagggcagattcaccatcagcctggacaacgccaagaacaccctgtacctccagatgaacacactgaagcccgaggacaccgccatgtactactgtgctgctgcccctggctgtctgctgtctgcacttagaagcgccgactacagaaactggggccagggaacccaagtgacagtgtctagtggatccggcggcggaggatctggcggaggcggatctgggggcggaggctctttcgaagaagtccaacttgtggagtctggagggggcctggtgcagcccggcggctctctcagactgtcttgtgcggcaagcggctacaccttcacctcttactggatagaatgggtgaggcaggcacctggaaagggactggagtggattggagagattctgccaggagggggagatacaaattacaatgaaatcttcaaggggcgggccaccttttcagcggataccagcaagaatacagcttacctgcagatgaatagcctccgggcagaagataccgctgtttattattgcacgagacgggtgccaataagactggactattgggggcaagggactcttgtcaccgtcagttcaacgcgtgaggacctgaagaacgtgttcccacctgaggtggccgtgttcgagcctagcaaggccgagatcgcccacacccagaaagccaccctcgtgtgcctggctaccggcttctaccccgaccatgtggaactgtcttggtgggtcaacggcaaagaggtgcacagcggcgtgtgtaccgacccccagccactgaaagaacagcccgccctgaacgacagccggtactgcctgagcagcagactgagagtgtccgccaccttctggcagaacccccggaaccacttcagatgccaggtgcagttctacggcctgagcgagaacgacgagtggacccaggacagagccaagcccgtgacccagatcgtgtctgccgaagcctggggcagagccgattgcggcatcaccagcgccagctaccaccagggcgtgctgagcgccaccatcctgtacgagatcctgctgggcaaggccaccctgtacgccgtgctggtgtctgccctggtgctgatggctatggtcaagcggaaggacagccggggataa

SEQ ID NO: 38083 - DNA, 2718 bp, synthetic construct
  source 1..2718: mol_type = other DNA
atggccttaccagtgaccgccttgctcctgccgctggccttgctgctccacgccgccaggccgcaggtgcagctggttgaatctggcggaggatctgttcaggctggcggctctctgagactgtcttgtggcgcttccggcaacatcagcagcagaaactgcatgggctggttcagacaggcccctggcaaagagagagaaggcgttgccgccatcggacaagtgaccggcagatcctactacgtggacagcgtgaagggcagattcaccatcagcctggacaacgccaagaacaccctgtacctccagatgaacacactgaagcccgaggacaccgccatgtactactgtgctgctgcccctggctgtctgctgtctgcacttagaagcgccgactacagaaactggggccagggaacccaagtgacagtgtctagtggtaccggcggaggcggatctggcggcggaggtagcggtggcggaggatctgaattcgacatccagttgacccagtcccccagctcactcagcgccagtgtgggggaccgggtgaccattacctgtaaagccagtcagagtgtggactatgagggggatagcttcctgaattggtatcagcagaagcctggcaaagccccaaagctgctgatctacgctgcatctaatctggagtcaggcgtgccttctaggttctccggtagtgggtctgggaccgatttcacattgaccatttcatccctccaacccgaggatttcgctacatattactgtcagcagtccaatgaggaccctctcacctttggccagggcaccaaagttgaaattaagagactcgaggacctgaagaacgtgttcccacctgaggtggccgtgttcgagcctagcgaggccgagatcagccacacccagaaagccaccctcgtgtgcctggctaccggcttctaccccgaccatgtggaactgtcttggtgggtcaacggcaaagaggtgcacagcggcgtgtgtaccgacccccagccactgaaagaacagcccgccctgaacgacagccggtactgcctgagcagcagactgagagtgtccgccaccttctggcagaacccccggaaccacttcagatgccaggtgcagttctacggcctgagcgagaacgacgagtggacccaggacagagccaagcccgtgacccagatcgtgtctgccgaagcctggggcagagccgattgcggctttaccagcgagagctaccagcagggcgtgctgagcgccaccatcctgtacgagatcctgctgggcaaggccaccctgtacgccgtgctggtgtctgccctggtgctgatggctatggtcaagcggaaggacagccggggaagggccaagcgatctggatctggagcaacaaacttctcactactcaaacaagcaggtgacgtggaggagaatcccgggcctactagtgccaccatggactggatttggcgcatccttttccttgtcggcgctgctaccggcgcccattccgggcccgaagtgcaactggttgaatccggtggcggcctggtgcaagcaggcggatctctcagacttagctgtgccgcctccggcagaaccttcacaatgggatggtttaggcaggctccagggaaagagagagagttcgtcgccgccatctctctgtctcccacactggcctactacgccgactctgtgaaaggccggttcaccatctccagagataatgccaagaacaccgtggtgctgcaaatgaactctctgaaacccgaggatacagccctgtactattgtgccgctgaccggaagtccgtgatgagcatcagacccgattactggggacagggcacacaagtcacagtgtcctctggatccggcggcggaggatctggcggaggcggatctgggggcggaggctctttcgaagaagtccaacttgtggagtctggagggggcctggtgcagcccggcggctctctcagactgtcttgtgcggcaagcggctacaccttcacctcttactggatagaatgggtgaggcaggcacctggaaagggactggagtggattggagagattctgccaggagggggagatacaaattacaatgaaatcttcaaggggcgggccaccttttcagcggataccagcaagaatacagcttacctgcagatgaatagcctccgggcagaagataccgctgtttattattgcacgagacgggtgccaataagactggactattgggggcaagggactcttgtcaccgtcagttcaacgcgtatccagaaccctgatcctgccgtgtaccagctgcgggatagcaagagcagcgacaagagcgtgtgtctgttcaccgacttcgacagccagaccaacgtgtcccagagcaaggactccgacgtgtacatcaccgataagtgcgtgctggacatgcggagcatggacttcaagagcaactccgccgtggcctggtccaacaagtccgatttcgcctgcgccaacgccttcaacaacagcattatccccgaggacacattcttcccaagccccgagagcagctgcgacgtgaagctggtggaaaagagcttcgagacagacaccaacctgaacttccagaacctgagcgtgatcggcttcagaatcctgctgctgaaagtggccggctttaacctgctgatgaccctgcggctgtggtccagctaa

SEQ ID NO: 38084 - DNA, 2307 bp, synthetic construct
  source 1..2307: mol_type = other DNA
atggccttaccagtgaccgccttgctcctgccgctggccttgctgctccacgccgccaggccgcaggtgcagctggttgaatctggcggaggatctgttcaggctggcggctctctgagactgtcttgtggcgcttccggcaacatcagcagcagaaactgcatgggctggttcagacaggcccctggcaaagagagagaaggcgttgccgccatcggacaagtgaccggcagatcctactacgtggacagcgtgaagggcagattcaccatcagcctggacaacgccaagaacaccctgtacctccagatgaacacactgaagcccgaggacaccgccatgtactactgtgctgctgcccctggctgtctgctgtctgcacttagaagcgccgactacagaaactggggccagggaacccaagtgacagtgtctagtggtaccggcggaggcggatctggcggcggaggtagcggtggcggaggatctgaattcgacatccagttgacccagtcccccagctcactcagcgccagtgtgggggaccgggtgaccattacctgtaaagccagtcagagtgtggactatgagggggatagcttcctgaattggtatcagcagaagcctggcaaagccccaaagctgctgatctacgctgcatctaatctggagtcaggcgtgccttctaggttctccggtagtgggtctgggaccgatttcacattgaccatttcatccctccaacccgaggatttcgctacatattactgtcagcagtccaatgaggaccctctcacctttggccagggcaccaaagttgaaattaagagactcgaggacctgaagaacgtgttcccacctgaggtggccgtgttcgagcctagcgaggccgagatcagccacacccagaaagccaccctcgtgtgcctggctaccggcttctaccccgaccatgtggaactgtcttggtgggtcaacggcaaagaggtgcacagcggcgtgtgtaccgacccccagccactgaaagaacagcccgccctgaacgacagccggtactgcctgagcagcagactgagagtgtccgccaccttctggcagaacccccggaaccacttcagatgccaggtgcagttctacggcctgagcgagaacgacgagtggacccaggacagagccaagcccgtgacccagatcgtgtctgccgaagcctggggcagagccgattgcggctttaccagcgagagctaccagcagggcgtgctgagcgccaccatcctgtacgagatcctgctgggcaaggccaccctgtacgccgtgctggtgtctgccctggtgctgatggctatggtcaagcggaaggacagccggggaagggccaagcgatctggatctggagcaacaaacttctcactactcaaacaagcaggtgacgtggaggagaatcccgggcctactagtgccaccatggactggatttggcgcatccttttccttgtcggcgctgctaccggcgcccattccttcgaagaagtccaacttgtggagtctggagggggcctggtgcagcccggcggctctctcagactgtcttgtgcggcaagcggctacaccttcacctcttactggatagaatgggtgaggcaggcacctggaaagggactggagtggattggagagattctgccaggagggggagatacaaattacaatgaaatcttcaaggggcgggccaccttttcagcggataccagcaagaatacagcttacctgcagatgaatagcctccgggcagaagataccgctgtttattattgcacgagacgggtgccaataagactggactattgggggcaagggactcttgtcaccgtcagttcaacgcgtatccagaaccctgatcctgccgtgtaccagctgcgggatagcaagagcagcgacaagagcgtgtgtctgttcaccgacttcgacagccagaccaacgtgtcccagagcaaggactccgacgtgtacatcaccgataagtgcgtgctggacatgcggagcatggacttcaagagcaactccgccgtggcctggtccaacaagtccgatttcgcctgcgccaacgccttcaacaacagcattatccccgaggacacattcttcccaagccccgagagcagctgcgacgtgaagctggtggaaaagagcttcgagacagacaccaacctgaacttccagaacctgagcgtgatcggcttcagaatcctgctgctgaaagtggccggctttaacctgctgatgaccctgcggctgtggtccagctaa

SEQ ID NO: 38085 - DNA, 2307 bp, synthetic construct
  source 1..2307: mol_type = other DNA
atggccttaccagtgaccgccttgctcctgccgctggccttgctgctccacgccgccaggccgcaagttcagctggtggaaagcggtggtggcgttgtgcaacctggtggaagtctgaggctgagctgtgccgcttctggcctgagctttagcacctacactgtggcctggttcaggcaggctcccggaaagggtcttgaaggcgtggccgccattccttacaccagccagcacatggtgtacacagacagcgtcagaggccggttcaccatcagcagagacaactccaagaatacgctctatctccagatgaactctctgcgcgccgaagatacagccgtgtattactgcgccaccgacagacggcctggcacctctatgctggctatcaacggctacaacagatggggacagggaaccaccgtgaccgtgtcatctggtaccggcggaggcggatctggcggcggaggtagcggtggcggaggatctgaattcgacatccagttgacccagtcccccagctcactcagcgccagtgtgggggaccgggtgaccattacctgtaaagccagtcagagtgtggactatgagggggatagcttcctgaattggtatcagcagaagcctggcaaagccccaaagctgctgatctacgctgcatctaatctggagtcaggcgtgccttctaggttctccggtagtgggtctgggaccgatttcacattgaccatttcatccctccaacccgaggatttcgctacatattactgtcagcagtccaatgaggaccctctcacctttggccagggcaccaaagttgaaattaagagactcgaggacctgaagaacgtgttcccacctgaggtggccgtgttcgagcctagcgaggccgagatcagccacacccagaaagccaccctcgtgtgcctggctaccggcttctaccccgaccatgtggaactgtcttggtgggtcaacggcaaagaggtgcacagcggcgtgtgtaccgacccccagccactgaaagaacagcccgccctgaacgacagccggtactgcctgagcagcagactgagagtgtccgccaccttctggcagaacccccggaaccacttcagatgccaggtgcagttctacggcctgagcgagaacgacgagtggacccaggacagagccaagcccgtgacccagatcgtgtctgccgaagcctggggcagagccgattgcggctttaccagcgagagctaccagcagggcgtgctgagcgccaccatcctgtacgagatcctgctgggcaaggccaccctgtacgccgtgctggtgtctgccctggtgctgatggctatggtcaagcggaaggacagccggggaagggccaagcgatctggatctggagcaacaaacttctcactactcaaacaagcaggtgacgtggaggagaatcccgggcctactagtgccaccatggactggatttggcgcatccttttccttgtcggcgctgctaccggcgcccattccttcgaagaagtccaacttgtggagtctggagggggcctggtgcagcccggcggctctctcagactgtcttgtgcggcaagcggctacaccttcacctcttactggatagaatgggtgaggcaggcacctggaaagggactggagtggattggagagattctgccaggagggggagatacaaattacaatgaaatcttcaaggggcgggccaccttttcagcggataccagcaagaatacagcttacctgcagatgaatagcctccgggcagaagataccgctgtttattattgcacgagacgggtgccaataagactggactattgggggcaagggactcttgtcaccgtcagttcaacgcgtatccagaaccctgatcctgccgtgtaccagctgcgggatagcaagagcagcgacaagagcgtgtgtctgttcaccgacttcgacagccagaccaacgtgtcccagagcaaggactccgacgtgtacatcaccgataagtgcgtgctggacatgcggagcatggacttcaagagcaactccgccgtggcctggtccaacaagtccgatttcgcctgcgccaacgccttcaacaacagcattatccccgaggacacattcttcccaagccccgagagcagctgcgacgtgaagctggtggaaaagagcttcgagacagacaccaacctgaacttccagaacctgagcgtgatcggcttcagaatcctgctgctgaaagtggccggctttaacctgctgatgaccctgcggctgtggtccagctaa

SEQ ID NO: 38086 - DNA, 2304 bp, synthetic construct
  source 1..2304: mol_type = other DNA
atggccttaccagtgaccgccttgctcctgccgctggccttgctgctccacgccgccaggccggacatccagttgacccagtcccccagctcactcagcgccagtgtgggggaccgggtgaccattacctgtaaagccagtcagagtgtggactatgagggggatagcttcctgaattggtatcagcagaagcctggcaaagccccaaagctgctgatctacgctgcatctaatctggagtcaggcgtgccttctaggttctccggtagtgggtctgggaccgatttcacattgaccatttcatccctccaacccgaggatttcgctacatattactgtcagcagtccaatgaggaccctctcacctttggccagggcaccaaagttgaaattaagagactcgaggacctgaagaacgtgttcccacctgaggtggccgtgttcgagcctagcgaggccgagatcagccacacccagaaagccaccctcgtgtgcctggctaccggcttctaccccgaccatgtggaactgtcttggtgggtcaacggcaaagaggtgcacagcggcgtgtgtaccgacccccagccactgaaagaacagcccgccctgaacgacagccggtactgcctgagcagcagactgagagtgtccgccaccttctggcagaacccccggaaccacttcagatgccaggtgcagttctacggcctgagcgagaacgacgagtggacccaggacagagccaagcccgtgacccagatcgtgtctgccgaagcctggggcagagccgattgcggctttaccagcgagagctaccagcagggcgtgctgagcgccaccatcctgtacgagatcctgctgggcaaggccaccctgtacgccgtgctggtgtctgccctggtgctgatggctatggtcaagcggaaggacagccggggaagggccaagcgatctggatctggagcaacaaacttctcactactcaaacaagcaggtgacgtggaggagaatcccgggcctactagtaccatggactggatttggcgcatccttttccttgtcggcgctgctaccggcgcccattccgggccccaagttcagctggtggaaagcggtggtggcgttgtgcaacctggtggaagtctgaggctgagctgtgccgcttctggcctgagctttagcacctacactgtggcctggttcaggcaggctcccggaaagggtcttgaaggcgtggccgccattccttacaccagccagcacatggtgtacacagacagcgtcagaggccggttcaccatcagcagagacaactccaagaatacgctctatctccagatgaactctctgcgcgccgaagatacagccgtgtattactgcgccaccgacagacggcctggcacctctatgctggctatcaacggctacaacagatggggacagggaaccaccgtgaccgtgtcatctggatccggcggcggaggatctggcggaggcggatctgggggcggaggctctttcgaagaagtccaacttgtggagtctggagggggcctggtgcagcccggcggctctctcagactgtcttgtgcggcaagcggctacaccttcacctcttactggatagaatgggtgaggcaggcacctggaaagggactggagtggattggagagattctgccaggagggggagatacaaattacaatgaaatcttcaaggggcgggccaccttttcagcggataccagcaagaatacagcttacctgcagatgaatagcctccgggcagaagataccgctgtttattattgcacgagacgggtgccaataagactggactattgggggcaagggactcttgtcaccgtcagttcaacgcgtatccagaaccctgatcctgccgtgtaccagctgcgggatagcaagagcagcgacaagagcgtgtgtctgttcaccgacttcgacagccagaccaacgtgtcccagagcaaggactccgacgtgtacatcaccgataagtgcgtgctggacatgcggagcatggacttcaagagcaactccgccgtggcctggtccaacaagtccgatttcgcctgcgccaacgccttcaacaacagcattatccccgaggacacattcttcccaagccccgagagcagctgcgacgtgaagctggtggaaaagagcttcgagacagacaccaacctgaacttccagaacctgagcgtgatcggcttcagaatcctgctgctgaaagtggccggctttaacctgctgatgaccctgcggctgtggtccagctaa

SEQ ID NO: 38087 - DNA, 2310 bp, synthetic construct
  source 1..2310: mol_type = other DNA
atggccttaccagtgaccgccttgctcctgccgctggccttgctgctccacgccgccaggccggacatccagttgacccagtcccccagctcactcagcgccagtgtgggggaccgggtgaccattacctgtaaagccagtcagagtgtggactatgagggggatagcttcctgaattggtatcagcagaagcctggcaaagccccaaagctgctgatctacgctgcatctaatctggagtcaggcgtgccttctaggttctccggtagtgggtctgggaccgatttcacattgaccatttcatccctccaacccgaggatttcgctacatattactgtcagcagtccaatgaggaccctctcacctttggccagggcaccaaagttgaaattaagagactcgaggacctgaagaacgtgttcccacctgaggtggccgtgttcgagcctagcgaggccgagatcagccacacccagaaagccaccctcgtgtgcctggctaccggcttctaccccgaccatgtggaactgtcttggtgggtcaacggcaaagaggtgcacagcggcgtgtgtaccgacccccagccactgaaagaacagcccgccctgaacgacagccggtactgcctgagcagcagactgagagtgtccgccaccttctggcagaacccccggaaccacttcagatgccaggtgcagttctacggcctgagcgagaacgacgagtggacccaggacagagccaagcccgtgacccagatcgtgtctgccgaagcctggggcagagccgattgcggctttaccagcgagagctaccagcagggcgtgctgagcgccaccatcctgtacgagatcctgctgggcaaggccaccctgtacgccgtgctggtgtctgccctggtgctgatggctatggtcaagcggaaggacagccggggaagggccaagcgatctggatctggagcaacaaacttctcactactcaaacaagcaggtgacgtggaggagaatcccgggcctactagtaccatggactggatttggcgcatccttttccttgtcggcgctgctaccggcgcccattccgggcccgaggtgcagctggttgaatctggcggaggatctgttcaggctggcggctctctgagactgtcttgtgccgccagcggctacacctacagcatcaactgcatgggctggttcagacaggcccctggcaaagagagagaaggcgttgccgccatctctaccggcggaggcagaaccgattaccgggattctgtgaagggcagattcaccatcagccaggacaacgccaagaacaccgtgtacctccagatgaacagcctgaagcctgaggacaccgccatgtactactgtgccggcaagaccacctatcctggctacggatgtggcctgggcagaagcgcctacaattattggggccagggcacccaagtgaccgtgtcatctggatccggcggcggaggatctggcggaggcggatctgggggcggaggctctttcgaagaagtccaacttgtggagtctggagggggcctggtgcagcccggcggctctctcagactgtcttgtgcggcaagcggctacaccttcacctcttactggatagaatgggtgaggcaggcacctggaaagggactggagtggattggagagattctgccaggagggggagatacaaattacaatgaaatcttcaaggggcgggccaccttttcagcggataccagcaagaatacagcttacctgcagatgaatagcctccgggcagaagataccgctgtttattattgcacgagacgggtgccaataagactggactattgggggcaagggactcttgtcaccgtcagttcaacgcgtatccagaaccctgatcctgccgtgtaccagctgcgggatagcaagagcagcgacaagagcgtgtgtctgttcaccgacttcgacagccagaccaacgtgtcccagagcaaggactccgacgtgtacatcaccgataagtgcgtgctggacatgcggagcatggacttcaagagcaactccgccgtggcctggtccaacaagtccgatttcgcctgcgccaacgccttcaacaacagcattatccccgaggacacattcttcccaagccccgagagcagctgcgacgtgaagctggtggaaaagagcttcgagacagacaccaacctgaacttccagaacctgagcgtgatcggcttcagaatcctgctgctgaaagtggccggctttaacctgctgatgaccctgcggctgtggtccagctaa

SEQ ID NO: 38088 - DNA, 1866 bp, synthetic construct
  source 1..1866: mol_type = other DNA
atggccttaccagtgaccgccttgctcctgccgctggccttgctgctccacgccgccaggccggacatccagttgacccagtcccccagctcactcagcgccagtgtgggggaccgggtgaccattacctgtaaagccagtcagagtgtggactatgagggggatagcttcctgaattggtatcagcagaagcctggcaaagccccaaagctgctgatctacgctgcatctaatctggagtcaggcgtgccttctaggttctccggtagtgggtctgggaccgatttcacattgaccatttcatccctccaacccgaggatttcgctacatattactgtcagcagtccaatgaggaccctctcacctttggccagggcaccaaagttgaaattaagagactcgaggacctgaagcacgtgttcccacctgaggtggccgtgttcgagcctagcgacgccgagatctggcacacccagaaagccaccctcgtgtgcctggctaccggcttctaccccgaccatgtggaactgtcttggtgggtcaacggcaaagaggtgcacagcggcgtgtctaccgacccccagccactgaaagaacagcccgccctgaacgacagccggtactgcctgagcagcagactgagagtgtccgccaccttctggcagaacccccggaaccacttcagatgccaggtgcagttctacggcctgagcgagaacgacgagtggacccaggacagagccaagcccgtgacccagatcgtgtctgccgaagcctggggcagagccgattgcggctttaccagcgagagctaccagcagggcgtgctgagcgccaccatcctgtacgagatcctgctgggcaaggccaccctgtacgccgtgctggtgtctgccctggtgctgatggctatggtcaagcggaaggacagccggggaagggccaagcgatctggatctggagcaacaaacttctcactactcaaacaagcaggtgacgtggaggagaatcccgggcctactagtatggactggatttggcgcatccttttccttgtcggcgctgctaccggcgcgcattccttcgaagaagtccaacttgtggagtctggagggggcctggtgcagcccggcggctctctcagactgtcttgtgcggcaagcggctacaccttcacctcttactggatagaatgggtgaggcaggcacctggaaagggactggagtggattggagagattctgccaggagggggagatacaaattacaatgaaatcttcaaggggcgggccaccttttcagcggataccagcaagaatacagcttacctgcagatgaatagcctccgggcagaagataccgctgtttattattgcacgagacgggtgccaataagactggactattgggggcaagggactcttgtcaccgtcagttcaacgcgtatccagaaccctgatcctgccgtgtaccagctgcgggatagcaagagcagcgacaagagcgtgtgtctgttcaccgacttcgacagccagaccaacgtgtcccagagcaaggactccgacgtgtacatcaccgataagaccgtgctggacatgcggagcatggacttcaagagcaactccgccgtggcctggtccagcaagtccgatttcgcctgcgccaacgccttcaacaacagcattatccccgaggacacattcttcccaagccccgagatggcctgcgacgtgaagctggtggaaaagagcttcgagacagacaccaacctgaacttccagaacctgctcgtgatctggctgagaatcctgctgctgaaagtggccggctttaacctgctgatgaccctgcggctgtggtccagc

SEQ ID NO: 38089 - DNA, 1866 bp, synthetic construct
  source 1..1866: mol_type = other DNA
atggccttaccagtgaccgccttgctcctgccgctggccttgctgctccacgccgccaggccggacatccagttgacccagtcccccagctcactcagcgccagtgtgggggaccgggtgaccattacctgtaaagccagtcagagtgtggactatgagggggatagcttcctgaattggtatcagcagaagcctggcaaagccccaaagctgctgatctacgctgcatctaatctggagtcaggcgtgccttctaggttctccggtagtgggtctgggaccgatttcacattgaccatttcatccctccaacccgaggatttcgctacatattactgtcagcagtccaatgaggaccctctcacctttggccagggcaccaaagttgaaattaagagactcgaggacctgaagcacgtgttcccacctgaggtggccgtgttcgagcctagcgacgccgagatctggcacacccagaaagccaccctcgtgtgcctggctaccggcttctaccccgaccatgtggaactgtcttggtgggtcaacggcaaagaggtgcacagcggcgtgtctaccgacccccagccactgaaagaacagcccgccctgaacgacagccggtactgcctgagcagcagactgagagtgtccgccaccttctggcagaacccccggaaccacttcagatgccaggtgcagttctacggcctgagcgagaacgacgagtggacccaggacagagccaagcccgtgacccagatcgtgtctgccgaagcctggggcagagccgattgcggctttaccagcgagagctaccagcagggcgtgctgagcgccaccatcctgtacgagatcctgctgggcaaggccaccctgtacgccgtgctggtgtctgccctggtgctgatggctatggtcaagcggaaggacagccggggaagggccaagcgatctggatctggagcaacaaacttctcactactcaaacaagcaggtgacgtggaggagaatcccgggcctactagtatggactggatttggcgcatccttttccttgtcggcgctgctaccggcgcgcattccttcgaagaagtccaacttgtggagtctggagggggcctggtgcagcccggcggctctctcagactgtcttgtgcggcaagcggctacaccttcacctcttactggatagaatgggtgaggcaggcacctggaaagggactggagtggattggagagattctgccaggagggggagatacaaattacaatgaaatcttcaaggggcgggccaccttttcagcggataccagcaagaatacagcttacctgcagatgaatagcctccgggcagaagataccgctgtttattattgcacgagacgggtgccaataagactggactattgggggcaagggactcttgtcaccgtcagttcaacgcgtatccagaaccctgatcctgccgtgtaccagctgcgggatagcaagagcagcgacaagagcgtgtgtctgttcaccgacttcgacagccagaccaacgtgtcccagagcaaggactccgacgtgtacatcaccgataagaccgtgctggacatgcggagcatggacttcaagagcaactccgccgtggcctggtccaccaagtccgatttcgcctgcgccaacgccttcaacaacagcattatccccgaggacacattcttcccaagccccgaggtggtgtgcgacgtgaagctggtggaaaagagcttcgagacagacaccaacctgaacttccagaacctggtggtgatcggcgccagaatcctgctgctgaaagtggccggctttaacctgctgatgaccctgcggctgtggtccagc

SEQ ID NO: 38090 - DNA, 1866 bp, synthetic construct
  source 1..1866: mol_type = other DNA
atggccttaccagtgaccgccttgctcctgccgctggccttgctgctccacgccgccaggccggacatccagttgacccagtcccccagctcactcagcgccagtgtgggggaccgggtgaccattacctgtaaagccagtcagagtgtggactatgagggggatagcttcctgaattggtatcagcagaagcctggcaaagccccaaagctgctgatctacgctgcatctaatctggagtcaggcgtgccttctaggttctccggtagtgggtctgggaccgatttcacattgaccatttcatccctccaacccgaggatttcgctacatattactgtcagcagtccaatgaggaccctctcacctttggccagggcaccaaagttgaaattaagagactcgaggacctgaagaacgtgttcccacctgaggtggccgtgttcgagcctagcaaggccgagatcagcagaacccagaaagccaccctcgtgtgcctggctaccggcttctaccctcctcatgtggaactgtcttggtgggtcaacggcaaagaggtgcacgacggcgtgtgtaccgacccccagccactgaaagaacagcccgccctgaacgacagccggtactgcctgagcagcagactgagagtgtccgccaccttctggcagaacccccggaaccacttcagatgccaggtgcagttctacggcctgagcgagaacgacgagtggacccaggacagagccaagcccgtgacccagatcgtgtctgccgaagcctggggcagagccgattgcggctttaccagcgagagctaccagcagggcgtgctgagcgccaccatcctgtacgagatcctgctgggcaaggccaccctgtacgccgtgctggtgtctgccctggtgctgatggctatggtcaagcggaaggacagccggggaagggccaagcgatctggatctggagcaacaaacttctcactactcaaacaagcaggtgacgtggaggagaatcccgggcctactagtatggactggatttggcgcatccttttccttgtcggcgctgctaccggcgcgcattccttcgaagaagtccaacttgtggagtctggagggggcctggtgcagcccggcggctctctcagactgtcttgtgcggcaagcggctacaccttcacctcttactggatagaatgggtgaggcaggcacctggaaagggactggagtggattggagagattctgccaggagggggagatacaaattacaatgaaatcttcaaggggcgggccaccttttcagcggataccagcaagaatacagcttacctgcagatgaatagcctccgggcagaagataccgctgtttattattgcacgagacgggtgccaataagactggactattgggggcaagggactcttgtcaccgtcagttcaacgcgtatccagaaccctgatcctgccgtgtaccagctgcgggatagcaagagcagcgacaagttcgtgtgtctgttcaccgacttcgacagccagatcaacgtgtcccagagcaaggactccgacgtgtacatcaccgataagtgcgtgctggacatgcggagcatggacttcaagagcaactccgccgtggcctggtccaacaagtccgatttcacctgcgccaacgccttcaacaacagcattatccccgaggacacattcttcccaagccccgagagcagctgcgacgtgaagctggtggaaaagagcttcgagacagacaccaacctgaacttccagaacctgagcgtgatcggcttcagaatcctgctgctgaaagtggccggctttaacctgctgatgaccctgcggctgtggtccagc

SEQ ID NO: 38091 - DNA, 2292 bp, synthetic construct
  source 1..2292: mol_type = other DNA
atggccttaccagtgaccgccttgctcctgccgctggccttgctgctccacgccgccaggccggacatccagttgacccagtcccccagctcactcagcgccagtgtgggggaccgggtgaccattacctgtaaagccagtcagagtgtggactatgagggggatagcttcctgaattggtatcagcagaagcctggcaaagccccaaagctgctgatctacgctgcatctaatctggagtcaggcgtgccttctaggttctccggtagtgggtctgggaccgatttcacattgaccatttcatccctccaacccgaggatttcgctacatattactgtcagcagtccaatgaggaccctctcacctttggccagggcaccaaagttgaaattaagagactcgaggacctgaagaacgtgttcccacctgaggtggccgtgttcgagcctagcgaggccgagatcagccacacccagaaagccaccctcgtgtgcctggctaccggcttctaccccgaccatgtggaactgtcttggtgggtcaacggcaaagaggtgcacagcggcgtgtgtaccgacccccagccactgaaagaacagcccgccctgaacgacagccggtactgcctgagcagcagactgagagtgtccgccaccttctggcagaacccccggaaccacttcagatgccaggtgcagttctacggcctgagcgagaacgacgagtggacccaggacagagccaagcccgtgacccagatcgtgtctgccgaagcctggggcagagccgattgcggctttaccagcgagagctaccagcagggcgtgctgagcgccaccatcctgtacgagatcctgctgggcaaggccaccctgtacgccgtgctggtgtctgccctggtgctgatggctatggtcaagcggaaggacagccggggaagggccaagcgatctggatctggagcaacaaacttctcactactcaaacaagcaggtgacgtggaggagaatcccgggcctactagtaccatggactggatttggcgcatccttttccttgtcggcgctgctaccggcgcccattccgggccccaggtgcagctccaagaaagcggacccggactggttaagccctctcagaccctgtctctgacctgcacagttagcggagccagcattaccacaggcgagtattattggaattggtttcggcagccaccaggcaaggggcttgagtggatgggtgctattgctgcctctggcagcaccacctactctcccagctttgagagcagaacctccatcagccgggacacctccaaaaaccagttctctctgaagctgtcctccgtgaccgctgctgacaccgccgtctattattgtggccggtctttcggcgtggcagctgtgaccacaggacagaacagaggccagggaacacttgtgaccgtgtcctctggatccggcggcggaggatctggcggaggcggatctgggggcggaggctctttcgaagaagtccaacttgtggagtctggagggggcctggtgcagcccggcggctctctcagactgtcttgtgcggcaagcggctacaccttcacctcttactggatagaatgggtgaggcaggcacctggaaagggactggagtggattggagagattctgccaggagggggagatacaaattacaatgaaatcttcaaggggcgggccaccttttcagcggataccagcaagaatacagcttacctgcagatgaatagcctccgggcagaagataccgctgtttattattgcacgagacgggtgccaataagactggactattgggggcaagggactcttgtcaccgtcagttcaacgcgtatccagaaccctgatcctgccgtgtaccagctgcgggatagcaagagcagcgacaagagcgtgtgtctgttcaccgacttcgacagccagaccaacgtgtcccagagcaaggactccgacgtgtacatcaccgataagtgcgtgctggacatgcggagcatggacttcaagagcaactccgccgtggcctggtccaacaagtccgatttcgcctgcgccaacgccttcaacaacagcattatccccgaggacacattcttcccaagccccgagagcagctgcgacgtgaagctggtggaaaagagcttcgagacagacaccaacctgaacttccagaacctgagcgtgatcggcttcagaatcctgctgctgaaagtggccggctttaacctgctgatgaccctgcggctgtggtccagc

SEQ ID NO: 38092 - DNA, 2715 bp, synthetic construct
  source 1..2715: mol_type = other DNA
atggccttaccagtgaccgccttgctcctgccgctggccttgctgctccacgccgccaggccgcaggttcagctgcaagagtctggccctggcctggtcaagcctagccaaacactgagcctgacctgtaccgtgtctggcggctctatcaccaccggcgagttctactggaactggttcagacagcctcctggcaaaggactggaatggatgggagccattgccgccagcggcagcacaacatacagccctagcttcgagagccggaccagcatcagcagagacaccagcaagaatcagttcagcctgaagctgagcagcgtgacagccgccgatacagccgtgtattactgcggcagatcctttggagtggccgccgtgacaaccggccagaatagaggacagggcaccctggtcacagtgtctagcggtaccggcggaggcggatctggcggcggaggtagcggtggcggaggatctgaattcgacatccagttgacccagtcccccagctcactcagcgccagtgtgggggaccgggtgaccattacctgtaaagccagtcagagtgtggactatgagggggatagcttcctgaattggtatcagcagaagcctggcaaagccccaaagctgctgatctacgctgcatctaatctggagtcaggcgtgccttctaggttctccggtagtgggtctgggaccgatttcacattgaccatttcatccctccaacccgaggatttcgctacatattactgtcagcagtccaatgaggaccctctcacctttggccagggcaccaaagttgaaattaagagactcgagatccagaaccctgatcctgccgtgtaccagctgcgggatagcaagagcagcgacaagagcgtgtgtctgttcaccgacttcgacagccagaccaacgtgtcccagagcaaggactccgacgtgtacatcaccgataagtgcgtgctggacatgcggagcatggacttcaagagcaactccgccgtggcctggtccaacaagtccgatttcgcctgcgccaacgccttcaacaacagcattatccccgaggacacattcttcccaagcagcgacgtgccctgcgacgtgaagctggtggaaaagagcttcgagacagacaccaacctgaacttccagaacctgagcgtgatcggcttcagaatcctgctgctgaaagtggccggctttaacctgctgatgaccctgcggctgtggtccagccgcgccaagagaagcggatctggcgtgaagcagaccctgaatttcgacctgctgaagctggctggcgacgtggaatccaacccaggccctactagtaccatggactggatttggcgcatccttttccttgtcggcgctgctaccggcgcccattccgggcccgaagtgcaactggttgaatccggtggcggcctggtgcaacccggcggatctctcagacttagctgtgccgcctccggcagaaccttcacaatgggatggtacaggcaggctccagggaaagagagagagttcgtcgccgccatctctctgtctcccacactggcctactacgccgactctgtgaaaggccggttcaccatctccagagataatagcaagaacaccgtggtgctgcaaatgaactctctgagagccgaggatacagccctgtactattgtgccgctgaccggaagtccgtgatgagcatcagacccgattactggggacagggcacactggtcacagtgtctagtggatccggcggcggaggatctggcggaggcggatctgggggcggaggctctttcgaagaagtccaacttgtggagtctggagggggcctggtgcagcccggcggctctctcagactgtcttgtgcggcaagcggctacaccttcacctcttactggatagaatgggtgaggcaggcacctggaaagggactggagtggattggagagattctgccaggagggggagatacaaattacaatgaaatcttcaaggggcgggccaccttttcagcggataccagcaagaatacagcttacctgcagatgaatagcctccgggcagaagataccgctgtttattattgcacgagacgggtgccaataagactggactattgggggcaagggactcttgtcaccgtcagttcaacgcgtgaggacctgaagaacgtgttcccacctgaggtggccgtgttcgagcctagcaaggccgagatcgcccacacccagaaagccaccctcgtgtgcctggctaccggcttctaccccgaccatgtggaactgtcttggtgggtcaacggcaaagaggtgcacagcggcgtgtgtaccgacccccagccactgaaagaacagcccgccctgaacgacagccggtactgcctgagcagcagactgagagtgtccgccaccttctggcagaacccccggaaccacttcagatgccaggtgcagttctacggcctgagcgagaacgacgagtggacccaggacagagccaagcccgtgacccagatcgtgtctgccgaagcctggggcagagccgattgcggcatcaccagcgccagctaccaccagggcgtgctgagcgccaccatcctgtacgagatcctgctgggcaaggccaccctgtacgccgtgctggtgtctgccctggtgctgatggctatggtcaagcggaaggacagccgggga

SEQ ID NO: 38093 - DNA, 2304 bp, synthetic construct
  source 1..2304: mol_type = other DNA
atggccttaccagtgaccgccttgctcctgccgctggccttgctgctccacgccgccaggccgcaggttcagctgcaagagtctggccctggcctggtcaagcctagccaaacactgagcctgacctgtaccgtgtctggcggctctatcaccaccggcgagttctactggaactggttcagacagcctcctggcaaaggactggaatggatgggagccattgccgccagcggcagcacaacatacagccctagcttcgagagccggaccagcatcagcagagacaccagcaagaatcagttcagcctgaagctgagcagcgtgacagccgccgatacagccgtgtattactgcggcagatcctttggagtggccgccgtgacaaccggccagaatagaggacagggcaccctggtcacagtgtctagcggtaccggcggaggcggatctggcggcggaggtagcggtggcggaggatctgaattcgacatccagttgacccagtcccccagctcactcagcgccagtgtgggggaccgggtgaccattacctgtaaagccagtcagagtgtggactatgagggggatagcttcctgaattggtatcagcagaagcctggcaaagccccaaagctgctgatctacgctgcatctaatctggagtcaggcgtgccttctaggttctccggtagtgggtctgggaccgatttcacattgaccatttcatccctccaacccgaggatttcgctacatattactgtcagcagtccaatgaggaccctctcacctttggccagggcaccaaagttgaaattaagagactcgagatccagaaccctgatcctgccgtgtaccagctgcgggatagcaagagcagcgacaagagcgtgtgtctgttcaccgacttcgacagccagaccaacgtgtcccagagcaaggactccgacgtgtacatcaccgataagtgcgtgctggacatgcggagcatggacttcaagagcaactccgccgtggcctggtccaacaagtccgatttcgcctgcgccaacgccttcaacaacagcattatccccgaggacacattcttcccaagcagcgacgtgccctgcgacgtgaagctggtggaaaagagcttcgagacagacaccaacctgaacttccagaacctgagcgtgatcggcttcagaatcctgctgctgaaagtggccggctttaacctgctgatgaccctgcggctgtggtccagccgcgccaagagaagcggatctggcgtgaagcagaccctgaatttcgacctgctgaagctggctggcgacgtggaatccaacccaggccctactagtaccatggactggatttggcgcatccttttccttgtcggcgctgctaccggcgcccattccttcgaagaagtccaacttgtggagtctggagggggcctggtgcagcccggcggctctctcagactgtcttgtgcggcaagcggctacaccttcacctcttactggatagaatgggtgaggcaggcacctggaaagggactggagtggattggagagattctgccaggagggggagatacaaattacaatgaaatcttcaaggggcgggccaccttttcagcggataccagcaagaatacagcttacctgcagatgaatagcctccgggcagaagataccgctgtttattattgcacgagacgggtgccaataagactggactattgggggcaagggactcttgtcaccgtcagttcaacgcgtgaggacctgaagaacgtgttcccacctgaggtggccgtgttcgagcctagcaaggccgagatcgcccacacccagaaagccaccctcgtgtgcctggctaccggcttctaccccgaccatgtggaactgtcttggtgggtcaacggcaaagaggtgcacagcggcgtgtgtaccgacccccagccactgaaagaacagcccgccctgaacgacagccggtactgcctgagcagcagactgagagtgtccgccaccttctggcagaacccccggaaccacttcagatgccaggtgcagttctacggcctgagcgagaacgacgagtggacccaggacagagccaagcccgtgacccagatcgtgtctgccgaagcctggggcagagccgattgcggcatcaccagcgccagctaccaccagggcgtgctgagcgccaccatcctgtacgagatcctgctgggcaaggccaccctgtacgccgtgctggtgtctgccctggtgctgatggctatggtcaagcggaaggacagccgggga

SEQ ID NO: 38094 - DNA, 2703 bp, synthetic construct
  source 1..2703: mol_type = other DNA
atggccttaccagtgaccgccttgctcctgccgctggccttgctgctccacgccgccaggccggaagtgcagctggttgaatctggcggaggactggttcaggctggcggatctctgagactgtcttgtgccgccagcggcagaacctttagcatgggctggtttagacaggcccctggcaaagagagagagttcgtcgccgccatcacatactctggcggcagcccttactacgccgactctgtgaagggcagattcaccatcagccgggacaacgccaagaacaccgtgtacctccagatgaacagcctgaagcctgaggacaccgccgtgtactactgcgccgccaatccaacatacggcagcgactggaacgccgagaattggggccagggaacccaagtgacagtgtctagcggtaccggcggaggcggatctggcggcggaggtagcggtggcggaggatctgaattcgacatccagttgacccagtcccccagctcactcagcgccagtgtgggggaccgggtgaccattacctgtaaagccagtcagagtgtggactatgagggggatagcttcctgaattggtatcagcagaagcctggcaaagccccaaagctgctgatctacgctgcatctaatctggagtcaggcgtgccttctaggttctccggtagtgggtctgggaccgatttcacattgaccatttcatccctccaacccgaggatttcgctacatattactgtcagcagtccaatgaggaccctctcacctttggccagggcaccaaagttgaaattaagagactcgaggacctgaagaacgtgttcccacctgaggtggccgtgttcgagcctagcgaggccgagatcagccacacccagaaagccaccctcgtgtgcctggctaccggcttctaccccgaccatgtggaactgtcttggtgggtcaacggcaaagaggtgcacagcggcgtgtgtaccgacccccagccactgaaagaacagcccgccctgaacgacagccggtactgcctgagcagcagactgagagtgtccgccaccttctggcagaacccccggaaccacttcagatgccaggtgcagttctacggcctgagcgagaacgacgagtggacccaggacagagccaagcccgtgacccagatcgtgtctgccgaagcctggggcagagccgattgcggctttaccagcgagagctaccagcagggcgtgctgagcgccaccatcctgtacgagatcctgctgggcaaggccaccctgtacgccgtgctggtgtctgccctggtgctgatggctatggtcaagcggaaggacagccggggaagggccaagcgatctggatctggagcaacaaacttctcactactcaaacaagcaggtgacgtggaggagaatcccgggcctactagtaccatggactggatttggcgcatccttttccttgtcggcgctgctaccggcgcccattccgggccccaggtgcagctccaagaaagcggacccggactggttaagccctctcagaccctgtctctgacctgcacagttagcggagccagcattaccacaggcgagtattattggaattggtttcggcagccaccaggcaaggggcttgagtggatgggtgctattgctgcctctggcagcaccacctactctcccagctttgagagcagaacctccatcagccgggacacctccaaaaaccagttctctctgaagctgtcctccgtgaccgctgctgacaccgccgtctattattgtggccggtctttcggcgtggcagctgtgaccacaggacagaacagaggccagggaacacttgtgaccgtgtcctctggatccggcggcggaggatctggcggaggcggatctgggggcggaggctctttcgaagaagtccaacttgtggagtctggagggggcctggtgcagcccggcggctctctcagactgtcttgtgcggcaagcggctacaccttcacctcttactggatagaatgggtgaggcaggcacctggaaagggactggagtggattggagagattctgccaggagggggagatacaaattacaatgaaatcttcaaggggcgggccaccttttcagcggataccagcaagaatacagcttacctgcagatgaatagcctccgggcagaagataccgctgtttattattgcacgagacgggtgccaataagactggactattgggggcaagggactcttgtcaccgtcagttcaacgcgtatccagaaccctgatcctgccgtgtaccagctgcgggatagcaagagcagcgacaagagcgtgtgtctgttcaccgacttcgacagccagaccaacgtgtcccagagcaaggactccgacgtgtacatcaccgataagtgcgtgctggacatgcggagcatggacttcaagagcaactccgccgtggcctggtccaacaagtccgatttcgcctgcgccaacgccttcaacaacagcattatccccgaggacacattcttcccaagccccgagagcagctgcgacgtgaagctggtggaaaagagcttcgagacagacaccaacctgaacttccagaacctgagcgtgatcggcttcagaatcctgctgctgaaagtggccggctttaacctgctgatgaccctgcggctgtggtccagc

SEQ ID NO: 38095 - DNA, 2724 bp, synthetic construct
  source 1..2724: mol_type = other DNA
atggccttaccagtgaccgccttgctcctgccgctggccttgctgctccacgccgccaggccggaagtgcagctggttgaatctggcggaggactggttcaggctggcggatctctgagactgtcttgtgccgccagcggcagaacctttagcatgggctggtttagacaggcccctggcaaagagagagagttcgtcgccgccatcacatactctggcggcagcccttactacgccgactctgtgaagggcagattcaccatcagccgggacaacgccaagaacaccgtgtacctccagatgaacagcctgaagcctgaggacaccgccgtgtactactgcgccgccaatccaacatacggcagcgactggaacgccgagaattggggccagggaacccaagtgacagtgtctagcggtaccggcggaggcggatctggcggcggaggtagcggtggcggaggatctgaattcgacatccagttgacccagtcccccagctcactcagcgccagtgtgggggaccgggtgaccattacctgtaaagccagtcagagtgtggactatgagggggatagcttcctgaattggtatcagcagaagcctggcaaagccccaaagctgctgatctacgctgcatctaatctggagtcaggcgtgccttctaggttctccggtagtgggtctgggaccgatttcacattgaccatttcatccctccaacccgaggatttcgctacatattactgtcagcagtccaatgaggaccctctcacctttggccagggcaccaaagttgaaattaagagactcgagatccagaaccctgatcctgccgtgtaccagctgcgggatagcaagagcagcgacaagagcgtgtgtctgttcaccgacttcgacagccagaccaacgtgtcccagagcaaggactccgacgtgtacatcaccgataagtgcgtgctggacatgcggagcatggacttcaagagcaactccgccgtggcctggtccaacaagtccgatttcgcctgcgccaacgccttcaacaacagcattatccccgaggacacattcttcccaagcagcgacgtgccctgcgacgtgaagctggtggaaaagagcttcgagacagacaccaacctgaacttccagaacctgagcgtgatcggcttcagaatcctgctgctgaaagtggccggctttaacctgctgatgaccctgcggctgtggtccagccgcgccaagagaagcggatctggcgtgaagcagaccctgaatttcgacctgctgaagctggctggcgacgtggaatccaacccaggccctactagtaccatggactggatttggcgcatccttttccttgtcggcgctgctaccggcgcccattccgggccccaggtgcagctggttgaatctggcggaggactggttcagcctggcggatctctgagactgtcttgtgccgccagcggcaacatcaacagcagaaactgcatgggctggttcagacaggcccctggcaagggaagagaaggcgtggcagctatcggccaagtgaccggcagaacctactacgtggacagcgtgaagggcagattcaccatcagcctggacaacagcaagaacaccctgtacctccagatgaacagcctgagagccgaggacaccgccgtgtactattgtgctgctgcccctggctgtctgctgtctgcacttagaagcgccgactacagaaactggggccagggcacactggtcaccgtttcttctggatccggcggcggaggatctggcggaggcggatctgggggcggaggctctttcgaagaagtccaacttgtggagtctggagggggcctggtgcagcccggcggctctctcagactgtcttgtgcggcaagcggctacaccttcacctcttactggatagaatgggtgaggcaggcacctggaaagggactggagtggattggagagattctgccaggagggggagatacaaattacaatgaaatcttcaaggggcgggccaccttttcagcggataccagcaagaatacagcttacctgcagatgaatagcctccgggcagaagataccgctgtttattattgcacgagacgggtgccaataagactggactattgggggcaagggactcttgtcaccgtcagttcaacgcgtgaggacctgaagaacgtgttcccacctgaggtggccgtgttcgagcctagcaaggccgagatcgcccacacccagaaagccaccctcgtgtgcctggctaccggcttctaccccgaccatgtggaactgtcttggtgggtcaacggcaaagaggtgcacagcggcgtgtgtaccgacccccagccactgaaagaacagcccgccctgaacgacagccggtactgcctgagcagcagactgagagtgtccgccaccttctggcagaacccccggaaccacttcagatgccaggtgcagttctacggcctgagcgagaacgacgagtggacccaggacagagccaagcccgtgacccagatcgtgtctgccgaagcctggggcagagccgattgcggcatcaccagcgccagctaccaccagggcgtgctgagcgccaccatcctgtacgagatcctgctgggcaaggccaccctgtacgccgtgctggtgtctgccctggtgctgatggctatggtcaagcggaaggacagccgggga

SEQ ID NO: 38096 - DNA, 2712 bp, synthetic construct
  source 1..2712: mol_type = other DNA
atggccttaccagtgaccgccttgctcctgccgctggccttgctgctccacgccgccaggccggaagtgcagctggttgaatctggcggaggactggttcaggctggcggatctctgagactgtcttgtgccgccagcggcagaacctttagcatgggctggtttagacaggcccctggcaaagagagagagttcgtcgccgccatcacatactctggcggcagcccttactacgccgactctgtgaagggcagattcaccatcagccgggacaacgccaagaacaccgtgtacctccagatgaacagcctgaagcctgaggacaccgccgtgtactactgcgccgccaatccaacatacggcagcgactggaacgccgagaattggggccagggaacccaagtgacagtgtctagcggtaccggcggaggcggatctggcggcggaggtagcggtggcggaggatctgaattcgacatccagttgacccagtcccccagctcactcagcgccagtgtgggggaccgggtgaccattacctgtaaagccagtcagagtgtggactatgagggggatagcttcctgaattggtatcagcagaagcctggcaaagccccaaagctgctgatctacgctgcatctaatctggagtcaggcgtgccttctaggttctccggtagtgggtctgggaccgatttcacattgaccatttcatccctccaacccgaggatttcgctacatattactgtcagcagtccaatgaggaccctctcacctttggccagggcaccaaagttgaaattaagagactcgaggacctgaagaacgtgttcccacctgaggtggccgtgttcgagcctagcgaggccgagatcagccacacccagaaagccaccctcgtgtgcctggctaccggcttctaccccgaccatgtggaactgtcttggtgggtcaacggcaaagaggtgcacagcggcgtgtgtaccgacccccagccactgaaagaacagcccgccctgaacgacagccggtactgcctgagcagcagactgagagtgtccgccaccttctggcagaacccccggaaccacttcagatgccaggtgcagttctacggcctgagcgagaacgacgagtggacccaggacagagccaagcccgtgacccagatcgtgtctgccgaagcctggggcagagccgattgcggctttaccagcgagagctaccagcagggcgtgctgagcgccaccatcctgtacgagatcctgctgggcaaggccaccctgtacgccgtgctggtgtctgccctggtgctgatggctatggtcaagcggaaggacagccggggaagggccaagcgatctggatctggagcaacaaacttctcactactcaaacaagcaggtgacgtggaggagaatcccgggcctactagtaccatggactggatttggcgcatccttttccttgtcggcgctgctaccggcgcccattccgggccccaggtgcagctggttgaatctggcggaggactggttcagcctggcggatctctgagactgtcttgtgccgccagcggcaacatcaacagcagaaactgcatgggctggttcagacaggcccctggcaagggaagagaaggcgtggcagctatcggccaagtgaccggcagaacctactacgtggacagcgtgaagggcagattcaccatcagcctggacaacagcaagaacaccctgtacctccagatgaacagcctgagagccgaggacaccgccgtgtactattgtgctgctgcccctggctgtctgctgtctgcacttagaagcgccgactacagaaactggggccagggcacactggtcaccgtttcttctggatccggcggcggaggatctggcggaggcggatctgggggcggaggctctttcgaagaagtccaacttgtggagtctggagggggcctggtgcagcccggcggctctctcagactgtcttgtgcggcaagcggctacaccttcacctcttactggatagaatgggtgaggcaggcacctggaaagggactggagtggattggagagattctgccaggagggggagatacaaattacaatgaaatcttcaaggggcgggccaccttttcagcggataccagcaagaatacagcttacctgcagatgaatagcctccgggcagaagataccgctgtttattattgcacgagacgggtgccaataagactggactattgggggcaagggactcttgtcaccgtcagttcaacgcgtatccagaaccctgatcctgccgtgtaccagctgcgggatagcaagagcagcgacaagagcgtgtgtctgttcaccgacttcgacagccagaccaacgtgtcccagagcaaggactccgacgtgtacatcaccgataagtgcgtgctggacatgcggagcatggacttcaagagcaactccgccgtggcctggtccaacaagtccgatttcgcctgcgccaacgccttcaacaacagcattatccccgaggacacattcttcccaagccccgagagcagctgcgacgtgaagctggtggaaaagagcttcgagacagacaccaacctgaacttccagaacctgagcgtgatcggcttcagaatcctgctgctgaaagtggccggctttaacctgctgatgaccctgcggctgtggtccagc

SEQ ID NO: 38097 - DNA, 2712 bp, synthetic construct
  source 1..2712: mol_type = other DNA
atggccttaccagtgaccgccttgctcctgccgctggccttgctgctccacgccgccaggccggaagtgcaactggttgaatccggtggcggcctggtgcaagcaggcggatctctcagacttagctgtgccgcctccggcagaaccttcacaatgggatggtttaggcaggctccagggaaagagagagagttcgtcgccgccatctctctgtctcccacactggcctactacgccgactctgtgaaaggccggttcaccatctccagagataatgccaagaacaccgtggtgctgcaaatgaactctctgaaacccgaggatacagccctgtactattgtgccgctgaccggaagtccgtgatgagcatcagacccgattactggggacagggcacacaagtcacagtgtcctctggtaccggcggaggcggatctggcggcggaggtagcggtggcggaggatctgaattcgacatccagttgacccagtcccccagctcactcagcgccagtgtgggggaccgggtgaccattacctgtaaagccagtcagagtgtggactatgagggggatagcttcctgaattggtatcagcagaagcctggcaaagccccaaagctgctgatctacgctgcatctaatctggagtcaggcgtgccttctaggttctccggtagtgggtctgggaccgatttcacattgaccatttcatccctccaacccgaggatttcgctacatattactgtcagcagtccaatgaggaccctctcacctttggccagggcaccaaagttgaaattaagagactcgaggacctgaagaacgtgttcccacctgaggtggccgtgttcgagcctagcgaggccgagatcagccacacccagaaagccaccctcgtgtgcctggctaccggcttctaccccgaccatgtggaactgtcttggtgggtcaacggcaaagaggtgcacagcggcgtgtgtaccgacccccagccactgaaagaacagcccgccctgaacgacagccggtactgcctgagcagcagactgagagtgtccgccaccttctggcagaacccccggaaccacttcagatgccaggtgcagttctacggcctgagcgagaacgacgagtggacccaggacagagccaagcccgtgacccagatcgtgtctgccgaagcctggggcagagccgattgcggctttaccagcgagagctaccagcagggcgtgctgagcgccaccatcctgtacgagatcctgctgggcaaggccaccctgtacgccgtgctggtgtctgccctggtgctgatggctatggtcaagcggaaggacagccggggaagggccaagcgatctggatctggagcaacaaacttctcactactcaaacaagcaggtgacgtggaggagaatcccgggcctactagtaccatggactggatttggcgcatccttttccttgtcggcgctgctaccggcgcccattccgggccccaggtgcagctggttgaatctggcggaggactggttcagcctggcggatctctgagactgtcttgtgccgccagcggcaacatcaacagcagaaactgcatgggctggttcagacaggcccctggcaagggaagagaaggcgtggcagctatcggccaagtgaccggcagaacctactacgtggacagcgtgaagggcagattcaccatcagcctggacaacagcaagaacaccctgtacctccagatgaacagcctgagagccgaggacaccgccgtgtactattgtgctgctgcccctggctgtctgctgtctgcacttagaagcgccgactacagaaactggggccagggcacactggtcaccgtttcttctggatccggcggcggaggatctggcggaggcggatctgggggcggaggctctttcgaagaagtccaacttgtggagtctggagggggcctggtgcagcccggcggctctctcagactgtcttgtgcggcaagcggctacaccttcacctcttactggatagaatgggtgaggcaggcacctggaaagggactggagtggattggagagattctgccaggagggggagatacaaattacaatgaaatcttcaaggggcgggccaccttttcagcggataccagcaagaatacagcttacctgcagatgaatagcctccgggcagaagataccgctgtttattattgcacgagacgggtgccaataagactggactattgggggcaagggactcttgtcaccgtcagttcaacgcgtatccagaaccctgatcctgccgtgtaccagctgcgggatagcaagagcagcgacaagagcgtgtgtctgttcaccgacttcgacagccagaccaacgtgtcccagagcaaggactccgacgtgtacatcaccgataagtgcgtgctggacatgcggagcatggacttcaagagcaactccgccgtggcctggtccaacaagtccgatttcgcctgcgccaacgccttcaacaacagcattatccccgaggacacattcttcccaagccccgagagcagctgcgacgtgaagctggtggaaaagagcttcgagacagacaccaacctgaacttccagaacctgagcgtgatcggcttcagaatcctgctgctgaaagtggccggctttaacctgctgatgaccctgcggctgtggtccagc

SEQ ID NO: 38098 - DNA, 2724 bp, synthetic construct
  source 1..2724: mol_type = other DNA
atggccttaccagtgaccgccttgctcctgccgctggccttgctgctccacgccgccaggccgcaggttcagctgcaagagtctggccctggcctggtcaagcctagccaaacactgagcctgacctgtaccgtgtctggcggctctatcaccaccggcgagttctactggaactggttcagacagcctcctggcaaaggactggaatggatgggagccattgccgccagcggcagcacaacatacagccctagcttcgagagccggaccagcatcagcagagacaccagcaagaatcagttcagcctgaagctgagcagcgtgacagccgccgatacagccgtgtattactgcggcagatcctttggagtggccgccgtgacaaccggccagaatagaggacagggcaccctggtcacagtgtctagcggtaccggcggaggcggatctggcggcggaggtagcggtggcggaggatctgaattcgacatccagttgacccagtcccccagctcactcagcgccagtgtgggggaccgggtgaccattacctgtaaagccagtcagagtgtggactatgagggggatagcttcctgaattggtatcagcagaagcctggcaaagccccaaagctgctgatctacgctgcatctaatctggagtcaggcgtgccttctaggttctccggtagtgggtctgggaccgatttcacattgaccatttcatccctccaacccgaggatttcgctacatattactgtcagcagtccaatgaggaccctctcacctttggccagggcaccaaagttgaaattaagagactcgaggacctgaagaacgtgttcccacctgaggtggccgtgttcgagcctagcgaggccgagatcagccacacccagaaagccaccctcgtgtgcctggctaccggcttctaccccgaccatgtggaactgtcttggtgggtcaacggcaaagaggtgcacagcggcgtgtgtaccgacccccagccactgaaagaacagcccgccctgaacgacagccggtactgcctgagcagcagactgagagtgtccgccaccttctggcagaacccccggaaccacttcagatgccaggtgcagttctacggcctgagcgagaacgacgagtggacccaggacagagccaagcccgtgacccagatcgtgtctgccgaagcctggggcagagccgattgcggctttaccagcgagagctaccagcagggcgtgctgagcgccaccatcctgtacgagatcctgctgggcaaggccaccctgtacgccgtgctggtgtctgccctggtgctgatggctatggtcaagcggaaggacagccggggaagggccaagcgatctggatctggagcaacaaacttctcactactcaaacaagcaggtgacgtggaggagaatcccgggcctactagtaccatggactggatttggcgcatccttttccttgtcggcgctgctaccggcgcccattccgggccccaggtgcagctggttgaatctggcggaggactggttcagcctggcggatctctgagactgtcttgtgccgccagcggcaacatcaacagcagaaactgcatgggctggttcagacaggcccctggcaagggaagagaaggcgtggcagctatcggccaagtgaccggcagaacctactacgtggacagcgtgaagggcagattcaccatcagcctggacaacagcaagaacaccctgtacctccagatgaacagcctgagagccgaggacaccgccgtgtactattgtgctgctgcccctggctgtctgctgtctgcacttagaagcgccgactacagaaactggggccagggcacactggtcaccgtttcttctggatccggcggcggaggatctggcggaggcggatctgggggcggaggctctttcgaagaagtccaacttgtggagtctggagggggcctggtgcagcccggcggctctctcagactgtcttgtgcggcaagcggctacaccttcacctcttactggatagaatgggtgaggcaggcacctggaaagggactggagtggattggagagattctgccaggagggggagatacaaattacaatgaaatcttcaaggggcgggccaccttttcagcggataccagcaagaatacagcttacctgcagatgaatagcctccgggcagaagataccgctgtttattattgcacgagacgggtgccaataagactggactattgggggcaagggactcttgtcaccgtcagttcaacgcgtatccagaaccctgatcctgccgtgtaccagctgcgggatagcaagagcagcgacaagagcgtgtgtctgttcaccgacttcgacagccagaccaacgtgtcccagagcaaggactccgacgtgtacatcaccgataagtgcgtgctggacatgcggagcatggacttcaagagcaactccgccgtggcctggtccaacaagtccgatttcgcctgcgccaacgccttcaacaacagcattatccccgaggacacattcttcccaagccccgagagcagctgcgacgtgaagctggtggaaaagagcttcgagacagacaccaacctgaacttccagaacctgagcgtgatcggcttcagaatcctgctgctgaaagtggccggctttaacctgctgatgaccctgcggctgtggtccagc

SEQ ID NO: 38099 - DNA, 1458 bp, synthetic construct
  source 1..1458: mol_type = other DNA
atggccttaccagtgaccgccttgctcctgccgctggccttgctgctccacgccgccaggccggacatcgtgatgacacagagccctgatagcctggccgtgtctctgggagagagagccaccattaactgcaaggccagccagagcgtggactacgacggcgacagcttcctgaactggtatcagcagaagcccggccagcctcctaagctgctgatctacgccgccagcaatctggaaagcggcgtgccaagcagattttccggctctggcagcggcaccgatttcaccctgacaatatccagcctccagcctgaggacgtggccgtgtactactgccagcagagcaacgacgaccctctgacctttggacagggcaccaaggtggaaatcaaaggcggaggcggaagtggaggcggaggatctggcggcggaggctctcaagttcagctggttcagagcggagccgaagtgaagaaacctggggcctctgtgaaggtgtcctgcaaagccagcggctacacctttaccagctactggatcaactgggtccgacaggcccctggacaaggactggaatggatgggacagatccttccaggcggaggggacaccaactacaacggcaagttcaagggcagagtgaccatcaccgccgacaccagcacaagcaccgcctacatggaactgagcagcctgagaagcgaggacaccgccgtgtattattgcaccagacgggtgcccatccggctggattattggggacagggaaccctggtcaccgtgtctagtacgcgtaaaattgaagttatgtatcctcctccttacctagacaatgagaagagcaatggaaccattatccatgtgaaagggaaacacctttgtccaagtcccctatttcccggaccttctaagcccttttgggtgctggtggtggttgggggagtcctggcttgctatagcttgctagtaacagtggcctttattattttctgggtgaggagtaagaggagcaggctcctgcacagtgactacatgaacatgactccacgccgccccggacccacccgcaagcattaccagccctatgccccaccacgcgacttcgcagcctatcgctccagagtgaagttcagcaggagcgcagacgcccccgcgtaccagcagggccagaaccagctctataacgagctcaatctaggacgaagagaggagtacgatgttttggacaagagacgtggccgggaccctgagatggggggaaagccgagaaggaagaaccctcaggaaggcctgtacaatgaactgcagaaagataagatggcggaggcctacagtgagattgggatgaaaggcgagcgccggaggggcaaggggcacgatggcctttaccagggtctcagtacagccaccaaggacacctacgacgcccttcacatgcaggccctgccccctcgc

SEQ ID NO: 38100 - DNA, 1476 bp, synthetic construct
  source 1..1476: mol_type = other DNA
atggccttaccagtgaccgccttgctcctgccgctggccttgctgctccacgccgccaggccggacatcgtgatgacacagagccctgatagcctggccgtgtctctgggagagagagccaccattaactgcaaggccagccagagcgtggactacgacggcgacagcttcctgaactggtatcagcagaagcccggccagcctcctaagctgctgatctacgccgccagcaatctggaaagcggcgtgccaagcagattttccggctctggcagcggcaccgatttcaccctgacaatatccagcctccagcctgaggacgtggccgtgtactactgccagcagagcaacgacgaccctctgacctttggacagggcaccaaggtggaaatcaaaggcggaggcggaagtggaggcggaggatctggcggcggaggctctcaagttcagctggttcagagcggagccgaagtgaagaaacctggggcctctgtgaaggtgtcctgcaaagccagcggctacacctttaccagctactggatcaactgggtccgacaggcccctggacaaggactggaatggatgggacagatccttccaggcggaggggacaccaactacaacggcaagttcaagggcagagtgaccatcaccgccgacaccagcacaagcaccgcctacatggaactgagcagcctgagaagcgaggacaccgccgtgtattattgcaccagacgggtgcccatccggctggattattggggacagggaaccctggtcaccgtgtctagtacgcgtgcgaagcccaccacgacgccagcgccgcgaccaccaacaccggcgcccaccatcgcgtcgcagcccctgtccctgcgcccagaggcgtgccggccagcggcggggggcgcagtgcacacgagggggctggacttcgcctgtgacatctacatctgggcgcccttggccgggacttgtggggtccttctcctgtcactggttatcaccctttactgcaaacggggcagaaagaaactcctgtatatattcaaacaaccatttatgagaccagtacaaactactcaagaggaagatggctgtagctgccgatttccagaagaagaagaaggaggatgtgaactgagagtgaagttcagcaggagcgcagacgcccccgcgtaccagcagggccagaaccagctctataacgagctgaatctaggacgaagagaggagtacgatgttttggacaagagacgtggccgggaccctgagatggggggaaagccgagaaggaagaaccctcaggaaggcctgtacaatgaactgcagaaagataagatggcggaggcctacagtgagattgggatgaaaggcgagcgccggaggggcaaggggcacgatggcctttaccagggtctcagtacagccaccaaggacacctacgacgcccttcacatgcaggccctgccccctcgc

SEQ ID NO: 38101 - DNA, 1476 bp, synthetic construct
  source 1..1476: mol_type = other DNA
atggccttaccagtgaccgccttgctcctgccgctggccttgctgctccacgccgccaggccgcaagttcagctggttcagagcggagccgaagtgaagaaacctggggcctctgtgaaggtgtcctgcaaagccagcggctacacctttaccagctactggatcaactgggtccgacaggcccctggacaaggactggaatggatgggacagatccttccaggcggaggggacaccaactacaacggcaagttcaagggcagagtgaccatcaccgccgacaccagcacaagcaccgcctacatggaactgagcagcctgagaagcgaggacaccgccgtgtattattgcaccagacgggtgcccatccggctggattattggggacagggaaccctggtcaccgtgtctagtggcggaggcggaagtggaggcggaggatctggcggcggaggctctgacatcgtgatgacacagagccctgatagcctggccgtgtctctgggagagagagccaccattaactgcaaggccagccagagcgtggactacgacggcgacagcttcctgaactggtatcagcagaagcccggccagcctcctaagctgctgatctacgccgccagcaatctggaaagcggcgtgccaagcagattttccggctctggcagcggcaccgatttcaccctgacaatatccagcctccagcctgaggacgtggccgtgtactactgccagcagagcaacgacgaccctctgacctttggacagggcaccaaggtggaaatcaaaacgcgtgcgaagcccaccacgacgccagcgccgcgaccaccaacaccggcgcccaccatcgcgtcgcagcccctgtccctgcgcccagaggcgtgccggccagcggcggggggcgcagtgcacacgagggggctggacttcgcctgtgacatctacatctgggcgcccttggccgggacttgtggggtccttctcctgtcactggttatcaccctttactgcaaacggggcagaaagaaactcctgtatatattcaaacaaccatttatgagaccagtacaaactactcaagaggaagatggctgtagctgccgatttccagaagaagaagaaggaggatgtgaactgagagtgaagttcagcaggagcgcagacgcccccgcgtaccagcagggccagaaccagctctataacgagctgaatctaggacgaagagaggagtacgatgttttggacaagagacgtggccgggaccctgagatggggggaaagccgagaaggaagaaccctcaggaaggcctgtacaatgaactgcagaaagataagatggcggaggcctacagtgagattgggatgaaaggcgagcgccggaggggcaaggggcacgatggcctttaccagggtctcagtacagccaccaaggacacctacgacgcccttcacatgcaggccctgccccctcgc

SEQ ID NO: 38102 - DNA, 1875 bp, synthetic construct
  source 1..1875: mol_type = other DNA
atggccttaccagtgaccgccttgctcctgccgctggccttgctgctccacgccgccaggccggacatcgtgatgacacagagccctgatagcctggccgtgtctctgggagagagagccaccattaactgcaaggccagccagagcgtggactacgacggcgacagcttcctgaactggtatcagcagaagcccggccagcctcctaagctgctgatctacgccgccagcaatctggaaagcggcgtgccaagcagattttccggctctggcagcggcaccgatttcaccctgacaatatccagcctccagcctgaggacgtggccgtgtactactgccagcagagcaacgacgaccctctgacctttggacagggcaccaaggtggaaatcaaactcgagatccagaaccctgatcctgccgtgtaccagctgcgggatagcaagagcagcgacaagagcgtgtgtctgttcaccgacttcgacagccagaccaacgtgtcccagagcaaggactccgacgtgtacatcaccgataagtgcgtgctggacatgcggagcatggacttcaagagcaactccgccgtggcctggtccaacaagtccgatttcgcctgcgccaacgccttcaacaacagcattatccccgaggacacattcttcccaagcagcgacgtgccctgcgacgtgaagctggtggaaaagagcttcgagacagacaccaacctgaacttccagaacctgagcgtgatcggcttcagaatcctgctgctgaaagtggccggctttaacctgctgatgaccctgcggctgtggtccagccgcgccaagagaagcggatctggcgtgaagcagaccctgaatttcgacctgctgaagctggctggcgacgtggaatccaacccaggccctactagtatggactggatttggcgcatccttttccttgtcggcgctgctaccggcgcgcattccttcgaacaagttcagctggttcagagcggagccgaagtgaagaaacctggggcctctgtgaaggtgtcctgcaaagccagcggctacacctttaccagctactggatcaactgggtccgacaggcccctggacaaggactggaatggatgggacagatccttccaggcggaggggacaccaactacaacggcaagttcaagggcagagtgaccatcaccgccgacaccagcacaagcaccgcctacatggaactgagcagcctgagaagcgaggacaccgccgtgtattattgcaccagacgggtgcccatccggctggattattggggacagggaaccctggtcaccgtgtctagtacgcgtgaggacctgaagaacgtgttcccacctgaggtggccgtgttcgagcctagcaaggccgagatcgcccacacccagaaagccaccctcgtgtgcctggctaccggcttctaccccgaccatgtggaactgtcttggtgggtcaacggcaaagaggtgcacagcggcgtgtgtaccgacccccagccactgaaagaacagcccgccctgaacgacagccggtactgcctgagcagcagactgagagtgtccgccaccttctggcagaacccccggaaccacttcagatgccaggtgcagttctacggcctgagcgagaacgacgagtggacccaggacagagccaagcccgtgacccagatcgtgtctgccgaagcctggggcagagccgattgcggcatcaccagcgccagctaccaccagggcgtgctgagcgccaccatcctgtacgagatcctgctgggcaaggccaccctgtacgccgtgctggtgtctgccctggtgctgatggctatggtcaagcggaaggacagccgggga

SEQ ID NO: 38103 - DNA, 1863 bp, synthetic construct
  source 1..1863: mol_type = other DNA
atggccttaccagtgaccgccttgctcctgccgctggccttgctgctccacgccgccaggccggacatcgtgatgacacagagccctgatagcctggccgtgtctctgggagagagagccaccattaactgcaaggccagccagagcgtggactacgacggcgacagcttcctgaactggtatcagcagaagcccggccagcctcctaagctgctgatctacgccgccagcaatctggaaagcggcgtgccaagcagattttccggctctggcagcggcaccgatttcaccctgacaatatccagcctccagcctgaggacgtggccgtgtactactgccagcagagcaacgacgaccctctgacctttggacagggcaccaaggtggaaatcaaactcgaggacctgaagaacgtgttcccacctgaggtggccgtgttcgagcctagcaaggccgagatcgcccacacccagaaagccaccctcgtgtgcctggctaccggcttctaccccgaccatgtggaactgtcttggtgggtcaacggcaaagaggtgcacagcggcgtgtgtaccgacccccagccactgaaagaacagcccgccctgaacgacagccggtactgcctgagcagcagactgagagtgtccgccaccttctggcagaacccccggaaccacttcagatgccaggtgcagttctacggcctgagcgagaacgacgagtggacccaggacagagccaagcccgtgacccagatcgtgtctgccgaagcctggggcagagccgattgcggcatcaccagcgccagctaccaccagggcgtgctgagcgccaccatcctgtacgagatcctgctgggcaaggccaccctgtacgccgtgctggtgtctgccctggtgctgatggctatggtcaagcggaaggacagccggggaagggccaagcgatctggatctggagcaacaaacttctcactactcaaacaagcaggtgacgtggaggagaatcccgggcctactagtatggactggatttggcgcatccttttccttgtcggcgctgctaccggcgcgcattccttcgaacaagttcagctggttcagagcggagccgaagtgaagaaacctggggcctctgtgaaggtgtcctgcaaagccagcggctacacctttaccagctactggatcaactgggtccgacaggcccctggacaaggactggaatggatgggacagatccttccaggcggaggggacaccaactacaacggcaagttcaagggcagagtgaccatcaccgccgacaccagcacaagcaccgcctacatggaactgagcagcctgagaagcgaggacaccgccgtgtattattgcaccagacgggtgcccatccggctggattattggggacagggaaccctggtcaccgtgtctagtacgcgtatccagaaccctgatcctgccgtgtaccagctgcgggatagcaagagcagcgacaagagcgtgtgtctgttcaccgacttcgacagccagaccaacgtgtcccagagcaaggactccgacgtgtacatcaccgataagtgcgtgctggacatgcggagcatggacttcaagagcaactccgccgtggcctggtccaacaagtccgatttcgcctgcgccaacgccttcaacaacagcattatccccgaggacacattcttcccaagcagcgacgtgccctgcgacgtgaagctggtggaaaagagcttcgagacagacaccaacctgaacttccagaacctgagcgtgatcggcttcagaatcctgctgctgaaagtggccggctttaacctgctgatgaccctgcggctgtggtccagc

SEQ ID NO: 38104 - DNA, 1863 bp, synthetic construct
  source 1..1863: mol_type = other DNA
atggccttaccagtgaccgccttgctcctgccgctggccttgctgctccacgccgccaggccggacatcgtgatgacacagagccctgatagcctggccgtgtctctgggagagagagccaccattaactgcaaggccagccagagcgtggactacgacggcgacagcttcctgaactggtatcagcagaagcccggccagcctcctaagctgctgatctacgccgccagcaatctggaaagcggcgtgccaagcagattttccggctctggcagcggcaccgatttcaccctgacaatatccagcctccagcctgaggacgtggccgtgtactactgccagcagagcaacgacgaccctctgacctttggacagggcaccaaggtggaaatcaaactcgaggacctgaagaacgtgttcccacctgaggtggccgtgttcgagcctagcgaggccgagatcagccacacccagaaagccaccctcgtgtgcctggctaccggcttctaccccgaccatgtggaactgtcttggtgggtcaacggcaaagaggtgcacagcggcgtgtgtaccgacccccagccactgaaagaacagcccgccctgaacgacagccggtactgcctgagcagcagactgagagtgtccgccaccttctggcagaacccccggaaccacttcagatgccaggtgcagttctacggcctgagcgagaacgacgagtggacccaggacagagccaagcccgtgacccagatcgtgtctgccgaagcctggggcagagccgattgcggctttaccagcgagagctaccagcagggcgtgctgagcgccaccatcctgtacgagatcctgctgggcaaggccaccctgtacgccgtgctggtgtctgccctggtgctgatggctatggtcaagcggaaggacagccggggaagggccaagcgatctggatctggagcaacaaacttctcactactcaaacaagcaggtgacgtggaggagaatcccgggcctactagtatggactggatttggcgcatccttttccttgtcggcgctgctaccggcgcgcattccttcgaacaagttcagctggttcagagcggagccgaagtgaagaaacctggggcctctgtgaaggtgtcctgcaaagccagcggctacacctttaccagctactggatcaactgggtccgacaggcccctggacaaggactggaatggatgggacagatccttccaggcggaggggacaccaactacaacggcaagttcaagggcagagtgaccatcaccgccgacaccagcacaagcaccgcctacatggaactgagcagcctgagaagcgaggacaccgccgtgtattattgcaccagacgggtgcccatccggctggattattggggacagggaaccctggtcaccgtgtctagtacgcgtatccagaaccctgatcctgccgtgtaccagctgcgggatagcaagagcagcgacaagagcgtgtgtctgttcaccgacttcgacagccagaccaacgtgtcccagagcaaggactccgacgtgtacatcaccgataagtgcgtgctggacatgcggagcatggacttcaagagcaactccgccgtggcctggtccaacaagtccgatttcgcctgcgccaacgccttcaacaacagcattatccccgaggacacattcttcccaagccccgagagcagctgcgacgtgaagctggtggaaaagagcttcgagacagacaccaacctgaacttccagaacctgagcgtgatcggcttcagaatcctgctgctgaaagtggccggctttaacctgctgatgaccctgcggctgtggtccagc

SEQ ID NO: 38105 - DNA, 1875 bp, synthetic construct
  source 1..1875: mol_type = other DNA
atggccttaccagtgaccgccttgctcctgccgctggccttgctgctccacgccgccaggccggacatcgtgatgacacagagccctgatagcctggccgtgtctctgggagagagagccaccattaactgcaaggccagccagagcgtggactacgacggcgacagcttcctgaactggtatcagcagaagcccggccagcctcctaagctgctgatctacgccgccagcaatctggaaagcggcgtgccaagcagattttccggctctggcagcggcaccgatttcaccctgacaatatccagcctccagcctgaggacgtggccgtgtactactgccagcagagcaacgacgaccctctgacctttggacagggcaccaaggtggaaatcaaactcgagatccagaaccctgatcctgccgtgtaccagctgcgggatagcaagagcagcgacaagagcgtgtgtctgttcaccgacttcgacagccagaccaacgtgtcccagagcaaggactccgacgtgtacatcaccgataagtgcgtgctggacatgcggagcatggacttcaagagcaactccgccgtggcctggtccaacaagtccgatttcgcctgcgccaacgccttcaacaacagcattatccccgaggacacattcttcccaagccccgagagcagctgcgacgtgaagctggtggaaaagagcttcgagacagacaccaacctgaacttccagaacctgagcgtgatcggcttcagaatcctgctgctgaaagtggccggctttaacctgctgatgaccctgcggctgtggtccagccgcgccaagagaagcggatctggcgtgaagcagaccctgaatttcgacctgctgaagctggctggcgacgtggaatccaacccaggccctactagtatggactggatttggcgcatccttttccttgtcggcgctgctaccggcgcgcattccttcgaacaagttcagctggttcagagcggagccgaagtgaagaaacctggggcctctgtgaaggtgtcctgcaaagccagcggctacacctttaccagctactggatcaactgggtccgacaggcccctggacaaggactggaatggatgggacagatccttccaggcggaggggacaccaactacaacggcaagttcaagggcagagtgaccatcaccgccgacaccagcacaagcaccgcctacatggaactgagcagcctgagaagcgaggacaccgccgtgtattattgcaccagacgggtgcccatccggctggattattggggacagggaaccctggtcaccgtgtctagtacgcgtgaggacctgaagaacgtgttcccacctgaggtggccgtgttcgagcctagcgaggccgagatcagccacacccagaaagccaccctcgtgtgcctggctaccggcttctaccccgaccatgtggaactgtcttggtgggtcaacggcaaagaggtgcacagcggcgtgtgtaccgacccccagccactgaaagaacagcccgccctgaacgacagccggtactgcctgagcagcagactgagagtgtccgccaccttctggcagaacccccggaaccacttcagatgccaggtgcagttctacggcctgagcgagaacgacgagtggacccaggacagagccaagcccgtgacccagatcgtgtctgccgaagcctggggcagagccgattgcggctttaccagcgagagctaccagcagggcgtgctgagcgccaccatcctgtacgagatcctgctgggcaaggccaccctgtacgccgtgctggtgtctgccctggtgctgatggctatggtcaagcggaaggacagccgggga

SEQ ID NO: 38106 - DNA, 1911 bp, synthetic construct
  source 1..1911: mol_type = other DNA
atggccttaccagtgaccgccttgctcctgccgctggccttgctgctccacgccgccaggccgctcgaggaggacctgaagaacgtgttcccacctgaggtggccgtgttcgagcctagcaaggccgagatcgcccacacccagaaagccaccctcgtgtgcctggctaccggcttctaccccgaccatgtggaactgtcttggtgggtcaacggcaaagaggtgcacagcggcgtgtgtaccgacccccagccactgaaagaacagcccgccctgaacgacagccggtactgcctgagcagcagactgagagtgtccgccaccttctggcagaacccccggaaccacttcagatgccaggtgcagttctacggcctgagcgagaacgacgagtggacccaggacagagccaagcccgtgacccagatcgtgtctgccgaagcctggggcagagccgattgcggcatcaccagcgccagctaccaccagggcgtgctgagcgccaccatcctgtacgagatcctgctgggcaaggccaccctgtacgccgtgctggtgtctgccctggtgctgatggctatggtcaagcggaaggacagccggggaagggccaagcgatctggatctggagcaacaaacttctcactactcaaacaagcaggtgacgtggaggagaatcccgggcctactagcatggccttaccagtgaccgccttgctcctgccgctggccttgctgctccacgccgccaggccggacatcgtgatgacacagagccctgatagcctggccgtgtctctgggagagagagccaccattaactgcaaggccagccagagcgtggactacgacggcgacagcttcctgaactggtatcagcagaagcccggccagcctcctaagctgctgatctacgccgccagcaatctggaaagcggcgtgccaagcagattttccggctctggcagcggcaccgatttcaccctgacaatatccagcctccagcctgaggacgtggccgtgtactactgccagcagagcaacgacgaccctctgacctttggacagggcaccaaggtggaaatcaaaggcggaggcggaagtggaggcggaggatctggcggcggaggctctcaagttcagctggttcagagcggagccgaagtgaagaaacctggggcctctgtgaaggtgtcctgcaaagccagcggctacacctttaccagctactggatcaactgggtccgacaggcccctggacaaggactggaatggatgggacagatccttccaggcggaggggacaccaactacaacggcaagttcaagggcagagtgaccatcaccgccgacaccagcacaagcaccgcctacatggaactgagcagcctgagaagcgaggacaccgccgtgtattattgcaccagacgggtgcccatccggctggattattggggacagggaaccctggtcaccgtgtctagtacgcgtatccagaaccctgatcctgccgtgtaccagctgcgggatagcaagagcagcgacaagagcgtgtgtctgttcaccgacttcgacagccagaccaacgtgtcccagagcaaggactccgacgtgtacatcaccgataagtgcgtgctggacatgcggagcatggacttcaagagcaactccgccgtggcctggtccaacaagtccgatttcgcctgcgccaacgccttcaacaacagcattatccccgaggacacattcttcccaagcagcgacgtgccctgcgacgtgaagctggtggaaaagagcttcgagacagacaccaacctgaacttccagaacctgagcgtgatcggcttcagaatcctgctgctgaaagtggccggctttaacctgctgatgaccctgcggctgtggtccagc

SEQ ID NO: 38107 - DNA, 1932 bp, synthetic construct
  source 1..1932: mol_type = other DNA
atggccttaccagtgaccgccttgctcctgccgctggccttgctgctccacgccgccaggccgctcgagggctccggcgatcgccctgatcctgccgtgtaccagctgcgggatagcaagagcagcgacaagagcgtgtgtctgttcaccgacttcgacagccagaccaacgtgtcccagagcaaggactccgacgtgtacatcaccgataagtgcgtgctggacatgcggagcatggacttcaagagcaactccgccgtggcctggtccaacaagtccgatttcgcctgcgccaacgccttcaacaacagcattatccccgaggacacattcttcccaagccccgagagcagctgcgacgtgaagctggtggaaaagagcttcgagacagacaccaacctgaacttccagaacctgagcgtgatcggcttcagaatcctgctgctgaaagtggccggctttaacctgctgatgaccctgcggctgtggtccagctctagtcgcgccaagagaagcggatctggcgtgaagcagaccctgaatttcgacctgctgaagctggctggcgacgtggaatccaacccaggccccactagcatggccttaccagtgaccgccttgctcctgccgctggccttgctgctccacgccgccaggccggacatcgtgatgacacagagccctgatagcctggccgtgtctctgggagagagagccaccattaactgcaaggccagccagagcgtggactacgacggcgacagcttcctgaactggtatcagcagaagcccggccagcctcctaagctgctgatctacgccgccagcaatctggaaagcggcgtgccaagcagattttccggctctggcagcggcaccgatttcaccctgacaatatccagcctccagcctgaggacgtggccgtgtactactgccagcagagcaacgacgaccctctgacctttggacagggcaccaaggtggaaatcaaaggcggaggcggaagtggaggcggaggatctggcggcggaggctctcaagttcagctggttcagagcggagccgaagtgaagaaacctggggcctctgtgaaggtgtcctgcaaagccagcggctacacctttaccagctactggatcaactgggtccgacaggcccctggacaaggactggaatggatgggacagatccttccaggcggaggggacaccaactacaacggcaagttcaagggcagagtgaccatcaccgccgacaccagcacaagcaccgcctacatggaactgagcagcctgagaagcgaggacaccgccgtgtattattgcaccagacgggtgcccatccggctggattattggggacagggaaccctggtcaccgtgtctagtacgcgtgaggacctgaagaacgtgttcccacctgaggtggccgtgttcgagcctagcgaggccgagatcagccacacccagaaagccaccctcgtgtgcctggctaccggcttctaccccgaccatgtggaactgtcttggtgggtcaacggcaaagaggtgcacagcggcgtgtgtaccgacccccagccactgaaagaacagcccgccctgaacgacagccggtactgcctgagcagcagactgagagtgtccgccaccttctggcagaacccccggaaccacttcagatgccaggtgcagttctacggcctgagcgagaacgacgagtggacccaggacagagccaagcccgtgacccagatcgtgtctgccgaagcctggggcagagccgattgcggctttaccagcgagagctaccagcagggcgtgctgagcgccaccatcctgtacgagatcctgctgggcaaggccaccctgtacgccgtgctggtgtctgccctggtgctgatggctatggtcaagcggaaggacagccgggga

SEQ ID NO: 38108 - DNA, 1863 bp, synthetic construct
  source 1..1863: mol_type = other DNA
atggccttaccagtgaccgccttgctcctgccgctggccttgctgctccacgccgccaggccggacatcgtgatgacacagagccctgatagcctggccgtgtctctgggagagagagccaccattaactgcaaggccagccagagcgtggactacgacggcgacagcttcctgaactggtatcagcagaagcccggccagcctcctaagctgctgatctacgccgccagcaatctggaaagcggcgtgccaagcagattttccggctctggcagcggcaccgatttcaccctgacaatatccagcctccagcctgaggacgtggccgtgtactactgccagcagagcaacgacgaccctctgacctttggacagggcaccaaggtggaaatcaaactcgaggacctgaagaacgtgttcccacctgaggtggccgtgttcgagcctagcgaggccgagatcagccacacccagaaagccaccctcgtgtgcctggctaccggcttctaccccgaccatgtggaactgtcttggtgggtcaacggcaaagaggtgcacagcggcgtgtctaccgacccccagccactgaaagaacagcccgccctgaacgacagccggtactgcctgagcagcagactgagagtgtccgccaccttctggcagaacccccggaaccacttcagatgccaggtgcagttctacggcctgagcgagaacgacgagtggacccaggacagagccaagcccgtgacccagatcgtgtctgccgaagcctggggcagagccgattgcggctttaccagcgagagctaccagcagggcgtgctgagcgccaccatcctgtacgagatcctgctgggcaaggccaccctgtacgccgtgctggtgtctgccctggtgctgatggctatggtcaagcggaaggacagccggggaagggccaagcgatctggatctggagcaacaaacttctcactactcaaacaagcaggtgacgtggaggagaatcccgggcctactagtatggactggatttggcgcatccttttccttgtcggcgctgctaccggcgcgcattccttcgaacaagttcagctggttcagagcggagccgaagtgaagaaacctggggcctctgtgaaggtgtcctgcaaagccagcggctacacctttaccagctactggatcaactgggtccgacaggcccctggacaaggactggaatggatgggacagatccttccaggcggaggggacaccaactacaacggcaagttcaagggcagagtgaccatcaccgccgacaccagcacaagcaccgcctacatggaactgagcagcctgagaagcgaggacaccgccgtgtattattgcaccagacgggtgcccatccggctggattattggggacagggaaccctggtcaccgtgtctagtacgcgtatccagaaccctgatcctgccgtgtaccagctgcgggatagcaagagcagcgacaagagcgtgtgtctgttcaccgacttcgacagccagaccaacgtgtcccagagcaaggactccgacgtgtacatcaccgataagaccgtgctggacatgcggagcatggacttcaagagcaactccgccgtggcctggtccaacaagtccgatttcgcctgcgccaacgccttcaacaacagcattatccccgaggacacattcttcccaagccccgagagcagctgcgacgtgaagctggtggaaaagagcttcgagacagacaccaacctgaacttccagaacctgagcgtgatcggcttcagaatcctgctgctgaaagtggccggctttaacctgctgatgaccctgcggctgtggtccagc

SEQ ID NO: 38109 - DNA, 1887 bp, synthetic construct
  source 1..1887: mol_type = other DNA
atggccttaccagtgaccgccttgctcctgccgctggccttgctgctccacgccgccaggccggacatcgtgatgacacagagccctgatagcctggccgtgtctctgggagagagagccaccattaactgcaaggccagccagagcgtggactacgacggcgacagcttcctgaactggtatcagcagaagcccggccagcctcctaagctgctgatctacgccgccagcaatctggaaagcggcgtgccaagcagattttccggctctggcagcggcaccgatttcaccctgacaatatccagcctccagcctgaggacgtggccgtgtactactgccagcagagcaacgacgaccctctgacctttggacagggcaccaaggtggaaatcaaactcgaggacaagcagctggacgccgacgtgtcccccaagcctaccatcttcctgccctctatcgccgagacaaagctccagaaggccggcacctacctgtgcctgctggaaaagttcttcccagatgtgattaagatccactggcaggaaaagaagtccaacaccatcctgggcagccaggaaggcaacaccatgaagaccaacgacacctacatgaagttcagctggctgaccgtgcccgagaagtccctggacaaagaacacagatgcatcgtgcggcacgaaaacaacaagaacggcgtggaccaggaaatcatcttcccacccatcaagaccgatgtgattacaatggaccccaaggacaactgctccaaggacgccaacgataccctgctgctccagctgaccaacaccagcgcctactacatgtacttgttgctgctgctgaagtccgtggtgtacttcgccatcatcacatgctgcctgctgcggagaaccgccttctgctgcaacggcgagaagtctagggccaagcgatctggatctggagcaacaaacttctcactactcaaacaagcaggtgacgtggaggagaatcccgggcctactagtatggactggatttggcgcatccttttccttgtcggcgctgctaccggcgcgcattccttcgaacaagttcagctggttcagagcggagccgaagtgaagaaacctggggcctctgtgaaggtgtcctgcaaagccagcggctacacctttaccagctactggatcaactgggtccgacaggcccctggacaaggactggaatggatgggacagatccttccaggcggaggggacaccaactacaacggcaagttcaagggcagagtgaccatcaccgccgacaccagcacaagcaccgcctacatggaactgagcagcctgagaagcgaggacaccgccgtgtattattgcaccagacgggtgcccatccggctggattattggggacagggaaccctggtcaccgtgtctagtacgcgtagccagcctcacaccaagcccagcgtgttcgtgatgaagaacggcaccaacgtggcctgcctcgtgaaagagttctaccccaaggacatcaggatcaacctggtgtccagcaagaagatcaccgagttcgaccccgccatcgtgatctcccccagcggcaagtacaacgccgtgaagctggggaagtacgaggacagcaacagcgtgacctgctccgtgcagcacgacaacaagaccgtgcacagcaccgactttgaagtgaaaaccgactccaccgaccacgtgaagcccaaagagacagagaacaccaagcagcccagcaagagctgccacaagcccaaggccatcgtgcacaccgagaaagtgaacatgatgagcctgaccgtgctgggcctgcggatgctgttcgccaaaaccgtggccgtgaacttcctgctgaccgccaagctgttcttcctc

SEQ ID NO: 38110 - DNA, 1887 bp, synthetic construct
  source 1..1887: mol_type = other DNA
atggccttaccagtgaccgccttgctcctgccgctggccttgctgctccacgccgccaggccggacatcgtgatgacacagagccctgatagcctggccgtgtctctgggagagagagccaccattaactgcaaggccagccagagcgtggactacgacggcgacagcttcctgaactggtatcagcagaagcccggccagcctcctaagctgctgatctacgccgccagcaatctggaaagcggcgtgccaagcagattttccggctctggcagcggcaccgatttcaccctgacaatatccagcctccagcctgaggacgtggccgtgtactactgccagcagagcaacgacgaccctctgacctttggacagggcaccaaggtggaaatcaaactcgagagccagcctcacaccaagcccagcgtgttcgtgatgaagaacggcaccaacgtggcctgcctcgtgaaagagttctaccccaaggacatcaggatcaacctggtgtccagcaagaagatcaccgagttcgaccccgccatcgtgatctcccccagcggcaagtacaacgccgtgaagctggggaagtacgaggacagcaacagcgtgacctgctccgtgcagcacgacaacaagaccgtgcacagcaccgactttgaagtgaaaaccgactccaccgaccacgtgaagcccaaagagacagagaacaccaagcagcccagcaagagctgccacaagcccaaggccatcgtgcacaccgagaaagtgaacatgatgagcctgaccgtgctgggcctgcggatgctgttcgccaaaaccgtggccgtgaacttcctgctgaccgccaagctgttcttcctcagggccaagcgatctggatctggagcaacaaacttctcactactcaaacaagcaggtgacgtggaggagaatcccgggcctactagtatggactggatttggcgcatccttttccttgtcggcgctgctaccggcgcgcattccttcgaacaagttcagctggttcagagcggagccgaagtgaagaaacctggggcctctgtgaaggtgtcctgcaaagccagcggctacacctttaccagctactggatcaactgggtccgacaggcccctggacaaggactggaatggatgggacagatccttccaggcggaggggacaccaactacaacggcaagttcaagggcagagtgaccatcaccgccgacaccagcacaagcaccgcctacatggaactgagcagcctgagaagcgaggacaccgccgtgtattattgcaccagacgggtgcccatccggctggattattggggacagggaaccctggtcaccgtgtctagtacgcgtgacaagcagctggacgccgacgtgtcccccaagcctaccatcttcctgccctctatcgccgagacaaagctccagaaggccggcacctacctgtgcctgctggaaaagttcttcccagatgtgattaagatccactggcaggaaaagaagtccaacaccatcctgggcagccaggaaggcaacaccatgaagaccaacgacacctacatgaagttcagctggctgaccgtgcccgagaagtccctggacaaagaacacagatgcatcgtgcggcacgaaaacaacaagaacggcgtggaccaggaaatcatcttcccacccatcaagaccgatgtgattacaatggaccccaaggacaactgctccaaggacgccaacgataccctgctgctccagctgaccaacaccagcgcctactacatgtacttgttgctgctgctgaagtccgtggtgtacttcgccatcatcacatgctgcctgctgcggagaaccgccttctgctgcaacggcgagaagtct

SEQ ID NO: 38111 - DNA, 1932 bp, synthetic construct
  source 1..1932: mol_type = other DNA
atggccttaccagtgaccgccttgctcctgccgctggccttgctgctccacgccgccaggccgctcgaggacaagcagctggacgccgacgtgtcccccaagcctaccatcttcctgccctctatcgccgagacaaagctccagaaggccggcacctacctgtgcctgctggaaaagttcttcccagatgtgattaagatccactggcaggaaaagaagtccaacaccatcctgggcagccaggaaggcaacaccatgaagaccaacgacacctacatgaagttcagctggctgaccgtgcccgagaagtccctggacaaagaacacagatgcatcgtgcggcacgaaaacaacaagaacggcgtggaccaggaaatcatcttcccacccatcaagaccgatgtgattacaatggaccccaaggacaactgctccaaggacgccaacgataccctgctgctccagctgaccaacaccagcgcctactacatgtacttgttgctgctgctgaagtccgtggtgtacttcgccatcatcacatgctgcctgctgcggagaaccgccttctgctgcaacggcgagaagtctagggccaagcgatctggatctggagcaacaaacttctcactactcaaacaagcaggtgacgtggaggagaatcccgggcctactagcatggccttaccagtgaccgccttgctcctgccgctggccttgctgctccacgccgccaggccggacatcgtgatgacacagagccctgatagcctggccgtgtctctgggagagagagccaccattaactgcaaggccagccagagcgtggactacgacggcgacagcttcctgaactggtatcagcagaagcccggccagcctcctaagctgctgatctacgccgccagcaatctggaaagcggcgtgccaagcagattttccggctctggcagcggcaccgatttcaccctgacaatatccagcctccagcctgaggacgtggccgtgtactactgccagcagagcaacgacgaccctctgacctttggacagggcaccaaggtggaaatcaaaggcggaggcggaagtggaggcggaggatctggcggcggaggctctcaagttcagctggttcagagcggagccgaagtgaagaaacctggggcctctgtgaaggtgtcctgcaaagccagcggctacacctttaccagctactggatcaactgggtccgacaggcccctggacaaggactggaatggatgggacagatccttccaggcggaggggacaccaactacaacggcaagttcaagggcagagtgaccatcaccgccgacaccagcacaagcaccgcctacatggaactgagcagcctgagaagcgaggacaccgccgtgtattattgcaccagacgggtgcccatccggctggattattggggacagggaaccctggtcaccgtgtctagtacgcgtagccagcctcacaccaagcccagcgtgttcgtgatgaagaacggcaccaacgtggcctgcctcgtgaaagagttctaccccaaggacatcaggatcaacctggtgtccagcaagaagatcaccgagttcgaccccgccatcgtgatctcccccagcggcaagtacaacgccgtgaagctggggaagtacgaggacagcaacagcgtgacctgctccgtgcagcacgacaacaagaccgtgcacagcaccgactttgaagtgaaaaccgactccaccgaccacgtgaagcccaaagagacagagaacaccaagcagcccagcaagagctgccacaagcccaaggccatcgtgcacaccgagaaagtgaacatgatgagcctgaccgtgctgggcctgcggatgctgttcgccaaaaccgtggccgtgaacttcctgctgaccgccaagctgttcttcctc

SEQ ID NO: 38112 - DNA, 2394 bp, synthetic construct
  source 1..2394: mol_type = other DNA
atggccttaccagtgaccgccttgctcctgccgctggccttgctgctccacgccgccaggccggacatcgtgatgacacagagccctgatagcctggccgtgtctctgggagagagagccaccattaactgcaaggccagccagagcgtggactacgacggcgacagcttcctgaactggtatcagcagaagcccggccagcctcctaagctgctgatctacgccgccagcaatctggaaagcggcgtgccaagcagattttccggctctggcagcggcaccgatttcaccctgacaatatccagcctccagcctgaggacgtggccgtgtactactgccagcagagcaacgacgaccctctgacctttggacagggcaccaaggtggaaatcaaaggacagcctaaggccaatcctaccgtgacactgttccctccaagcagcgaagaactccaggccaacaaggccacacttgtgtgcctgatctccgacttctaccctggggctgtgacagtggcttggaaggccgatggatctcctgtgaaagccggcgtggaaaccaccaagccatccaagcagagcaacaacaaatacgccgccagctcctacctgagcctgacacctgagcagtggaagtcccacagatcctacagctgccaagtgacccacgaaggcagcaccgtggaaaagacagtggcccctacagagtgcagcggatcccagagcttcggcctgctggaccccaagctgtgctacctgctggatggcatcctgttcatctacggcgtgatcctgaccgccctgttcctgagagtgaagttcagcagaagcgccgacgcccctgcctaccagcagggacagaaccaactgtacaacgagctgaacctgggcagacgggaagagtacgacgtgctggacaagcggagaggcagggaccctgagatgggcggaaagccccagcggagaaagaacccccaggaaggactgtataacgaactccagaaagacaagatggccgaagcctacagcgagatcggcatgaagggcgagcggagaagaggcaagggccacgatggcctgtaccagggcctgagcaccgccaccaaggacacctatgacgccctgcacatgcaggccctgcctccaagaagggccaagcgatctggatctggagcaacaaacttctcactactcaaacaagcaggtgacgtggaggagaatcccgggcctactagtatggactggatttggcgcatccttttccttgtcggcgctgctaccggcgcgcattccttcgaacaagttcagctggttcagagcggagccgaagtgaagaaacctggggcctctgtgaaggtgtcctgcaaagccagcggctacacctttaccagctactggatcaactgggtccgacaggcccctggacaaggactggaatggatgggacagatccttccaggcggaggggacaccaactacaacggcaagttcaagggcagagtgaccatcaccgccgacaccagcacaagcaccgcctacatggaactgagcagcctgagaagcgaggacaccgccgtgtattattgcaccagacgggtgcccatccggctggattattggggacagggaaccctggtcaccgtgtctagtgcctctacaaagggaccctccgtgtttcctctggctcccagcagcaagtctacaagcggaggaacagccgctctgggctgcctggtcaaggattactttcccgagcctgtgaccgtgtcctggaatagcggagcactgacaagcggcgtgcacacctttccagccgtgctgcaaagcagcggcctgtactctctgagcagcgtggtcacagtgcctagctctagcctgggcacccagacctacatctgcaatgtgaaccacaagcctagcaacaccaaggtggacaagagagtggaacccaagagctgtggtacccagagttttgggttgttggaccctaaattgtgctatctgttggacggaatcctgttcatttacggagtgatcctgaccgcattgttcctgcgggttaagttttccagatccgcagacgcacccgcttaccaacaagggcagaaccaactctacaatgaacttaatttggggcggagggaagagtacgacgttctggacaaaaggaggggacgagatcccgagatgggcggaaagcctcagcgaaggaagaatccgcaagaggggctttataacgaactccagaaagataaaatggcagaagcctatagtgagattgggatgaagggagaaaggaggaggggtaaaggtcacgatgggttgtaccaaggattgagcacagccactaaagatacctatgatgcgctccacatgcaggccctgccgccaaga

SEQ ID NO: 38113 - DNA, 2451 bp, synthetic construct
  source 1..2451: mol_type = other DNA
atggccttaccagtgaccgccttgctcctgccgctggccttgctgctccacgccgccaggccggacatcgtgatgacacagagccctgatagcctggccgtgtctctgggagagagagccaccattaactgcaaggccagccagagcgtggactacgacggcgacagcttcctgaactggtatcagcagaagcccggccagcctcctaagctgctgatctacgccgccagcaatctggaaagcggcgtgccaagcagattttccggctctggcagcggcaccgatttcaccctgacaatatccagcctccagcctgaggacgtggccgtgtactactgccagcagagcaacgacgaccctctgacctttggacagggcaccaaggtggaaatcaaactcgaggacctgaagaacgtgttcccacctgaggtggccgtgttcgagcctagcgaggccgagatcagccacacccagaaagccaccctcgtgtgcctggctaccggcttctaccccgaccatgtggaactgtcttggtgggtcaacggcaaagaggtgcacagcggcgtgtctaccgacccccagccactgaaagaacagcccgccctgaacgacagccggtactgcctgagcagcagactgagagtgtccgccaccttctggcagaacccccggaaccacttcagatgccaggtgcagttctacggcctgagcgagaacgacgagtggacccaggacagagccaagcccgtgacccagatcgtgtctgccgaagcctggggcagagccgattgcggatcccagagcttcggcctgctggaccccaagctgtgctacctgctggatggcatcctgttcatctacggcgtgatcctgaccgccctgttcctgagagtgaagttcagcagaagcgccgacgcccctgcctaccagcagggacagaaccaactgtacaacgagctgaacctgggcagacgggaagagtacgacgtgctggacaagcggagaggcagggaccctgagatgggcggaaagccccagcggagaaagaacccccaggaaggactgtataacgaactccagaaagacaagatggccgaagcctacagcgagatcggcatgaagggcgagcggagaagaggcaagggccacgatggcctgtaccagggcctgagcaccgccaccaaggacacctatgacgccctgcacatgcaggccctgcctccaagaagggccaagcgatctggatctggagcaacaaacttctcactactcaaacaagcaggtgacgtggaggagaatcccgggcctactagtatggactggatttggcgcatccttttccttgtcggcgctgctaccggcgcgcattccttcgaacaagttcagctggttcagagcggagccgaagtgaagaaacctggggcctctgtgaaggtgtcctgcaaagccagcggctacacctttaccagctactggatcaactgggtccgacaggcccctggacaaggactggaatggatgggacagatccttccaggcggaggggacaccaactacaacggcaagttcaagggcagagtgaccatcaccgccgacaccagcacaagcaccgcctacatggaactgagcagcctgagaagcgaggacaccgccgtgtattattgcaccagacgggtgcccatccggctggattattggggacagggaaccctggtcaccgtgtctagtacgcgtatccagaaccctgatcctgccgtgtaccagctgcgggatagcaagagcagcgacaagagcgtgtgtctgttcaccgacttcgacagccagaccaacgtgtcccagagcaaggactccgacgtgtacatcaccgataagaccgtgctggacatgcggagcatggacttcaagagcaactccgccgtggcctggtccaacaagtccgatttcgcctgcgccaacgccttcaacaacagcattatccccgaggacacattcttcccaagccccgagagcagctgcggtacccagagttttgggttgttggaccctaaattgtgctatctgttggacggaatcctgttcatttacggagtgatcctgaccgcattgttcctgcgggttaagttttccagatccgcagacgcacccgcttaccaacaagggcagaaccaactctacaatgaacttaatttggggcggagggaagagtacgacgttctggacaaaaggaggggacgagatcccgagatgggcggaaagcctcagcgaaggaagaatccgcaagaggggctttataacgaactccagaaagataaaatggcagaagcctatagtgagattgggatgaagggagaaaggaggaggggtaaaggtcacgatgggttgtaccaaggattgagcacagccactaaagatacctatgatgcgctccacatgcaggccctgccgccaaga

SEQ ID NO: 38114 - DNA, 2577 bp, synthetic construct
  source 1..2577: mol_type = other DNA
atggccttaccagtgaccgccttgctcctgccgctggccttgctgctccacgccgccaggccggacatcgtgatgacacagagccctgatagcctggccgtgtctctgggagagagagccaccattaactgcaaggccagccagagcgtggactacgacggcgacagcttcctgaactggtatcagcagaagcccggccagcctcctaagctgctgatctacgccgccagcaatctggaaagcggcgtgccaagcagattttccggctctggcagcggcaccgatttcaccctgacaatatccagcctccagcctgaggacgtggccgtgtactactgccagcagagcaacgacgaccctctgacctttggacagggcaccaaggtggaaatcaaactcgaggaggacctgaagaacgtgttcccacctgaggtggccgtgttcgagcctagcgaggccgagatcagccacacccagaaagccaccctcgtgtgcctggctaccggcttctaccccgaccatgtggaactgtcttggtgggtcaacggcaaagaggtgcacagcggcgtgtctaccgacccccagccactgaaagaacagcccgccctgaacgacagccggtactgcctgagcagcagactgagagtgtccgccaccttctggcagaacccccggaaccacttcagatgccaggtgcagttctacggcctgagcgagaacgacgagtggacccaggacagagccaagcccgtgacccagatcgtgtctgccgaagcctggggcagagccgattgcggatcccagagcttcggcctgctggaccccaagctgtgctacctgctggatggcatcctgttcatctacggcgtgatcctgaccgccctgttcctgagagtgaagttcagcagaagcgccgacgcccctgcctaccagcagggacagaaccaactgtacaacgagctgaacctgggcagacgggaagagtacgacgtgctggacaagcggagaggcagggaccctgagatgggcggaaagccccagcggagaaagaacccccaggaaggactgtataacgaactccagaaagacaagatggccgaagcctacagcgagatcggcatgaagggcgagcggagaagaggcaagggccacgatggcctgtaccagggcctgagcaccgccaccaaggacacctatgacgccctgcacatgcaggccctgcctccaagaagggccaagcgatctggatctggagcaacaaacttctcactactcaaacaagcaggtgacgtggaggagaatcccgggcctactagtatggactggatttggcgcatccttttccttgtcggcgctgctaccggcgcgcattccttcgaacaagttcagctggttcagagcggagccgaagtgaagaaacctggggcctctgtgaaggtgtcctgcaaagccagcggctacacctttaccagctactggatcaactgggtccgacaggcccctggacaaggactggaatggatgggacagatccttccaggcggaggggacaccaactacaacggcaagttcaagggcagagtgaccatcaccgccgacaccagcacaagcaccgcctacatggaactgagcagcctgagaagcgaggacaccgccgtgtattattgcaccagacgggtgcccatccggctggattattggggacagggaaccctggtcaccgtgtctagtacgcgtatccagaaccctgatcctgccgtgtaccagctgcgggatagcaagagcagcgacaagagcgtgtgtctgttcaccgacttcgacagccagaccaacgtgtcccagagcaaggactccgacgtgtacatcaccgataagaccgtgctggacatgcggagcatggacttcaagagcaactccgccgtggcctggtccaacaagtccgatttcgcctgcgccaacgccttcaacaacagcattatccccgaggacacattcttcccaagccccgagagcagctgcggtacccagagttttgggttgttggaccctaaattgtgctatctgttggacggaatcctgttcatttacggagtgatcctgaccgcattgttcctgaggagcaagcggtcacggctgctccacagcgattacatgaatatgacaccacgaagaccgggtcctactcgcaaacactaccaaccctacgcacctccccgcgactttgcagcgtaccgatctcgggttaagttttccagatccgcagacgcacccgcttaccaacaagggcagaaccaactctacaatgaacttaatttggggcggagggaagagtacgacgttctggacaaaaggaggggacgagatcccgagatgggcggaaagcctcagcgaaggaagaatccgcaagaggggctttataacgaactccagaaagataaaatggcagaagcctatagtgagattgggatgaagggagaaaggaggaggggtaaaggtcacgatgggttgtaccaaggattgagcacagccactaaagatacctatgatgcgctccacatgcaggccctgccgccaaga

SEQ ID NO: 38115 - DNA, 2706 bp, synthetic construct
  source 1..2706: mol_type = other DNA
atggccttaccagtgaccgccttgctcctgccgctggccttgctgctccacgccgccaggccggacatcgtgatgacacagagccctgatagcctggccgtgtctctgggagagagagccaccattaactgcaaggccagccagagcgtggactacgacggcgacagcttcctgaactggtatcagcagaagcccggccagcctcctaagctgctgatctacgccgccagcaatctggaaagcggcgtgccaagcagattttccggctctggcagcggcaccgatttcaccctgacaatatccagcctccagcctgaggacgtggccgtgtactactgccagcagagcaacgacgaccctctgacctttggacagggcaccaaggtggaaatcaaactcgaggaggacctgaagaacgtgttcccacctgaggtggccgtgttcgagcctagcgaggccgagatcagccacacccagaaagccaccctcgtgtgcctggctaccggcttctaccccgaccatgtggaactgtcttggtgggtcaacggcaaagaggtgcacagcggcgtgtctaccgacccccagccactgaaagaacagcccgccctgaacgacagccggtactgcctgagcagcagactgagagtgtccgccaccttctggcagaacccccggaaccacttcagatgccaggtgcagttctacggcctgagcgagaacgacgagtggacccaggacagagccaagcccgtgacccagatcgtgtctgccgaagcctggggcagagccgattgcggatcccagagcttcggcctgctggaccccaagctgtgctacctgctggatggcatcctgttcatctacggcgtgatcctgaccgccctgttcctgaaacggggcagaaagaaactcctgtatatattcaaacaaccatttatgagaccagtacaaactactcaagaggaagatggctgtagctgccgatttccagaagaagaagaaggaggatgtgaactgagagtgaagttcagcagaagcgccgacgcccctgcctaccagcagggacagaaccaactgtacaacgagctgaacctgggcagacgggaagagtacgacgtgctggacaagcggagaggcagggaccctgagatgggcggaaagccccagcggagaaagaacccccaggaaggactgtataacgaactccagaaagacaagatggccgaagcctacagcgagatcggcatgaagggcgagcggagaagaggcaagggccacgatggcctgtaccagggcctgagcaccgccaccaaggacacctatgacgccctgcacatgcaggccctgcctccaagaagggccaagcgatctggatctggagcaacaaacttctcactactcaaacaagcaggtgacgtggaggagaatcccgggcctactagtatggactggatttggcgcatccttttccttgtcggcgctgctaccggcgcgcattccttcgaacaagttcagctggttcagagcggagccgaagtgaagaaacctggggcctctgtgaaggtgtcctgcaaagccagcggctacacctttaccagctactggatcaactgggtccgacaggcccctggacaaggactggaatggatgggacagatccttccaggcggaggggacaccaactacaacggcaagttcaagggcagagtgaccatcaccgccgacaccagcacaagcaccgcctacatggaactgagcagcctgagaagcgaggacaccgccgtgtattattgcaccagacgggtgcccatccggctggattattggggacagggaaccctggtcaccgtgtctagtacgcgtatccagaaccctgatcctgccgtgtaccagctgcgggatagcaagagcagcgacaagagcgtgtgtctgttcaccgacttcgacagccagaccaacgtgtcccagagcaaggactccgacgtgtacatcaccgataagaccgtgctggacatgcggagcatggacttcaagagcaactccgccgtggcctggtccaacaagtccgatttcgcctgcgccaacgccttcaacaacagcattatccccgaggacacattcttcccaagccccgagagcagctgcggtacccagagttttgggttgttggaccctaaattgtgctatctgttggacggaatcctgttcatttacggagtgatcctgaccgcattgttcctgaagagaggccggaagaagctgctgtacatcttcaagcagcctttcatgcggcccgtgcagaccacccaggaagaggacggctgctcctgccggttccccgaggaagaagaaggcggctgcgagctgcgggttaagttttccagatccgcagacgcacccgcttaccaacaagggcagaaccaactctacaatgaacttaatttggggcggagggaagagtacgacgttctggacaaaaggaggggacgagatcccgagatgggcggaaagcctcagcgaaggaagaatccgcaagaggggctttataacgaactccagaaagataaaatggcagaagcctatagtgagattgggatgaagggagaaaggaggaggggtaaaggtcacgatgggttgtaccaaggattgagcacagccactaaagatacctatgatgcgctccacatgcaggccctgccgccaaga

SEQ ID NO: 38116 - DNA, 1767 bp, synthetic construct
  source 1..1767: mol_type = other DNA
atggccttaccagtgaccgccttgctcctgccgctggccttgctgctccacgccgccaggccggacatcgtgatgacacagagccctgatagcctggccgtgtctctgggagagagagccaccattaactgcaaggccagccagagcgtggactacgacggcgacagcttcctgaactggtatcagcagaagcccggccagcctcctaagctgctgatctacgccgccagcaatctggaaagcggcgtgccaagcagattttccggctctggcagcggcaccgatttcaccctgacaatatccagcctccagcctgaggacgtggccgtgtactactgccagcagagcaacgacgaccctctgacctttggacagggcaccaaggtggaaatcaaactcgagcagagcttcggcctgctggaccccaagctgtgctacctgctggatggcatcctgttcatctacggcgtgatcctgaccgccctgttcctgagagtgaagttcagcagaagcgccgacgcccctgcctaccagcagggacagaaccaactgtacaacgagctgaacctgggcagacgggaagagtacgacgtgctggacaagcggagaggcagggaccctgagatgggcggaaagccccagcggagaaagaacccccaggaaggactgtataacgaactccagaaagacaagatggccgaagcctacagcgagatcggcatgaagggcgagcggagaagaggcaagggccacgatggcctgtaccagggcctgagcaccgccaccaaggacacctatgacgccctgcacatgcaggccctgcctccaagaagggccaagcgatctggatctggagcaacaaacttctcactactcaaacaagcaggtgacgtggaggagaatcccgggcctactagtatggactggatttggcgcatccttttccttgtcggcgctgctaccggcgcgcattccttcgaacaagttcagctggttcagagcggagccgaagtgaagaaacctggggcctctgtgaaggtgtcctgcaaagccagcggctacacctttaccagctactggatcaactgggtccgacaggcccctggacaaggactggaatggatgggacagatccttccaggcggaggggacaccaactacaacggcaagttcaagggcagagtgaccatcaccgccgacaccagcacaagcaccgcctacatggaactgagcagcctgagaagcgaggacaccgccgtgtattattgcaccagacgggtgcccatccggctggattattggggacagggaaccctggtcaccgtgtctagtacgcgtcagagttttgggttgttggaccctaaattgtgctatctgttggacggaatcctgttcatttacggagtgatcctgaccgcattgttcctgcgggttaagttttccagatccgcagacgcacccgcttaccaacaagggcagaaccaactctacaatgaacttaatttggggcggagggaagagtacgacgttctggacaaaaggaggggacgagatcccgagatgggcggaaagcctcagcgaaggaagaatccgcaagaggggctttataacgaactccagaaagataaaatggcagaagcctatagtgagattgggatgaagggagaaaggaggaggggtaaaggtcacgatgggttgtaccaaggattgagcacagccactaaagatacctatgatgcgctccacatgcaggccctgccgccaaga

SEQ ID NO: 38117 - DNA, 1941 bp, synthetic construct
  source 1..1941: mol_type = other DNA
atggccttaccagtgaccgccttgctcctgccgctggccttgctgctccacgccgccaggccggacatcgtgatgacacagagccctgatagcctggccgtgtctctgggagagagagccaccattaactgcaaggccagccagagcgtggactacgacggcgacagcttcctgaactggtatcagcagaagcccggccagcctcctaagctgctgatctacgccgccagcaatctggaaagcggcgtgccaagcagattttccggctctggcagcggcaccgatttcaccctgacaatatccagcctccagcctgaggacgtggccgtgtactactgccagcagagcaacgacgaccctctgacctttggacagggcaccaaggtggaaatcaaactcgagggacagcctaaggccaatcctaccgtgacactgttccctccaagcagcgaagaactccaggccaacaaggccacacttgtgtgcctgatctccgacttctaccctggggctgtgacagtggcttggaaggccgatggatctcctgtgaaagccggcgtggaaaccaccaagccatccaagcagagcaacaacaaatacgccgccagctcctacctgagcctgacacctgagcagtggaagtcccacagatcctacagctgccaagtgacccacgaaggcagcaccgtggaaaagacagtggcccctacagagtgcagccccatcaagaccgatgtgattacaatggaccccaaggacaactgctccaaggacgccaacgataccctgctgctccagctgaccaacaccagcgcctactacatgtacttgttgctgctgctgaagtccgtggtgtacttcgccatcatcacatgctgcctgctgcggagaaccgccttctgctgcaacggcgagaagtctagggccaagcgatctggatctggagcaacaaacttctcactactcaaacaagcaggtgacgtggaggagaatcccgggcctactagtatggactggatttggcgcatccttttccttgtcggcgctgctaccggcgcgcattccttcgaacaagttcagctggttcagagcggagccgaagtgaagaaacctggggcctctgtgaaggtgtcctgcaaagccagcggctacacctttaccagctactggatcaactgggtccgacaggcccctggacaaggactggaatggatgggacagatccttccaggcggaggggacaccaactacaacggcaagttcaagggcagagtgaccatcaccgccgacaccagcacaagcaccgcctacatggaactgagcagcctgagaagcgaggacaccgccgtgtattattgcaccagacgggtgcccatccggctggattattggggacagggaaccctggtcaccgtgtctagtacgcgtgcctctacaaagggaccctccgtgtttcctctggctcccagcagcaagtctacaagcggaggaacagccgctctgggctgcctggtcaaggattactttcccgagcctgtgaccgtgtcctggaatagcggagcactgacaagcggcgtgcacacctttccagccgtgctgcaaagcagcggcctgtactctctgagcagcgtggtcacagtgcctagctctagcctgggcacccagacctacatctgcaatgtgaaccacaagcctagcaacaccaaggtggacaagagagtggaacccaagagctgtgaagtgaaaaccgactccaccgaccacgtgaagcccaaagagacagagaacaccaagcagcccagcaagagctgccacaagcccaaggccatcgtgcacaccgagaaagtgaacatgatgagcctgaccgtgctgggcctgcggatgctgttcgccaaaaccgtggccgtgaacttcctgctgaccgccaagctgttcttcctc

SEQ ID NO: 38118 - DNA, 1875 bp, synthetic construct
  source 1..1875: mol_type = other DNA
atggccttaccagtgaccgccttgctcctgccgctggccttgctgctccacgccgccaggccggacatcgtgatgacacagagccctgatagcctggccgtgtctctgggagagagagccaccattaactgcaaggccagccagagcgtggactacgacggcgacagcttcctgaactggtatcagcagaagcccggccagcctcctaagctgctgatctacgccgccagcaatctggaaagcggcgtgccaagcagattttccggctctggcagcggcaccgatttcaccctgacaatatccagcctccagcctgaggacgtggccgtgtactactgccagcagagcaacgacgaccctctgacctttggacagggcaccaaggtggaaatcaaactcgagggacagcctaaggccaatcctaccgtgacactgttccctccaagcagcgaagaactccaggccaacaaggccacacttgtgtgcctgatctccgacttctaccctggggctgtgacagtggcttggaaggccgatggatctcctgtgaaagccggcgtggaaaccaccaagccatccaagcagagcaacaacaaatacgccgccagctcctacctgagcctgacacctgagcagtggaagtcccacagatcctacagctgccaagtgacccacgaaggcagcaccgtggaaaagacagtggcccctacagagtgcagcggcagagccgattgcggcatcaccagcgccagctaccaccagggcgtgctgagcgccaccatcctgtacgagatcctgctgggcaaggccaccctgtacgccgtgctggtgtctgccctggtgctgatggctatggtcaagcggaaggacagccggggaagggccaagcgatctggatctggagcaacaaacttctcactactcaaacaagcaggtgacgtggaggagaatcccgggcctactagtatggactggatttggcgcatccttttccttgtcggcgctgctaccggcgcgcattccttcgaacaagttcagctggttcagagcggagccgaagtgaagaaacctggggcctctgtgaaggtgtcctgcaaagccagcggctacacctttaccagctactggatcaactgggtccgacaggcccctggacaaggactggaatggatgggacagatccttccaggcggaggggacaccaactacaacggcaagttcaagggcagagtgaccatcaccgccgacaccagcacaagcaccgcctacatggaactgagcagcctgagaagcgaggacaccgccgtgtattattgcaccagacgggtgcccatccggctggattattggggacagggaaccctggtcaccgtgtctagtacgcgtgcctctacaaagggaccctccgtgtttcctctggctcccagcagcaagtctacaagcggaggaacagccgctctgggctgcctggtcaaggattactttcccgagcctgtgaccgtgtcctggaatagcggagcactgacaagcggcgtgcacacctttccagccgtgctgcaaagcagcggcctgtactctctgagcagcgtggtcacagtgcctagctctagcctgggcacccagacctacatctgcaatgtgaaccacaagcctagcaacaccaaggtggacaagagagtggaacccaagagctgtatccccgaggacacattcttcccaagcagcgacgtgccctgcgacgtgaagctggtggaaaagagcttcgagacagacaccaacctgaacttccagaacctgagcgtgatcggcttcagaatcctgctgctgaaagtggccggctttaacctgctgatgaccctgcggctgtggtccagc

SEQ ID NO: 38119 - DNA, 1875 bp, synthetic construct
  source 1..1875: mol_type = other DNA
atggccttaccagtgaccgccttgctcctgccgctggccttgctgctccacgccgccaggccggacatcgtgatgacacagagccctgatagcctggccgtgtctctgggagagagagccaccattaactgcaaggccagccagagcgtggactacgacggcgacagcttcctgaactggtatcagcagaagcccggccagcctcctaagctgctgatctacgccgccagcaatctggaaagcggcgtgccaagcagattttccggctctggcagcggcaccgatttcaccctgacaatatccagcctccagcctgaggacgtggccgtgtactactgccagcagagcaacgacgaccctctgacctttggacagggcaccaaggtggaaatcaaactcgagggacagcctaaggccaatcctaccgtgacactgttccctccaagcagcgaagaactccaggccaacaaggccacacttgtgtgcctgatctccgacttctaccctggggctgtgacagtggcttggaaggccgatggatctcctgtgaaagccggcgtggaaaccaccaagccatccaagcagagcaacaacaaatacgccgccagctcctacctgagcctgacacctgagcagtggaagtcccacagatcctacagctgccaagtgacccacgaaggcagcaccgtggaaaagacagtggcccctacagagtgcagcggcagagccgattgcggctttaccagcgagagctaccagcagggcgtgctgagcgccaccatcctgtacgagatcctgctgggcaaggccaccctgtacgccgtgctggtgtctgccctggtgctgatggctatggtcaagcggaaggacagccggggaagggccaagcgatctggatctggagcaacaaacttctcactactcaaacaagcaggtgacgtggaggagaatcccgggcctactagtatggactggatttggcgcatccttttccttgtcggcgctgctaccggcgcgcattccttcgaacaagttcagctggttcagagcggagccgaagtgaagaaacctggggcctctgtgaaggtgtcctgcaaagccagcggctacacctttaccagctactggatcaactgggtccgacaggcccctggacaaggactggaatggatgggacagatccttccaggcggaggggacaccaactacaacggcaagttcaagggcagagtgaccatcaccgccgacaccagcacaagcaccgcctacatggaactgagcagcctgagaagcgaggacaccgccgtgtattattgcaccagacgggtgcccatccggctggattattggggacagggaaccctggtcaccgtgtctagtacgcgtgcctctacaaagggaccctccgtgtttcctctggctcccagcagcaagtctacaagcggaggaacagccgctctgggctgcctggtcaaggattactttcccgagcctgtgaccgtgtcctggaatagcggagcactgacaagcggcgtgcacacctttccagccgtgctgcaaagcagcggcctgtactctctgagcagcgtggtcacagtgcctagctctagcctgggcacccagacctacatctgcaatgtgaaccacaagcctagcaacaccaaggtggacaagagagtggaacccaagagctgtatccccgaggacacattcttcccaagccccgagagcagctgcgacgtgaagctggtggaaaagagcttcgagacagacaccaacctgaacttccagaacctgagcgtgatcggcttcagaatcctgctgctgaaagtggccggctttaacctgctgatgaccctgcggctgtggtccagc

SEQ ID NO: 38120 - DNA, 1353 bp, synthetic construct
  source 1..1353: mol_type = other DNA
atggccttaccagtgaccgccttgctcctgccgctggccttgctgctccacgccgccaggccggacatcgtgatgacacagagccctgatagcctggccgtgtctctgggagagagagccaccattaactgcaaggccagccagagcgtggactacgacggcgacagcttcctgaactggtatcagcagaagcccggccagcctcctaagctgctgatctacgccgccagcaatctggaaagcggcgtgccaagcagattttccggctctggcagcggcaccgatttcaccctgacaatatccagcctccagcctgaggacgtggccgtgtactactgccagcagagcaacgacgaccctctgacctttggacagggcaccaaggtggaaatcaaaggcggaggcggaagtggaggcggaggatctggcggcggaggctctcaagttcagctggttcagagcggagccgaagtgaagaaacctggggcctctgtgaaggtgtcctgcaaagccagcggctacacctttaccagctactggatcaactgggtccgacaggcccctggacaaggactggaatggatgggacagatccttccaggcggaggggacaccaactacaacggcaagttcaagggcagagtgaccatcaccgccgacaccagcacaagcaccgcctacatggaactgagcagcctgagaagcgaggacaccgccgtgtattattgcaccagacgggtgcccatccggctggattattggggacagggaaccctggtcaccgtgtctagtacgcgtgacggtaacgaggagatgggaggaatcactcaaaccccttacaaagtctcaatttcaggaacaactgttatccttacatgtccccagtatcctggcagcgagatcctttggcagcataacgacaagaatatagggggagatgaagacgataagaatatcggatctgacgaggatcacttgagcctgaaagagttctccgagcttgaacaaagcggatattatgtgtgctatccgcgcgggtcaaagccggaagacgctaacttttacctttatctccgagccagagtgtgcgaaaattgcatggaaatggacgttatgtccgttgctacaatagttatcgtagatatatgcatcacgggtggactgcttctgctggtttattattggtccaagaatagaaaggccaaagctaaacccgtgaccagaggcgctggcgcaggcggaaggcaaaggggacaaaacaaagaacggccaccaccagtgccaaatccagattatgagcctattcggaaaggacagagggacctgtactctggcctgaatcagagaagaatc

SEQ ID NO: 38121 - DNA, 1248 bp, synthetic construct
  source 1..1248: mol_type = other DNA
atggccttaccagtgaccgccttgctcctgccgctggccttgctgctccacgccgccaggccggacatcgtgatgacacagagccctgatagcctggccgtgtctctgggagagagagccaccattaactgcaaggccagccagagcgtggactacgacggcgacagcttcctgaactggtatcagcagaagcccggccagcctcctaagctgctgatctacgccgccagcaatctggaaagcggcgtgccaagcagattttccggctctggcagcggcaccgatttcaccctgacaatatccagcctccagcctgaggacgtggccgtgtactactgccagcagagcaacgacgaccctctgacctttggacagggcaccaaggtggaaatcaaaggcggaggcggaagtggaggcggaggatctggcggcggaggctctcaagttcagctggttcagagcggagccgaagtgaagaaacctggggcctctgtgaaggtgtcctgcaaagccagcggctacacctttaccagctactggatcaactgggtccgacaggcccctggacaaggactggaatggatgggacagatccttccaggcggaggggacaccaactacaacggcaagttcaagggcagagtgaccatcaccgccgacaccagcacaagcaccgcctacatggaactgagcagcctgagaagcgaggacaccgccgtgtattattgcaccagacgggtgcccatccggctggattattggggacagggaaccctggtcaccgtgtctagtacgcgtttcaagatccccatcgaggaactggaagatcgggtgttcgtgaactgcaacacctctatcacctgggtggaaggcaccgtgggaacactgctgagcgacatcaccagactggacctcggcaagcggattctggaccctcggggcatctacagatgcaacggcaccgacatctacaaggacaaagaaagcaccgtgcaggtccactacagaatgtgccagtcctgcgtggaactggaccctgctacagtggccggcatcatcgtgaccgatgtgatcgctactctgctgctggctctgggagtgttctgcttcgccggacacgaaacaggcagactgtctggcgctgccgatacacaggccctgctgagaaacgaccaagtgtatcagcccctgcgcgacagagatgatgcccagtattctcacctcggcggcaactgggctagaaacaag

SEQ ID NO: 38122 - DNA, 1278 bp, synthetic construct
  source 1..1278: mol_type = other DNA
atggccttaccagtgaccgccttgctcctgccgctggccttgctgctccacgccgccaggccggacatcgtgatgacacagagccctgatagcctggccgtgtctctgggagagagagccaccattaactgcaaggccagccagagcgtggactacgacggcgacagcttcctgaactggtatcagcagaagcccggccagcctcctaagctgctgatctacgccgccagcaatctggaaagcggcgtgccaagcagattttccggctctggcagcggcaccgatttcaccctgacaatatccagcctccagcctgaggacgtggccgtgtactactgccagcagagcaacgacgaccctctgacctttggacagggcaccaaggtggaaatcaaaggcggaggcggaagtggaggcggaggatctggcggcggaggctctcaagttcagctggttcagagcggagccgaagtgaagaaacctggggcctctgtgaaggtgtcctgcaaagccagcggctacacctttaccagctactggatcaactgggtccgacaggcccctggacaaggactggaatggatgggacagatccttccaggcggaggggacaccaactacaacggcaagttcaagggcagagtgaccatcaccgccgacaccagcacaagcaccgcctacatggaactgagcagcctgagaagcgaggacaccgccgtgtattattgcaccagacgggtgcccatccggctggattattggggacagggaaccctggtcaccgtgtctagtacgcgtcagagcatcaagggcaaccacctggtcaaggtgtacgactaccaagaggacggcagcgtgctgctgacatgtgatgccgaggccaagaacatcacctggtttaaggacggcaagatgatcggcttcctgaccgaggacaagaagaagtggaacctgggcagcaacgctaaggaccccagaggcatgtatcagtgcaagggcagccagaacaagagcaagcccctccaggtgtactaccggatgtgccagaactgcatcgagctgaacgccgctaccatcagcggctttctgttcgccgagatcgtgtccatcttcgtgctggccgtgggcgtgtactttatcgctggacaggatggcgtgcggcagagcagagcttccgataagcaaaccctgctgcctaacgaccagctgtaccagcctctgaaggacagagaggacgaccagtacagccacctccagggcaatcagctgagaagaaac

SEQ ID NO: 38123 - DNA, 1227 bp, synthetic construct
  source 1..1227: mol_type = other DNA
atggccttaccagtgaccgccttgctcctgccgctggccttgctgctccacgccgccaggccggacatcgtgatgacacagagccctgatagcctggccgtgtctctgggagagagagccaccattaactgcaaggccagccagagcgtggactacgacggcgacagcttcctgaactggtatcagcagaagcccggccagcctcctaagctgctgatctacgccgccagcaatctggaaagcggcgtgccaagcagattttccggctctggcagcggcaccgatttcaccctgacaatatccagcctccagcctgaggacgtggccgtgtactactgccagcagagcaacgacgaccctctgacctttggacagggcaccaaggtggaaatcaaaggcggaggcggaagtggaggcggaggatctggcggcggaggctctcaagttcagctggttcagagcggagccgaagtgaagaaacctggggcctctgtgaaggtgtcctgcaaagccagcggctacacctttaccagctactggatcaactgggtccgacaggcccctggacaaggactggaatggatgggacagatccttccaggcggaggggacaccaactacaacggcaagttcaagggcagagtgaccatcaccgccgacaccagcacaagcaccgcctacatggaactgagcagcctgagaagcgaggacaccgccgtgtattattgcaccagacgggtgcccatccggctggattattggggacagggaaccctggtcaccgtgtctagtacgcgtcagagttttgggttgttggaccctaaattgtgctatctgttggacggaatcctgttcatttacggagtgatcctgaccgcattgttcctgcgggttaagttttccagatccgcagacgcacccgcttaccaacaagggcagaaccaactctacaatgaacttaatttggggcggagggaagagtacgacgttctggacaaaaggaggggacgagatcccgagatgggcggaaagcctcagcgaaggaagaatccgcaagaggggctttataacgaactccagaaagataaaatggcagaagcctatagtgagattgggatgaagggagaaaggaggaggggtaaaggtcacgatgggttgtaccaaggattgagcacagccactaaagatacctatgatgcgctccacatgcaggccctgccgccaaga

SEQ ID NO: 38124 - DNA, 1512 bp, synthetic construct
  source 1..1512: mol_type = other DNA
atggccttaccagtgaccgccttgctcctgccgctggccttgctgctccacgccgccaggccggacatcgtgatgacacagagccctgatagcctggccgtgtctctgggagagagagccaccattaactgcaaggccagccagagcgtggactacgacggcgacagcttcctgaactggtatcagcagaagcccggccagcctcctaagctgctgatctacgccgccagcaatctggaaagcggcgtgccaagcagattttccggctctggcagcggcaccgatttcaccctgacaatatccagcctccagcctgaggacgtggccgtgtactactgccagcagagcaacgacgaccctctgacctttggacagggcaccaaggtggaaatcaaaggcggaggcggaagtggaggcggaggatctggcggcggaggctctcaagttcagctggttcagagcggagccgaagtgaagaaacctggggcctctgtgaaggtgtcctgcaaagccagcggctacacctttaccagctactggatcaactgggtccgacaggcccctggacaaggactggaatggatgggacagatccttccaggcggaggggacaccaactacaacggcaagttcaagggcagagtgaccatcaccgccgacaccagcacaagcaccgcctacatggaactgagcagcctgagaagcgaggacaccgccgtgtattattgcaccagacgggtgcccatccggctggattattggggacagggaaccctggtcaccgtgtctagtacgcgtggaatgaggactgaggatcttcccaaagctgtcgtctttctcgaaccccaatggtatcgggtgctcgaaaaagactctgtgacactgaaatgccaaggggcctactctcccgaggacaactccacacagtggtttcataatgagtccctcatcagctctcaggccagctcttatttcattgatgccgctacagtggacgactccggcgagtatcggtgtcagaccaatctgtctacactgtctgaccccgtgcagcttgaggtccacattggatggttgctcttgcaagccccacgctgggttttcaaagaggaagatccaatccatctgcggtgccacagctggaaaaacaccgctctccacaaagtcacatacctgcaaaatggcaaaggacgcaaatacttccatcacaattccgatttttacattccgaaggctaccctgaaagacagcggcagctatttctgccggggactcgtcggctccaagaatgtgtcctccgaaaccgtgaatatcacgattacccaaggactggctgtgcctacaatctctagcttctttccgcctggataccaagtctccttctgtcttgtgatggtcctcctgtttgctgtggacacaggactgtacttttccgtgaaaacgaacatccgcagctccacacgcgattggaaagatcacaagtttaaatggcgcaaagatccccaggacaag

SEQ ID NO: 38125 - DNA, 1437 bp, synthetic construct
  source 1..1437: mol_type = other DNA
atggccttaccagtgaccgccttgctcctgccgctggccttgctgctccacgccgccaggccggacatcgtgatgacacagagccctgatagcctggccgtgtctctgggagagagagccaccattaactgcaaggccagccagagcgtggactacgacggcgacagcttcctgaactggtatcagcagaagcccggccagcctcctaagctgctgatctacgccgccagcaatctggaaagcggcgtgccaagcagattttccggctctggcagcggcaccgatttcaccctgacaatatccagcctccagcctgaggacgtggccgtgtactactgccagcagagcaacgacgaccctctgacctttggacagggcaccaaggtggaaatcaaaggcggaggcggaagtggaggcggaggatctggcggcggaggctctcaagttcagctggttcagagcggagccgaagtgaagaaacctggggcctctgtgaaggtgtcctgcaaagccagcggctacacctttaccagctactggatcaactgggtccgacaggcccctggacaaggactggaatggatgggacagatccttccaggcggaggggacaccaactacaacggcaagttcaagggcagagtgaccatcaccgccgacaccagcacaagcaccgcctacatggaactgagcagcctgagaagcgaggacaccgccgtgtattattgcaccagacgggtgcccatccggctggattattggggacagggaaccctggtcaccgtgtctagtacgcgtggaatgaggactgaggatcttcccaaagctgtcgtctttctcgaaccccaatggtatcgggtgctcgaaaaagactctgtgacactgaaatgccaaggggcctactctcccgaggacaactccacacagtggtttcataatgagtccctcatcagctctcaggccagctcttatttcattgatgccgctacagtggacgactccggcgagtatcggtgtcagaccaatctgtctacactgtctgaccccgtgcagcttgaggtccacattggatggttgctcttgcaagccccacgctgggttttcaaagaggaagatccaatccatctgcggtgccacagctggaaaaacaccgctctccacaaagtcacatacctgcaaaatggcaaaggacgcaaatacttccatcacaattccgatttttacattccgaaggctaccctgaaagacagcggcagctatttctgccggggactcgtcggctccaagaatgtgtcctccgaaaccgtgaatatcacgattacccaaggactggctgtgcctacaatctctagcttctttccgcctggataccaagtctccttctgtcttgtgatggtcctcctgtttgctgtggacacaggactgtacttttccgtg

SEQ ID NO: 38126 - DNA, 1440 bp, synthetic construct
  source 1..1440: mol_type = other DNA
atggccttaccagtgaccgccttgctcctgccgctggccttgctgctccacgccgccaggccggacatcgtgatgacacagagccctgatagcctggccgtgtctctgggagagagagccaccattaactgcaaggccagccagagcgtggactacgacggcgacagcttcctgaactggtatcagcagaagcccggccagcctcctaagctgctgatctacgccgccagcaatctggaaagcggcgtgccaagcagattttccggctctggcagcggcaccgatttcaccctgacaatatccagcctccagcctgaggacgtggccgtgtactactgccagcagagcaacgacgaccctctgacctttggacagggcaccaaggtggaaatcaaaggcggaggcggaagtggaggcggaggatctggcggcggaggctctcaagttcagctggttcagagcggagccgaagtgaagaaacctggggcctctgtgaaggtgtcctgcaaagccagcggctacacctttaccagctactggatcaactgggtccgacaggcccctggacaaggactggaatggatgggacagatccttccaggcggaggggacaccaactacaacggcaagttcaagggcagagtgaccatcaccgccgacaccagcacaagcaccgcctacatggaactgagcagcctgagaagcgaggacaccgccgtgtattattgcaccagacgggtgcccatccggctggattattggggacagggaaccctggtcaccgtgtctagtacgcgtggaatgaggactgaggatcttcccaaagctgtcgtctttctcgaaccccaatggtatcgggtgctcgaaaaagactctgtgacactgaaatgccaaggggcctactctcccgaggacaactccacacagtggtttcataatgagtccctcatcagctctcaggccagctcttatttcattgatgccgctacagtggacgactccggcgagtatcggtgtcagaccaatctgtctacactgtctgaccccgtgcagcttgaggtccacattggatggttgctcttgcaagccccacgctgggttttcaaagaggaagatccaatccatctgcggtgccacagctggaaaaacaccgctctccacaaagtcacatacctgcaaaatggcaaaggacgcaaatacttccatcacaattccgatttttacattccgaaggctaccctgaaagacagcggcagctatttctgccggggactcgtcggctccaagaatgtgtcctccgaaaccgtgaatatcacgattacccaaggactggctgtgcctacaatctctagcttctttccgcctggataccaagtctccttctgtcttgtgatggtcctcctgtttgctgtggacacaggactgtacttttccgtgaaa

SEQ ID NO: 38127 - DNA, 2172 bp, synthetic construct
  source 1..2172: mol_type = other DNA
atggccttaccagtgaccgccttgctcctgccgctggccttgctgctccacgccgccaggccggacatcgtgatgacacagagccctgatagcctggccgtgtctctgggagagagagccaccattaactgcaaggccagccagagcgtggactacgacggcgacagcttcctgaactggtatcagcagaagcccggccagcctcctaagctgctgatctacgccgccagcaatctggaaagcggcgtgccaagcagattttccggctctggcagcggcaccgatttcaccctgacaatatccagcctccagcctgaggacgtggccgtgtactactgccagcagagcaacgacgaccctctgacctttggacagggcaccaaggtggaaatcaaactcgagggacagcctaaggccaatcctaccgtgacactgttccctccaagcagcgaagaactccaggccaacaaggccacacttgtgtgcctgatctccgacttctaccctggggctgtgacagtggcttggaaggccgatggatctcctgtgaaagccggcgtggaaaccaccaagccatccaagcagagcaacaacaaatacgccgccagctcctacctgagcctgacacctgagcagtggaagtcccacagatcctacagctgccaagtgacccacgaaggcagcaccgtggaaaagacagtggcccctacagagtgcagcggatcccagagcttcggcctgctggaccccaagctgtgctacctgctggatggcatcctgttcatctacggcgtgatcctgaccgccctgttcctgagagtgaagttcagcagaagcgccgacgcccctgcctaccagcagggacagaaccaactgtacaacgagctgaacctgggcagacgggaagagtacgacgtgctggacaagcggagaggcagggaccctgagatgggcggaaagccccagcggagaaagaacccccaggaaggactgtataacgaactccagaaagacaagatggccgaagcctacagcgagatcggcatgaagggcgagcggagaagaggcaagggccacgatggcctgtaccagggcctgagcaccgccaccaaggacacctatgacgccctgcacatgcaggccctgcctccaagaagggccaagcgatctggatctggagcaacaaacttctcactactcaaacaagcaggtgacgtggaggagaatcccgggcctactagtatggactggatttggcgcatccttttccttgtcggcgctgctaccggcgcgcattccttcgaacaagttcagctggttcagagcggagccgaagtgaagaaacctggggcctctgtgaaggtgtcctgcaaagccagcggctacacctttaccagctactggatcaactgggtccgacaggcccctggacaaggactggaatggatgggacagatccttccaggcggaggggacaccaactacaacggcaagttcaagggcagagtgaccatcaccgccgacaccagcacaagcaccgcctacatggaactgagcagcctgagaagcgaggacaccgccgtgtattattgcaccagacgggtgcccatccggctggattattggggacagggaaccctggtcaccgtgtctagtacgcgtgcctctacaaagggaccctccgtgtttcctctggctcccagcagcaagtctacaagcggaggaacagccgctctgggctgcctggtcaaggattactttcccgagcctgtgaccgtgtcctggaatagcggagcactgacaagcggcgtgcacacctttccagccgtgctgcaaagcagcggcctgtactctctgagcagcgtggtcacagtgcctagctctagcctgggcacccagacctacatctgcaatgtgaaccacaagcctagcaacaccaaggtggacaagagagtggaacccaagagctgtggtaccatcactcaaggtttggcagtgtcaaccatctcatcattctttccacctggctaccaagtgtccttctgcctggtcatggtgctgctgttcgccgtggataccggcctgtacttcagcgtcaagaccaacatccggtccagcaccagagactggaaggaccacaagttcaagtggcggaaggaccctcaggacaag

SEQ ID NO: 38128 - DNA, 2217 bp, synthetic construct
  source 1..2217: mol_type = other DNA
atggccttaccagtgaccgccttgctcctgccgctggccttgctgctccacgccgccaggccggacatcgtgatgacacagagccctgatagcctggccgtgtctctgggagagagagccaccattaactgcaaggccagccagagcgtggactacgacggcgacagcttcctgaactggtatcagcagaagcccggccagcctcctaagctgctgatctacgccgccagcaatctggaaagcggcgtgccaagcagattttccggctctggcagcggcaccgatttcaccctgacaatatccagcctccagcctgaggacgtggccgtgtactactgccagcagagcaacgacgaccctctgacctttggacagggcaccaaggtggaaatcaaactcgaggacctgaagaacgtgttcccacctgaggtggccgtgttcgagcctagcgaggccgagatcagccacacccagaaagccaccctcgtgtgcctggctaccggcttctaccccgaccatgtggaactgtcttggtgggtcaacggcaaagaggtgcacagcggcgtgtctaccgacccccagccactgaaagaacagcccgccctgaacgacagccggtactgcctgagcagcagactgagagtgtccgccaccttctggcagaacccccggaaccacttcagatgccaggtgcagttctacggcctgagcgagaacgacgagtggacccaggacagagccaagcccgtgacccagatcgtgtctgccgaagcctggggcagagccgattgcggatcccagagcttcggcctgctggaccccaagctgtgctacctgctggatggcatcctgttcatctacggcgtgatcctgaccgccctgttcctgagagtgaagttcagcagaagcgccgacgcccctgcctaccagcagggacagaaccaactgtacaacgagctgaacctgggcagacgggaagagtacgacgtgctggacaagcggagaggcagggaccctgagatgggcggaaagccccagcggagaaagaacccccaggaaggactgtataacgaactccagaaagacaagatggccgaagcctacagcgagatcggcatgaagggcgagcggagaagaggcaagggccacgatggcctgtaccagggcctgagcaccgccaccaaggacacctatgacgccctgcacatgcaggccctgcctccaagaagggccaagcgatctggatctggagcaacaaacttctcactactcaaacaagcaggtgacgtggaggagaatcccgggcctactagtatggactggatttggcgcatccttttccttgtcggcgctgctaccggcgcgcattccttcgaacaagttcagctggttcagagcggagccgaagtgaagaaacctggggcctctgtgaaggtgtcctgcaaagccagcggctacacctttaccagctactggatcaactgggtccgacaggcccctggacaaggactggaatggatgggacagatccttccaggcggaggggacaccaactacaacggcaagttcaagggcagagtgaccatcaccgccgacaccagcacaagcaccgcctacatggaactgagcagcctgagaagcgaggacaccgccgtgtattattgcaccagacgggtgcccatccggctggattattggggacagggaaccctggtcaccgtgtctagtacgcgtatccagaaccctgatcctgccgtgtaccagctgcgggatagcaagagcagcgacaagagcgtgtgtctgttcaccgacttcgacagccagaccaacgtgtcccagagcaaggactccgacgtgtacatcaccgataagaccgtgctggacatgcggagcatggacttcaagagcaactccgccgtggcctggtccaacaagtccgatttcgcctgcgccaacgccttcaacaacagcattatccccgaggacacattcttcccaagccccgagagcagctgcggtaccatcactcaaggtttggcagtgtcaaccatctcatcattctttccacctggctaccaagtgtccttctgcctggtcatggtgctgctgttcgccgtggataccggcctgtacttcagcgtcaagaccaacatccggtccagcaccagagactggaaggaccacaagttcaagtggcggaaggaccctcaggacaag

SEQ ID NO: 38129 - DNA, 2142 bp, synthetic construct
  source 1..2142: mol_type = other DNA
atggccttaccagtgaccgccttgctcctgccgctggccttgctgctccacgccgccaggccggacatcgtgatgacacagagccctgatagcctggccgtgtctctgggagagagagccaccattaactgcaaggccagccagagcgtggactacgacggcgacagcttcctgaactggtatcagcagaagcccggccagcctcctaagctgctgatctacgccgccagcaatctggaaagcggcgtgccaagcagattttccggctctggcagcggcaccgatttcaccctgacaatatccagcctccagcctgaggacgtggccgtgtactactgccagcagagcaacgacgaccctctgacctttggacagggcaccaaggtggaaatcaaactcgaggacctgaagaacgtgttcccacctgaggtggccgtgttcgagcctagcgaggccgagatcagccacacccagaaagccaccctcgtgtgcctggctaccggcttctaccccgaccatgtggaactgtcttggtgggtcaacggcaaagaggtgcacagcggcgtgtctaccgacccccagccactgaaagaacagcccgccctgaacgacagccggtactgcctgagcagcagactgagagtgtccgccaccttctggcagaacccccggaaccacttcagatgccaggtgcagttctacggcctgagcgagaacgacgagtggacccaggacagagccaagcccgtgacccagatcgtgtctgccgaagcctggggcagagccgattgcggatcccagagcttcggcctgctggaccccaagctgtgctacctgctggatggcatcctgttcatctacggcgtgatcctgaccgccctgttcctgagagtgaagttcagcagaagcgccgacgcccctgcctaccagcagggacagaaccaactgtacaacgagctgaacctgggcagacgggaagagtacgacgtgctggacaagcggagaggcagggaccctgagatgggcggaaagccccagcggagaaagaacccccaggaaggactgtataacgaactccagaaagacaagatggccgaagcctacagcgagatcggcatgaagggcgagcggagaagaggcaagggccacgatggcctgtaccagggcctgagcaccgccaccaaggacacctatgacgccctgcacatgcaggccctgcctccaagaagggccaagcgatctggatctggagcaacaaacttctcactactcaaacaagcaggtgacgtggaggagaatcccgggcctactagtatggactggatttggcgcatccttttccttgtcggcgctgctaccggcgcgcattccttcgaacaagttcagctggttcagagcggagccgaagtgaagaaacctggggcctctgtgaaggtgtcctgcaaagccagcggctacacctttaccagctactggatcaactgggtccgacaggcccctggacaaggactggaatggatgggacagatccttccaggcggaggggacaccaactacaacggcaagttcaagggcagagtgaccatcaccgccgacaccagcacaagcaccgcctacatggaactgagcagcctgagaagcgaggacaccgccgtgtattattgcaccagacgggtgcccatccggctggattattggggacagggaaccctggtcaccgtgtctagtacgcgtatccagaaccctgatcctgccgtgtaccagctgcgggatagcaagagcagcgacaagagcgtgtgtctgttcaccgacttcgacagccagaccaacgtgtcccagagcaaggactccgacgtgtacatcaccgataagaccgtgctggacatgcggagcatggacttcaagagcaactccgccgtggcctggtccaacaagtccgatttcgcctgcgccaacgccttcaacaacagcattatccccgaggacacattcttcccaagccccgagagcagctgcggtaccatcactcaaggtttggcagtgtcaaccatctcatcattctttccacctggctaccaagtgtccttctgcctggtcatggtgctgctgttcgccgtggataccggcctgtacttcagcgtc

SEQ ID NO: 38130 - DNA, 2145 bp, synthetic construct
  source 1..2145: mol_type = other DNA
atggccttaccagtgaccgccttgctcctgccgctggccttgctgctccacgccgccaggccggacatcgtgatgacacagagccctgatagcctggccgtgtctctgggagagagagccaccattaactgcaaggccagccagagcgtggactacgacggcgacagcttcctgaactggtatcagcagaagcccggccagcctcctaagctgctgatctacgccgccagcaatctggaaagcggcgtgccaagcagattttccggctctggcagcggcaccgatttcaccctgacaatatccagcctccagcctgaggacgtggccgtgtactactgccagcagagcaacgacgaccctctgacctttggacagggcaccaaggtggaaatcaaactcgaggacctgaagaacgtgttcccacctgaggtggccgtgttcgagcctagcgaggccgagatcagccacacccagaaagccaccctcgtgtgcctggctaccggcttctaccccgaccatgtggaactgtcttggtgggtcaacggcaaagaggtgcacagcggcgtgtctaccgacccccagccactgaaagaacagcccgccctgaacgacagccggtactgcctgagcagcagactgagagtgtccgccaccttctggcagaacccccggaaccacttcagatgccaggtgcagttctacggcctgagcgagaacgacgagtggacccaggacagagccaagcccgtgacccagatcgtgtctgccgaagcctggggcagagccgattgcggatcccagagcttcggcctgctggaccccaagctgtgctacctgctggatggcatcctgttcatctacggcgtgatcctgaccgccctgttcctgagagtgaagttcagcagaagcgccgacgcccctgcctaccagcagggacagaaccaactgtacaacgagctgaacctgggcagacgggaagagtacgacgtgctggacaagcggagaggcagggaccctgagatgggcggaaagccccagcggagaaagaacccccaggaaggactgtataacgaactccagaaagacaagatggccgaagcctacagcgagatcggcatgaagggcgagcggagaagaggcaagggccacgatggcctgtaccagggcctgagcaccgccaccaaggacacctatgacgccctgcacatgcaggccctgcctccaagaagggccaagcgatctggatctggagcaacaaacttctcactactcaaacaagcaggtgacgtggaggagaatcccgggcctactagtatggactggatttggcgcatccttttccttgtcggcgctgctaccggcgcgcattccttcgaacaagttcagctggttcagagcggagccgaagtgaagaaacctggggcctctgtgaaggtgtcctgcaaagccagcggctacacctttaccagctactggatcaactgggtccgacaggcccctggacaaggactggaatggatgggacagatccttccaggcggaggggacaccaactacaacggcaagttcaagggcagagtgaccatcaccgccgacaccagcacaagcaccgcctacatggaactgagcagcctgagaagcgaggacaccgccgtgtattattgcaccagacgggtgcccatccggctggattattggggacagggaaccctggtcaccgtgtctagtacgcgtatccagaaccctgatcctgccgtgtaccagctgcgggatagcaagagcagcgacaagagcgtgtgtctgttcaccgacttcgacagccagaccaacgtgtcccagagcaaggactccgacgtgtacatcaccgataagaccgtgctggacatgcggagcatggacttcaagagcaactccgccgtggcctggtccaacaagtccgatttcgcctgcgccaacgccttcaacaacagcattatccccgaggacacattcttcccaagccccgagagcagctgcggtaccatcactcaaggtttggcagtgtcaaccatctcatcattctttccacctggctaccaagtgtccttctgcctggtcatggtgctgctgttcgccgtggataccggcctgtacttcagcgtcaag

SEQ ID NO: 38131 - DNA, 2148 bp, synthetic construct
  source 1..2148: mol_type = other DNA
atggccttaccagtgaccgccttgctcctgccgctggccttgctgctccacgccgccaggccggacatcgtgatgacacagagccctgatagcctggccgtgtctctgggagagagagccaccattaactgcaaggccagccagagcgtggactacgacggcgacagcttcctgaactggtatcagcagaagcccggccagcctcctaagctgctgatctacgccgccagcaatctggaaagcggcgtgccaagcagattttccggctctggcagcggcaccgatttcaccctgacaatatccagcctccagcctgaggacgtggccgtgtactactgccagcagagcaacgacgaccctctgacctttggacagggcaccaaggtggaaatcaaactcgaggacctgaagaacgtgttcccacctgaggtggccgtgttcgagcctagcgaggccgagatcagccacacccagaaagccaccctcgtgtgcctggctaccggcttctaccccgaccatgtggaactgtcttggtgggtcaacggcaaagaggtgcacagcggcgtgtctaccgacccccagccactgaaagaacagcccgccctgaacgacagccggtactgcctgagcagcagactgagagtgtccgccaccttctggcagaacccccggaaccacttcagatgccaggtgcagttctacggcctgagcgagaacgacgagtggacccaggacagagccaagcccgtgacccagatcgtgtctgccgaagcctggggcagagccgattgcggatcccagagcttcggcctgctggaccccaagctgtgctacctgctggatggcatcctgttcatctacggcgtgatcctgaccgccctgttcctgagagtgaagttcagcagaagcgccgacgcccctgcctaccagcagggacagaaccaactgtacaacgagctgaacctgggcagacgggaagagtacgacgtgctggacaagcggagaggcagggaccctgagatgggcggaaagccccagcggagaaagaacccccaggaaggactgtataacgaactccagaaagacaagatggccgaagcctacagcgagatcggcatgaagggcgagcggagaagaggcaagggccacgatggcctgtaccagggcctgagcaccgccaccaaggacacctatgacgccctgcacatgcaggccctgcctccaagaagggccaagcgatctggatctggagcaacaaacttctcactactcaaacaagcaggtgacgtggaggagaatcccgggcctactagtatggactggatttggcgcatccttttccttgtcggcgctgctaccggcgcgcattccttcgaacaagttcagctggttcagagcggagccgaagtgaagaaacctggggcctctgtgaaggtgtcctgcaaagccagcggctacacctttaccagctactggatcaactgggtccgacaggcccctggacaaggactggaatggatgggacagatccttccaggcggaggggacaccaactacaacggcaagttcaagggcagagtgaccatcaccgccgacaccagcacaagcaccgcctacatggaactgagcagcctgagaagcgaggacaccgccgtgtattattgcaccagacgggtgcccatccggctggattattggggacagggaaccctggtcaccgtgtctagtacgcgtatccagaaccctgatcctgccgtgtaccagctgcgggatagcaagagcagcgacaagagcgtgtgtctgttcaccgacttcgacagccagaccaacgtgtcccagagcaaggactccgacgtgtacatcaccgataagaccgtgctggacatgcggagcatggacttcaagagcaactccgccgtggcctggtccaacaagtccgatttcgcctgcgccaacgccttcaacaacagcattatccccgaggacacattcttcccaagccccgagagcagctgcggtaccatcactcaaggtttggcagtgtcaaccatctcatcattctttccacctggctaccaagtgtccttctgcctggtcatggtgctgctgttcgccgtggataccggcctgtacttcagcgtcaagacc

SEQ ID NO: 38132 - DNA, 1959 bp, synthetic construct
  source 1..1959: mol_type = other DNA
atggccttaccagtgaccgccttgctcctgccgctggccttgctgctccacgccgccaggccggacatcgtgatgacacagagccctgatagcctggccgtgtctctgggagagagagccaccattaactgcaaggccagccagagcgtggactacgacggcgacagcttcctgaactggtatcagcagaagcccggccagcctcctaagctgctgatctacgccgccagcaatctggaaagcggcgtgccaagcagattttccggctctggcagcggcaccgatttcaccctgacaatatccagcctccagcctgaggacgtggccgtgtactactgccagcagagcaacgacgaccctctgacctttggacagggcaccaaggtggaaatcaaactcgagggacagcctaaggccaatcctaccgtgacactgttccctccaagcagcgaagaactccaggccaacaaggccacacttgtgtgcctgatctccgacttctaccctggggctgtgacagtggcttggaaggccgatggatctcctgtgaaagccggcgtggaaaccaccaagccatccaagcagagcaacaacaaatacgccgccagctcctacctgagcctgacacctgagcagtggaagtcccacagatcctacagctgccaagtgacccacgaaggcagcaccgtggaaaagacagtggcccctacagagtgcagcggatccctgggagagcctcagctgtgctatatcctggacgccatcctgtttctgtacggcatcgtgctgaccctgctgtactgccggctgaagatccaagtgcggaaggccgccatcaccagctacgagaaatccgacggcgtgtacaccggcctgagcaccagaaatcaagagacatacgagacactgaagcacgaaaagcctccacaaagggccaagcgatctggatctggagcaacaaacttctcactactcaaacaagcaggtgacgtggaggagaatcccgggcctactagtatggactggatttggcgcatccttttccttgtcggcgctgctaccggcgcgcattccttcgaacaagttcagctggttcagagcggagccgaagtgaagaaacctggggcctctgtgaaggtgtcctgcaaagccagcggctacacctttaccagctactggatcaactgggtccgacaggcccctggacaaggactggaatggatgggacagatccttccaggcggaggggacaccaactacaacggcaagttcaagggcagagtgaccatcaccgccgacaccagcacaagcaccgcctacatggaactgagcagcctgagaagcgaggacaccgccgtgtattattgcaccagacgggtgcccatccggctggattattggggacagggaaccctggtcaccgtgtctagtacgcgtgcctctacaaagggaccctccgtgtttcctctggctcccagcagcaagtctacaagcggaggaacagccgctctgggctgcctggtcaaggattactttcccgagcctgtgaccgtgtcctggaatagcggagcactgacaagcggcgtgcacacctttccagccgtgctgcaaagcagcggcctgtactctctgagcagcgtggtcacagtgcctagctctagcctgggcacccagacctacatctgcaatgtgaaccacaagcctagcaacaccaaggtggacaagagagtggaacccaagagctgtggtaccctcggagaaccacagctctgttacattctggatgctatcctgttcctctatgggatcgtcctgacactcctgtattgcagactcaaaattcaagttcgcaaagccgccattacctcttacgagaagagtgatggggtgtacacaggactgtctacccggaatcaagaaacctacgaaaccctcaaacatgagaagccacctcagtaa

SEQ ID NO: 38133 - DNA, 1866 bp, synthetic construct
  source 1..1866: mol_type = other DNA
atggccttaccagtgaccgccttgctcctgccgctggccttgctgctccacgccgccaggccggacatcgtgatgacacagagccctgatagcctggccgtgtctctgggagagagagccaccattaactgcaaggccagccagagcgtggactacgacggcgacagcttcctgaactggtatcagcagaagcccggccagcctcctaagctgctgatctacgccgccagcaatctggaaagcggcgtgccaagcagattttccggctctggcagcggcaccgatttcaccctgacaatatccagcctccagcctgaggacgtggccgtgtactactgccagcagagcaacgacgaccctctgacctttggacagggcaccaaggtggaaatcaaactcgaggacctgaagaacgtgttcccacctgaggtggccgtgttcgagcctagcgaggccgagatcagccacacccagaaagccaccctcgtgtgcctggctaccggcttctaccccgaccatgtggaactgtcttggtgggtcaacggcaaagaggtgcacagcggcgtgtgtaccgacccccagccactgaaagaacagcccgccctgaacgacagccggtactgcctgagcagcagactgagagtgtccgccaccttctggcagaacccccggaaccacttcagatgccaggtgcagttctacggcctgagcgagaacgacgagtggacccaggacagagccaagcccgtgacccagatcgtgtctgccgaagcctggggcagagccgattgcggctttaccagcgagagctaccagcagggcgtgctgagcgcctactacatgtacttgttgctgctgctgaagtccgtggtgtacttcgccatcatcacatgctgcctgctgcggagaaccgccttctgctgcaacggcgagaagtctagggccaagcgatctggatctggagcaacaaacttctcactactcaaacaagcaggtgacgtggaggagaatcccgggcctactagtatggactggatttggcgcatccttttccttgtcggcgctgctaccggcgcgcattccttcgaacaagttcagctggttcagagcggagccgaagtgaagaaacctggggcctctgtgaaggtgtcctgcaaagccagcggctacacctttaccagctactggatcaactgggtccgacaggcccctggacaaggactggaatggatgggacagatccttccaggcggaggggacaccaactacaacggcaagttcaagggcagagtgaccatcaccgccgacaccagcacaagcaccgcctacatggaactgagcagcctgagaagcgaggacaccgccgtgtattattgcaccagacgggtgcccatccggctggattattggggacagggaaccctggtcaccgtgtctagtacgcgtatccagaaccctgatcctgccgtgtaccagctgcgggatagcaagagcagcgacaagagcgtgtgtctgttcaccgacttcgacagccagaccaacgtgtcccagagcaaggactccgacgtgtacatcaccgataagtgcgtgctggacatgcggagcatggacttcaagagcaactccgccgtggcctggtccaacaagtccgatttcgcctgcgccaacgccttcaacaacagcattatccccgaggacacattcttcccaagccccgagagcagctgcgacgtgaagctggtggaaaagagcttcgagacagacaccaacctgaacttccagaacctgagcgtgatcggcttcagaatcctgctgctgaaagtggccggctttaacctgctgatgaccctgcggctgtggtccagc

SEQ ID NO: 38134 - DNA, 1887 bp, synthetic construct
  source 1..1887: mol_type = other DNA
atggccttaccagtgaccgccttgctcctgccgctggccttgctgctccacgccgccaggccggacatcgtgatgacacagagccctgatagcctggccgtgtctctgggagagagagccaccattaactgcaaggccagccagagcgtggactacgacggcgacagcttcctgaactggtatcagcagaagcccggccagcctcctaagctgctgatctacgccgccagcaatctggaaagcggcgtgccaagcagattttccggctctggcagcggcaccgatttcaccctgacaatatccagcctccagcctgaggacgtggccgtgtactactgccagcagagcaacgacgaccctctgacctttggacagggcaccaaggtggaaatcaaactcgaggacaagcagctggacgccgacgtgtcccccaagcctaccatcttcctgccctctatcgccgagacaaagctccagaaggccggcacctacctgtgcctgctggaaaagttcttcccagatgtgattaagatccactggcaggaaaagaagtccaacaccatcctgggcagccaggaaggcaacaccatgaagaccaacgacacctacatgaagttcagctggctgaccgtgcccgagaagtccctggacaaagaacacagatgcatcgtgcggcacgaaaacaacaagaacggcgtggaccaggaaatcatcttcccacccatcaagaccgatgtgattacaatggaccccaaggacaactgctccaaggacgccaacgataccctgctgctccagctgaccaacaccagcgcctactacatgtacgagatcctgctgggcaaggccaccctgtacgccgtgctggtgtctgccctggtgctgatggctatggtcaagcggaaggacagccggggaagggccaagcgatctggatctggagcaacaaacttctcactactcaaacaagcaggtgacgtggaggagaatcccgggcctactagtatggactggatttggcgcatccttttccttgtcggcgctgctaccggcgcgcattccttcgaacaagttcagctggttcagagcggagccgaagtgaagaaacctggggcctctgtgaaggtgtcctgcaaagccagcggctacacctttaccagctactggatcaactgggtccgacaggcccctggacaaggactggaatggatgggacagatccttccaggcggaggggacaccaactacaacggcaagttcaagggcagagtgaccatcaccgccgacaccagcacaagcaccgcctacatggaactgagcagcctgagaagcgaggacaccgccgtgtattattgcaccagacgggtgcccatccggctggattattggggacagggaaccctggtcaccgtgtctagtacgcgtagccagcctcacaccaagcccagcgtgttcgtgatgaagaacggcaccaacgtggcctgcctcgtgaaagagttctaccccaaggacatcaggatcaacctggtgtccagcaagaagatcaccgagttcgaccccgccatcgtgatctcccccagcggcaagtacaacgccgtgaagctggggaagtatgaggacagcaacagcgtgacctgctccgtgcagcacgacaacaagaccgtgcacagcaccgactttgaagtgaaaaccgactccaccgaccacgtgaagcccaaagagacagagaacaccaagcagcccagcaagagctgccacaagcccaaggccatcgtgcacaccgagaaagtgaacatgatgagcctgaccgtgatcggcttcagaatcctgctgctgaaagtggccggctttaacctgctgatgaccctgcggctgtggtccagctaa

SEQ ID NO: 38135 - DNA, 1887 bp, synthetic construct
  source 1..1887: mol_type = other DNA
atggccttaccagtgaccgccttgctcctgccgctggccttgctgctccacgccgccaggccggacatcgtgatgacacagagccctgatagcctggccgtgtctctgggagagagagccaccattaactgcaaggccagccagagcgtggactacgacggcgacagcttcctgaactggtatcagcagaagcccggccagcctcctaagctgctgatctacgccgccagcaatctggaaagcggcgtgccaagcagattttccggctctggcagcggcaccgatttcaccctgacaatatccagcctccagcctgaggacgtggccgtgtactactgccagcagagcaacgacgaccctctgacctttggacagggcaccaaggtggaaatcaaactcgaggacaagcagctggacgccgacgtgtcccccaagcctaccatcttcctgccctctatcgccgagacaaagctccagaaggccggcacctacctgtgcctgctggaaaagttcttcccagatgtgattaagatccactggcaggaaaagaagtccaacaccatcctgggcagccaggaaggcaacaccatgaagaccaacgacacctacatgaagttcagctggctgaccgtgcccgagaagtccctggacaaagaacacagatgcatcgtgcggcacgaaaacaacaagaacggcgtggaccaggaaatcatcttcccacccatcaagaccgatgtgattacaatggaccccaaggacaactgctccaaggacgccaacgataccctgctgctccagctgaccaacaccagcgccaccatcctgtacgagatcctgctgggcaaggccaccctgtacgccgtgctggtgtctgccctggtgctgatggctatggtcaagcggaaggacagccggggaagggccaagcgatctggatctggagcaacaaacttctcactactcaaacaagcaggtgacgtggaggagaatcccgggcctactagtatggactggatttggcgcatccttttccttgtcggcgctgctaccggcgcgcattccttcgaacaagttcagctggttcagagcggagccgaagtgaagaaacctggggcctctgtgaaggtgtcctgcaaagccagcggctacacctttaccagctactggatcaactgggtccgacaggcccctggacaaggactggaatggatgggacagatccttccaggcggaggggacaccaactacaacggcaagttcaagggcagagtgaccatcaccgccgacaccagcacaagcaccgcctacatggaactgagcagcctgagaagcgaggacaccgccgtgtattattgcaccagacgggtgcccatccggctggattattggggacagggaaccctggtcaccgtgtctagtacgcgtagccagcctcacaccaagcccagcgtgttcgtgatgaagaacggcaccaacgtggcctgcctcgtgaaagagttctaccccaaggacatcaggatcaacctggtgtccagcaagaagatcaccgagttcgaccccgccatcgtgatctcccccagcggcaagtacaacgccgtgaagctggggaagtatgaggacagcaacagcgtgacctgctccgtgcagcacgacaacaagaccgtgcacagcaccgactttgaagtgaaaaccgactccaccgaccacgtgaagcccaaagagacagagaacaccaagcagcccagcaagagctgccacaagcccaaggccatcgtgcacaccgagaaagtgaacatgatgagcctgaccgtgatcggcttcagaatcctgctgctgaaagtggccggctttaacctgctgatgaccctgcggctgtggtccagctaa

SEQ ID NO: 38136 - DNA, 1887 bp, synthetic construct
  source 1..1887: mol_type = other DNA
atggccttaccagtgaccgccttgctcctgccgctggccttgctgctccacgccgccaggccggacatcgtgatgacacagagccctgatagcctggccgtgtctctgggagagagagccaccattaactgcaaggccagccagagcgtggactacgacggcgacagcttcctgaactggtatcagcagaagcccggccagcctcctaagctgctgatctacgccgccagcaatctggaaagcggcgtgccaagcagattttccggctctggcagcggcaccgatttcaccctgacaatatccagcctccagcctgaggacgtggccgtgtactactgccagcagagcaacgacgaccctctgacctttggacagggcaccaaggtggaaatcaaactcgaggacaagcagctggacgccgacgtgtcccccaagcctaccatcttcctgccctctatcgccgagacaaagctccagaaggccggcacctacctgtgcctgctggaaaagttcttcccagatgtgattaagatccactggcaggaaaagaagtccaacaccatcctgggcagccaggaaggcaacaccatgaagaccaacgacacctacatgaagttcagctggctgaccgtgcccgagaagtccctggacaaagaacacagatgcatcgtgcggcacgaaaacaacaagaacggcgtggaccaggaaatcatcttcccacccatcaagaccgatgtgattacaatggaccccaaggacaactgctccaaggacgccaacgataccctgctgctccagctgaccaacaccagcgcctactacatgtacgagatcctgctgggcaaggccaccctgtacgccgtgctggtgtctgccctggtgctgatggctatggtcaagcggaaggacagccggggaagggccaagcgatctggatctggagcaacaaacttctcactactcaaacaagcaggtgacgtggaggagaatcccgggcctactagtatggactggatttggcgcatccttttccttgtcggcgctgctaccggcgcgcattccttcgaacaagttcagctggttcagagcggagccgaagtgaagaaacctggggcctctgtgaaggtgtcctgcaaagccagcggctacacctttaccagctactggatcaactgggtccgacaggcccctggacaaggactggaatggatgggacagatccttccaggcggaggggacaccaactacaacggcaagttcaagggcagagtgaccatcaccgccgacaccagcacaagcaccgcctacatggaactgagcagcctgagaagcgaggacaccgccgtgtattattgcaccagacgggtgcccatccggctggattattggggacagggaaccctggtcaccgtgtctagtacgcgtagccagcctcacaccaagcccagcgtgttcgtgatgaagaacggcaccaacgtggcctgcctcgtgaaagagttctaccccaaggacatcaggatcaacctggtgtccagcaagaagatcaccgagttcgaccccgccatcgtgatctcccccagcggcaagtacaacgccgtgaagctggggaagtacgaggacagcaacagcgtgacctgctccgtgcagcacgacaacaagaccgtgcacagcaccgactttgaagtgaaaaccgactccaccgaccacgtgaagcccaaagagacagagaacaccaagcagcccagcaagagctgccacaagcccaaggccatcgtgcacaccgagaaagtgaacatgatgagcctgaccgtgctgggcttcagaatcctgctgctgaaagtggccggctttaacctgctgatgaccctgcggctgtggtccagctaa

SEQ ID NO: 38137 - DNA, 1887 bp, synthetic construct
  source 1..1887: mol_type = other DNA
atggccttaccagtgaccgccttgctcctgccgctggccttgctgctccacgccgccaggccggacatcgtgatgacacagagccctgatagcctggccgtgtctctgggagagagagccaccattaactgcaaggccagccagagcgtggactacgacggcgacagcttcctgaactggtatcagcagaagcccggccagcctcctaagctgctgatctacgccgccagcaatctggaaagcggcgtgccaagcagattttccggctctggcagcggcaccgatttcaccctgacaatatccagcctccagcctgaggacgtggccgtgtactactgccagcagagcaacgacgaccctctgacctttggacagggcaccaaggtggaaatcaaactcgaggacaagcagctggacgccgacgtgtcccccaagcctaccatcttcctgccctctatcgccgagacaaagctccagaaggccggcacctacctgtgcctgctggaaaagttcttcccagatgtgattaagatccactggcaggaaaagaagtccaacaccatcctgggcagccaggaaggcaacaccatgaagaccaacgacacctacatgaagttcagctggctgaccgtgcccgagaagtccctggacaaagaacacagatgcatcgtgcggcacgaaaacaacaagaacggcgtggaccaggaaatcatcttcccacccatcaagaccgatgtgattacaatggaccccaaggacaactgctccaaggacgccaacgataccctgctgctccagctgaccaacaccagcgccaccatcctgtacgagatcctgctgggcaaggccaccctgtacgccgtgctggtgtctgccctggtgctgatggctatggtcaagcggaaggacagccggggaagggccaagcgatctggatctggagcaacaaacttctcactactcaaacaagcaggtgacgtggaggagaatcccgggcctactagtatggactggatttggcgcatccttttccttgtcggcgctgctaccggcgcgcattccttcgaacaagttcagctggttcagagcggagccgaagtgaagaaacctggggcctctgtgaaggtgtcctgcaaagccagcggctacacctttaccagctactggatcaactgggtccgacaggcccctggacaaggactggaatggatgggacagatccttccaggcggaggggacaccaactacaacggcaagttcaagggcagagtgaccatcaccgccgacaccagcacaagcaccgcctacatggaactgagcagcctgagaagcgaggacaccgccgtgtattattgcaccagacgggtgcccatccggctggattattggggacagggaaccctggtcaccgtgtctagtacgcgtagccagcctcacaccaagcccagcgtgttcgtgatgaagaacggcaccaacgtggcctgcctcgtgaaagagttctaccccaaggacatcaggatcaacctggtgtccagcaagaagatcaccgagttcgaccccgccatcgtgatctcccccagcggcaagtacaacgccgtgaagctggggaagtacgaggacagcaacagcgtgacctgctccgtgcagcacgacaacaagaccgtgcacagcaccgactttgaagtgaaaaccgactccaccgaccacgtgaagcccaaagagacagagaacaccaagcagcccagcaagagctgccacaagcccaaggccatcgtgcacaccgagaaagtgaacatgatgagcctgaccgtgctgggcttcagaatcctgctgctgaaagtggccggctttaacctgctgatgaccctgcggctgtggtccagctaa

SEQ ID NO: 38138 - DNA, 1869 bp, synthetic construct
  source 1..1869: mol_type = other DNA
atggccttaccagtgaccgccttgctcctgccgctggccttgctgctccacgccgccaggccggacatcgtgatgacacagagccctgatagcctggccgtgtctctgggagagagagccaccattaactgcaaggccagccagagcgtggactacgacggcgacagcttcctgaactggtatcagcagaagcccggccagcctcctaagctgctgatctacgccgccagcaatctggaaagcggcgtgccaagcagattttccggctctggcagcggcaccgatttcaccctgacaatatccagcctccagcctgaggacgtggccgtgtactactgccagcagagcaacgacgaccctctgacctttggacagggcaccaaggtggaaatcaaactcgaggacctgaagaacgtgttcccacctgaggtggccgtgttcgagcctagcgaggccgagatcagccacacccagaaagccaccctcgtgtgcctggctaccggcttctaccccgaccatgtggaactgtcttggtgggtcaacggcaaagaggtgcacagcggcgtgtgtaccgacccccagccactgaaagaacagcccgccctgaacgacagccggtactgcctgagcagcagactgagagtgtccgccaccttctggcagaacccccggaaccacttcagatgccaggtgcagttctacggcctgagcgagaacgacgagtggacccaggacagagccaagcccgtgacccagatcgtgtctgccgaagcctggggcagagccgattgcggctttaccagcgagagctaccagcagggcgtgctgagcgccaccatcctgtacttgttgctgctgctgaagtccgtggtgtacttcgccatcatcacatgctgcctgctgcggagaaccgccttctgctgcaacggcgagaagtctagggccaagcgatctggatctggagcaacaaacttctcactactcaaacaagcaggtgacgtggaggagaatcccgggcctactagtatggactggatttggcgcatccttttccttgtcggcgctgctaccggcgcgcattccttcgaacaagttcagctggttcagagcggagccgaagtgaagaaacctggggcctctgtgaaggtgtcctgcaaagccagcggctacacctttaccagctactggatcaactgggtccgacaggcccctggacaaggactggaatggatgggacagatccttccaggcggaggggacaccaactacaacggcaagttcaagggcagagtgaccatcaccgccgacaccagcacaagcaccgcctacatggaactgagcagcctgagaagcgaggacaccgccgtgtattattgcaccagacgggtgcccatccggctggattattggggacagggaaccctggtcaccgtgtctagtacgcgtatccagaaccctgatcctgccgtgtaccagctgcgggatagcaagagcagcgacaagagcgtgtgtctgttcaccgacttcgacagccagaccaacgtgtcccagagcaaggactccgacgtgtacatcaccgataagtgcgtgctggacatgcggagcatggacttcaagagcaactccgccgtggcctggtccaacaagtccgatttcgcctgcgccaacgccttcaacaacagcattatccccgaggacacattcttcccaagccccgagagcagctgcgacgtgaagctggtggaaaagagcttcgagacagacaccaacctgaacttccagaacctgagcgtgatcggcctgcggatgctgttcgccaaaaccgtggccgtgaacttcctgctgaccgccaagctgttcttcctctaa

SEQ ID NO: 38139 - DNA, 1956 bp, synthetic construct
  source 1..1956: mol_type = other DNA
atggccttaccagtgaccgccttgctcctgccgctggccttgctgctccacgccgccaggccggacatcgtgatgacacagagccctgatagcctggccgtgtctctgggagagagagccaccattaactgcaaggccagccagagcgtggactacgacggcgacagcttcctgaactggtatcagcagaagcccggccagcctcctaagctgctgatctacgccgccagcaatctggaaagcggcgtgccaagcagattttccggctctggcagcggcaccgatttcaccctgacaatatccagcctccagcctgaggacgtggccgtgtactactgccagcagagcaacgacgaccctctgacctttggacagggcaccaaggtggaaatcaaactcgaggacctgaagaacgtgttcccacctgaggtggccgtgttcgagcctagcgaggccgagatcagccacacccagaaagccaccctcgtgtgcctggctaccggcttctaccccgaccatgtggaactgtcttggtgggtcaacggcaaagaggtgcacagcggcgtgtctaccgacccccagccactgaaagaacagcccgccctgaacgacagccggtactgcctgagcagcagactgagagtgtccgccaccttctggcagaacccccggaaccacttcagatgccaggtgcagttctacggcctgagcgagaacgacgagtggacccaggacagagccaagcccgtgacccagatcgtgtctgccgaagcctggggcagagccgattgcggatcctccaaggacgccaacgataccctgctgctccagctgaccaacaccagcgcctactacatgtacttgttgctgctgctgaagtccgtggtgtacttcgccatcatcacatgctgcctgctgcggagaaccgccttctgctgcaacggcgagaagtctagggccaagcgatctggatctggagcaacaaacttctcactactcaaacaagcaggtgacgtggaggagaatcccgggcctactagtatggactggatttggcgcatccttttccttgtcggcgctgctaccggcgcgcattccttcgaacaagttcagctggttcagagcggagccgaagtgaagaaacctggggcctctgtgaaggtgtcctgcaaagccagcggctacacctttaccagctactggatcaactgggtccgacaggcccctggacaaggactggaatggatgggacagatccttccaggcggaggggacaccaactacaacggcaagttcaagggcagagtgaccatcaccgccgacaccagcacaagcaccgcctacatggaactgagcagcctgagaagcgaggacaccgccgtgtattattgcaccagacgggtgcccatccggctggattattggggacagggaaccctggtcaccgtgtctagtacgcgtatccagaaccctgatcctgccgtgtaccagctgcgggatagcaagagcagcgacaagagcgtgtgtctgttcaccgacttcgacagccagaccaacgtgtcccagagcaaggactccgacgtgtacatcaccgataagaccgtgctggacatgcggagcatggacttcaagagcaactccgccgtggcctggtccaacaagtccgatttcgcctgcgccaacgccttcaacaacagcattatccccgaggacacattcttcccaagccccgagagcagctgcggtaccgaagtgaaaaccgactccaccgaccacgtgaagcccaaagagacagagaacaccaagcagcccagcaagagctgccacaagcccaaggccatcgtgcacaccgagaaagtgaacatgatgagcctgaccgtgctgggcctgcggatgctgttcgccaaaaccgtggccgtgaacttcctgctgaccgccaagctgttcttcctctaa

SEQ ID NO: 38140 - DNA, 1866 bp, synthetic construct
  source 1..1866: mol_type = other DNA
atggccttaccagtgaccgccttgctcctgccgctggccttgctgctccacgccgccaggccggacatcgtgatgacacagagccctgatagcctggccgtgtctctgggagagagagccaccattaactgcaaggccagccagagcgtggactacgacggcgacagcttcctgaactggtatcagcagaagcccggccagcctcctaagctgctgatctacgccgccagcaatctggaaagcggcgtgccaagcagattttccggctctggcagcggcaccgatttcaccctgacaatatccagcctccagcctgaggacgtggccgtgtactactgccagcagagcaacgacgaccctctgacctttggacagggcaccaaggtggaaatcaaactcgaggacctgaagaacgtgttcccacctgaggtggccgtgttcgagcctagcgaggccgagatcagccacacccagaaagccaccctcgtgtgcctggctaccggcttctaccccgaccatgtggaactgtcttggtgggtcaacggcaaagaggtgcacagcggcgtgtgtaccgacccccagccactgaaagaacagcccgccctgaacgacagccggtactgcctgagcagcagactgagagtgtccgccaccttctggcagaacccccggaaccacttcagatgccaggtgcagttctacggcctgagcgagaacgacgagtggacccaggacagagccaagcccgtgacccagatcgtgtctgccgaagcctggggcagagccgattgcgacgtgaagctggtggaaaagagcttcgagacagacaccaacctgaacttccagaacctgagcgtgatcggcttcagaatcctgctgctgaaagtggccggctttaacctgctgatgaccctgcggctgtggtccagcagggccaagcgatctggatctggagcaacaaacttctcactactcaaacaagcaggtgacgtggaggagaatcccgggcctactagtatggactggatttggcgcatccttttccttgtcggcgctgctaccggcgcgcattccttcgaacaagttcagctggttcagagcggagccgaagtgaagaaacctggggcctctgtgaaggtgtcctgcaaagccagcggctacacctttaccagctactggatcaactgggtccgacaggcccctggacaaggactggaatggatgggacagatccttccaggcggaggggacaccaactacaacggcaagttcaagggcagagtgaccatcaccgccgacaccagcacaagcaccgcctacatggaactgagcagcctgagaagcgaggacaccgccgtgtattattgcaccagacgggtgcccatccggctggattattggggacagggaaccctggtcaccgtgtctagtacgcgtatccagaaccctgatcctgccgtgtaccagctgcgggatagcaagagcagcgacaagagcgtgtgtctgttcaccgacttcgacagccagaccaacgtgtcccagagcaaggactccgacgtgtacatcaccgataagtgcgtgctggacatgcggagcatggacttcaagagcaactccgccgtggcctggtccaacaagtccgatttcgcctgcgccaacgccttcaacaacagcattatccccgaggacacattcttcccaagccccgagagcagctgcggctttaccagcgagagctaccagcagggcgtgctgagcgccaccatcctgtacgagatcctgctgggcaaggccaccctgtacgccgtgctggtgtctgccctggtgctgatggctatggtcaagcggaaggacagccggggataa

SEQ ID NO: 38141 - DNA, 1866 bp, synthetic construct
  source 1..1866: mol_type = other DNA
atggccttaccagtgaccgccttgctcctgccgctggccttgctgctccacgccgccaggccggacatcgtgatgacacagagccctgatagcctggccgtgtctctgggagagagagccaccattaactgcaaggccagccagagcgtggactacgacggcgacagcttcctgaactggtatcagcagaagcccggccagcctcctaagctgctgatctacgccgccagcaatctggaaagcggcgtgccaagcagattttccggctctggcagcggcaccgatttcaccctgacaatatccagcctccagcctgaggacgtggccgtgtactactgccagcagagcaacgacgaccctctgacctttggacagggcaccaaggtggaaatcaaactcgaggacctgaagaacgtgttcccacctgaggtggccgtgttcgagcctagcgaggccgagatcagccacacccagaaagccaccctcgtgtgcctggctaccggcttctaccccgaccatgtggaactgtcttggtgggtcaacggcaaagaggtgcacagcggcgtgtgtaccgacccccagccactgaaagaacagcccgccctgaacgacagccggtactgcctgagcagcagactgagagtgtccgccaccttctggcagaacccccggaaccacttcagatgccaggtgcagttctacggcctgagcgagaacgacgagtggacccaggacagagccaagcccgtgacccagatcgtgtctgccgaagcctggggcagagccgattgcggctttaccagcgagagctaccagcagggcgtgctgagcgccaccaacctgagcgtgatcggcttcagaatcctgctgctgaaagtggccggctttaacctgctgatgaccctgcggctgtggtccagcagggccaagcgatctggatctggagcaacaaacttctcactactcaaacaagcaggtgacgtggaggagaatcccgggcctactagtatggactggatttggcgcatccttttccttgtcggcgctgctaccggcgcgcattccttcgaacaagttcagctggttcagagcggagccgaagtgaagaaacctggggcctctgtgaaggtgtcctgcaaagccagcggctacacctttaccagctactggatcaactgggtccgacaggcccctggacaaggactggaatggatgggacagatccttccaggcggaggggacaccaactacaacggcaagttcaagggcagagtgaccatcaccgccgacaccagcacaagcaccgcctacatggaactgagcagcctgagaagcgaggacaccgccgtgtattattgcaccagacgggtgcccatccggctggattattggggacagggaaccctggtcaccgtgtctagtacgcgtatccagaaccctgatcctgccgtgtaccagctgcgggatagcaagagcagcgacaagagcgtgtgtctgttcaccgacttcgacagccagaccaacgtgtcccagagcaaggactccgacgtgtacatcaccgataagtgcgtgctggacatgcggagcatggacttcaagagcaactccgccgtggcctggtccaacaagtccgatttcgcctgcgccaacgccttcaacaacagcattatccccgaggacacattcttcccaagccccgagagcagctgcgacgtgaagctggtggaaaagagcttcgagacagacaccaacctgaacttccagatcctgtacgagatcctgctgggcaaggccaccctgtacgccgtgctggtgtctgccctggtgctgatggctatggtcaagcggaaggacagccggggataa

SEQ ID NO: 38142 - DNA, 1866 bp, synthetic construct; identical to SEQ ID NO: 38140
  source 1..1866: mol_type = other DNA

SEQ ID NO: 38143 - DNA, 1866 bp, synthetic construct; identical to SEQ ID NO: 38141
  source 1..1866: mol_type = other DNA

SEQ ID NO: 38144 - DNA, 1863 bp, synthetic construct
  source 1..1863: mol_type = other DNA
atggccttaccagtgaccgccttgctcctgccgctggccttgctgctccacgccgccaggccggacatcgtgatgacacagagccctgatagcctggccgtgtctctgggagagagagccaccattaactgcaaggccagccagagcgtggactacgacggcgacagcttcctgaactggtatcagcagaagcccggccagcctcctaagctgctgatctacgccgccagcaatctggaaagcggcgtgccaagcagattttccggctctggcagcggcaccgatttcaccctgacaatatccagcctccagcctgaggacgtggccgtgtactactgccagcagagcaacgacgaccctctgacctttggacagggcaccaaggtggaaatcaaactcgaggacctgaagaacgtgttcccacctgaggtggccgtgttcgagcctagcgaggccgagatcagccacacccagaaagccaccctcgtgtgcctggctaccggcttctaccccgaccatgtggaactgtcttggtgggtcaacggcaaagaggtgcacagcggcgtgtgtaccgacccccagccactgaaagaacagcccgccctgaacgacagccggtactgcctgagcagcagactgagagtgtccgccaccttctggcagaacccccggaaccacttcagatgccaggtgcagttctacggcctgagcgagaacgacgagtggacccaggacagagccaagcccgtgacccagatcgtgtctgccgaagcctggggcagagccgattgcgacgtgaagctggtggaaaagagcttcgagacagacaccaacctgaacttccagaacctgagcgtgatcggcttcagaatcctgctgctgaaagtggccggctttaacctgctgatgaccctgcggctgtggtccagcagggccaagcgatctggatctggagcaacaaacttctcactactcaaacaagcaggtgacgtggaggagaatcccgggcctactagtatggactggatttggcgcatccttttccttgtcggcgctgctaccggcgcgcattccttcgaacaagttcagctggttcagagcggagccgaagtgaagaaacctggggcctctgtgaaggtgtcctgcaaagccagcggctacacctttaccagctactggatcaactgggtccgacaggcccctggacaaggactggaatggatgggacagatccttccaggcggaggggacaccaactacaacggcaagttcaagggcagagtgaccatcaccgccgacaccagcacaagcaccgcctacatggaactgagcagcctgagaagcgaggacaccgccgtgtattattgcaccagacgggtgcccatccggctggattattggggacagggaaccctggtcaccgtgtctagtacgcgtatccagaaccctgatcctgccgtgtaccagctgcgggatagcaagagcagcgacaagagcgtgtgtctgttcaccgacttcgacagccagaccaacgtgtcccagagcaaggactccgacgtgtacatcaccgataagtgcgtgctggacatgcggagcatggacttcaagagcaactccgccgtggcctggtccaacaagtccgatttcgcctgcgccaacgccttcaacaacagcattatccccgaggacacattcttcccaagccccgagagcagctgcggctttaccagcgagagctaccagcagggcgtgctgagcgccaccatcctgtacgagatcctgctgggcaaggccaccctgtacgccgtgctggtgtctgccctggtgctgatggctatggtcaagcggaaggacagccgggga

SEQ ID NO: 38145 - DNA, 1875 bp, synthetic construct
  source 1..1875: mol_type = other DNA
atggccttaccagtgaccgccttgctcctgccgctggccttgctgctccacgccgccaggccggacatcgtgatgacacagagccctgatagcctggccgtgtctctgggagagagagccaccattaactgcaaggccagccagagcgtggactacgacggcgacagcttcctgaactggtatcagcagaagcccggccagcctcctaagctgctgatctacgccgccagcaatctggaaagcggcgtgccaagcagattttccggctctggcagcggcaccgatttcaccctgacaatatccagcctccagcctgaggacgtggccgtgtactactgccagcagagcaacgacgaccctctgacctttggacagggcaccaaggtggaaatcaaactcgaggccgacgtgtcccccaagcctaccatcttcctgccctctatcgccgagacaaagctccagaaggccggcacctacctgtgcctgctggaaaagttcttcccagatgtgattaagatccactggcaggaaaagaagtccaacaccatcctgggcagccaggaaggcaacaccatgaagaccaacgacacctacatgaagttcagctggctgaccgtgcccgagaagtccctggacaaagaacacagatgcatcgtgcggcacgaaaacaacaagaacggcgtggaccaggaaatcatcttcccacccatcaagaccgatgtgattacaatggaccccaaggacaactgctccaaggacgccaacgataccctgctgctccagctgaccaacaccagcgcctactacatgtacttgttgctgctgctgaagtccgtggtgtacttcgccatcatcacatgctgcctgctgcggagaaccgccttctgctgcaacggcgagaagtctagggccaagcgatctggatctggagcaacaaacttctcactactcaaacaagcaggtgacgtggaggagaatcccgggcctactagtatggactggatttggcgcatccttttccttgtcggcgctgctaccggcgcgcattccttcgaacaagttcagctggttcagagcggagccgaagtgaagaaacctggggcctctgtgaaggtgtcctgcaaagccagcggctacacctttaccagctactggatcaactgggtccgacaggcccctggacaaggactggaatggatgggacagatccttccaggcggaggggacaccaactacaacggcaagttcaagggcagagtgaccatcaccgccgacaccagcacaagcaccgcctacatggaactgagcagcctgagaagcgaggacaccgccgtgtattattgcaccagacgggtgcccatccggctggattattggggacagggaaccctggtcaccgtgtctagtacgcgtagccagcctcacaccaagcccagcgtgttcgtgatgaagaacggcaccaacgtggcctgcctcgtgaaagagttctaccccaaggacatcaggatcaacctggtgtccagcaagaagatcaccgagttcgaccccgccatcgtgatctcccccagcggcaagtacaacgccgtgaagctggggaagtatgaggacagcaacagcgtgacctgctccgtgcagcacgacaacaagaccgtgcacagcaccgactttgaagtgaaaaccgactccaccgaccacgtgaagcccaaagagacagagaacaccaagcagcccagcaagagctgccacaagcccaaggccatcgtgcacaccgagaaagtgaacatgatgagcctgaccgtgatcggcttcagaatcctgctgctgaaagtggccggctttaacctgctgatgaccctgcggctgtggtccagctaa

SEQ ID NO: 38146 - DNA, 1875 bp, synthetic construct
  source 1..1875: mol_type = other DNA
atggccttaccagtgaccgccttgctcctgccgctggccttgctgctccacgccgccaggccggacatcgtgatgacacagagccctgatagcctggccgtgtctctgggagagagagccaccattaactgcaaggccagccagagcgtggactacgacggcgacagcttcctgaactggtatcagcagaagcccggccagcctcctaagctgctgatctacgccgccagcaatctggaaagcggcgtgccaagcagattttccggctctggcagcggcaccgatttcaccctgacaatatccagcctccagcctgaggacgtggccgtgtactactgccagcagagcaacgacgaccctctgacctttggacagggcaccaaggtggaaatcaaactcgaggccgacgtgtcccccaagcctaccatcttcctgccctctatcgccgagacaaagctccagaaggccggcacctacctgtgcctgctggaaaagttcttcccagatgtgattaagatccactggcaggaaaagaagtccaacaccatcctgggcagccaggaaggcaacaccatgaagaccaacgacacctacatgaagttcagctggctgaccgtgcccgagaagtccctggacaaagaacacagatgcatcgtgcggcacgaaaacaacaagaacggcgtggaccaggaaatcatcttcccacccatcaagaccgatgtgattacaatggaccccaaggacaactgctccaaggacgccaacgataccctgctgctccagctgaccaacaccagcgcctactacatgtacttgttgctgctgctgaagtccgtggtgtacttcgccatcatcacatgctgcctgctgcggagaaccgccttctgctgcaacggcgagaagtctagggccaagcgatctggatctggagcaacaaacttctcactactcaaacaagcaggtgacgtggaggagaatcccgggcctactagtatggactggatttggcgcatccttttccttgtcggcgctgctaccggcgcgcattccttcgaacaagttcagctggttcagagcggagccgaagtgaagaaacctggggcctctgtgaaggtgtcctgcaaagccagcggctacacctttaccagctactggatcaactgggtccgacaggcccctggacaaggactggaatggatgggacagatccttccaggcggaggggacaccaactacaacggcaagttcaagggcagagtgaccatcaccgccgacaccagcacaagcaccgcctacatggaactgagcagcctgagaagcgaggacaccgccgtgtattattgcaccagacgggtgcccatccggctggattattggggacagggaaccctggtcaccgtgtctagtacgcgtagccagcctcacaccaagcccagcgtgttcgtgatgaagaacggcaccaacgtggcctgcctcgtgaaagagttctaccccaaggacatcaggatcaacctggtgtccagcaagaagatcaccgagttcgaccccgccatcgtgatctcccccagcggcaagtacaacgccgtgaagctggggaagtacgaggacagcaacagcgtgacctgctccgtgcagcacgacaacaagaccgtgcacagcaccgactttgaagtgaaaaccgactccaccgaccacgtgaagcccaaagagacagagaacaccaagcagcccagcaagagctgccacaagcccaaggccatcgtgcacaccgagaaagtgaacatgatgagcctgaccgtgctgggcttcagaatcctgctgctgaaagtggccggctttaacctgctgatgaccctgcggctgtggtccagctaa

SEQ ID NO: 38147 - DNA, 1863 bp, synthetic construct; identical to SEQ ID NO: 38144
  source 1..1863: mol_type = other DNA

SEQ ID NO: 38148 - DNA, 1875 bp, synthetic construct
  source 1..1875: mol_type = other DNA
atggccttaccagtgaccgccttgctcctgccgctggccttgctgctccacgccgccaggccggacatcgtgatgacacagagccctgatagcctggccgtgtctctgggagagagagccaccattaactgcaaggccagccagagcgtggactacgacggcgacagcttcctgaactggtatcagcagaagcccggccagcctcctaagctgctgatctacgccgccagcaatctggaaagcggcgtgccaagcagattttccggctctggcagcggcaccgatttcaccctgacaatatccagcctccagcctgaggacgtggccgtgtactactgccagcagagcaacgacgaccctctgacctttggacagggcaccaaggtggaaatcaaactcgagatccagaaccctgatcctgccgtgtaccagctgcgggatagcaagagcagcgacaagagcgtgtgtctgttcaccgacttcgacagccagaccaacgtgtcccagagcaaggactccgacgtgtacatcaccgataagtgcgtgctggacatgcggagcatggacttcaagagcaactccgccgtggcctggtccaacaagtccgatttcgcctgcgccaacgccttcaacaacagcattatccccgaggacacattcttcccaagccccgagagcagctgcggctttaccagcgagagctaccagcagggcgtgctgagcgccaccatcctgtacgagatcctgctgggcaaggccaccctgtacgccgtgctggtgtctgccctggtgctgatggctatggtcaagcggaaggacagccggggacgcgccaagagaagcggatctggcgtgaagcagaccctgaatttcgacctgctgaagctggctggcgacgtggaatccaacccaggccctactagtatggactggatttggcgcatccttttccttgtcggcgctgctaccggcgcgcattccttcgaacaagttcagctggttcagagcggagccgaagtgaagaaacctggggcctctgtgaaggtgtcctgcaaagccagcggctacacctttaccagctactggatcaactgggtccgacaggcccctggacaaggactggaatggatgggacagatccttccaggcggaggggacaccaactacaacggcaagttcaagggcagagtgaccatcaccgccgacaccagcacaagcaccgcctacatggaactgagcagcctgagaagcgaggacaccgccgtgtattattgcaccagacgggtgcccatccggctggattattggggacagggaaccctggtcaccgtgtctagtacgcgtgaggacctgaagaacgtgttcccacctgaggtggccgtgttcgagcctagcgaggccgagatcagccacacccagaaagccaccctcgtgtgcctggctaccggcttctaccccgaccatgtggaactgtcttggtgggtcaacggcaaagaggtgcacagcggcgtgtgtaccgacccccagccactgaaagaacagcccgccctgaacgacagccggtactgcctgagcagcagactgagagtgtccgccaccttctggcagaacccccggaaccacttcagatgccaggtgcagttctacggcctgagcgagaacgacgagtggacccaggacagagccaagcccgtgacccagatcgtgtctgccgaagcctggggcagagccgattgcgacgtgaagctggtggaaaagagcttcgagacagacaccaacctgaacttccagaacctgagcgtgatcggcttcagaatcctgctgctgaaagtggccggctttaacctgctgatgaccctgcggctgtggtccagc

SEQ ID NO: 38149 - DNA, 2268 bp, synthetic construct
  source 1..2268: mol_type = other DNA
atggccttaccagtgaccgccttgctcctgccgctggccttgctgctccacgccgccaggccggaagtgcagctggttgaatctggcggaggactggttcagcctggcggatctctgagactgtcttgtgccgccagcggcttcagcttcagcgacttttggatgagctgggtccgacaggcccctggcaaaggacttgaatgggtcgccacaatcagccaggccggcagcgagaaggactacgtggactctgtgaagggcagattcaccatcagccgggacaacgccaagaagtccctgtacctccagatgaacagcctgagagccgaggacaccgccgtgtactattgtgcctctggcgtgtacagcttcgactacagaggccagggcaccctggtcacagtctcttctggtaccggcggaggcggatctggcggcggaggtagcggtggcggaggatctgaattcgacatcgtgatgacacagagccctgatagcctggccgtgtctctgggagagagagccaccattaactgcaaggccagccagagcgtggactacgacggcgacagcttcctgaactggtatcagcagaagcccggccagcctcctaagctgctgatctacgccgccagcaatctggaaagcggcgtgccaagcagattttccggctctggcagcggcaccgatttcaccctgacaatatccagcctccagcctgaggacgtggccgtgtactactgccagcagagcaacgacgaccctctgacctttggacagggcaccaaggtggaaatcaaactcgaggacctgaagaacgtgttcccacctgaggtggccgtgttcgagcctagcgaggccgagatcagccacacccagaaagccaccctcgtgtgcctggctaccggcttctaccccgaccatgtggaactgtcttggtgggtcaacggcaaagaggtgcacagcggcgtgtgtaccgacccccagccactgaaagaacagcccgccctgaacgacagccggtactgcctgagcagcagactgagagtgtccgccaccttctggcagaacccccggaaccacttcagatgccaggtgcagttctacggcctgagcgagaacgacgagtggacccaggacagagccaagcccgtgacccagatcgtgtctgccgaagcctggggcagagccgattgcgacgtgaagctggtggaaaagagcttcgagacagacaccaacctgaacttccagaacctgagcgtgatcggcttcagaatcctgctgctgaaagtggccggctttaacctgctgatgaccctgcggctgtggtccagcagggccaagcgatctggatctggagcaacaaacttctcactactcaaacaagcaggtgacgtggaggagaatcccgggcctactagtatggactggatttggcgcatccttttccttgtcggcgctgctaccggcgcgcattccttcgaacaagttcagctggttcagagcggagccgaagtgaagaaacctggggcctctgtgaaggtgtcctgcaaagccagcggctacacctttaccagctactggatcaactgggtccgacaggcccctggacaaggactggaatggatgggacagatccttccaggcggaggggacaccaactacaacggcaagttcaagggcagagtgaccatcaccgccgacaccagcacaagcaccgcctacatggaactgagcagcctgagaagcgaggacaccgccgtgtattattgcaccagacgggtgcccatccggctggattattggggacagggaaccctggtcaccgtgtctagtacgcgtatccagaaccctgatcctgccgtgtaccagctgcgggatagcaagagcagcgacaagagcgtgtgtctgttcaccgacttcgacagccagaccaacgtgtcccagagcaaggactccgacgtgtacatcaccgataagtgcgtgctggacatgcggagcatggacttcaagagcaactccgccgtggcctggtccaacaagtccgatttcgcctgcgccaacgccttcaacaacagcattatccccgaggacacattcttcccaagccccgagagcagctgcggctttaccagcgagagctaccagcagggcgtgctgagcgccaccatcctgtacgagatcctgctgggcaaggccaccctgtacgccgtgctggtgtctgccctggtgctgatggctatggtcaagcggaaggacagccgggga

SEQ ID NO: 38150 - DNA, 2280 bp, synthetic construct
  source 1..2280: mol_type = other DNA
atggccttaccagtgaccgccttgctcctgccgctggccttgctgctccacgccgccaggccggaagtgcagctggttgaatctggcggaggactggttcagcctggcggatctctgagactgtcttgtgccgccagcggcttcagcttcagcgacttttggatgagctgggtccgacaggcccctggcaaaggacttgaatgggtcgccacaatcagccaggccggcagcgagaaggactacgtggactctgtgaagggcagattcaccatcagccgggacaacgccaagaagtccctgtacctccagatgaacagcctgagagccgaggacaccgccgtgtactattgtgcctctggcgtgtacagcttcgactacagaggccagggcaccctggtcacagtctcttctggtaccggcggaggcggatctggcggcggaggtagcggtggcggaggatctgaattcgacatcgtgatgacacagagccctgatagcctggccgtgtctctgggagagagagccaccattaactgcaaggccagccagagcgtggactacgacggcgacagcttcctgaactggtatcagcagaagcccggccagcctcctaagctgctgatctacgccgccagcaatctggaaagcggcgtgccaagcagattttccggctctggcagcggcaccgatttcaccctgacaatatccagcctccagcctgaggacgtggccgtgtactactgccagcagagcaacgacgaccctctgacctttggacagggcaccaaggtggaaatcaaactcgagatccagaaccctgatcctgccgtgtaccagctgcgggatagcaagagcagcgacaagagcgtgtgtctgttcaccgacttcgacagccagaccaacgtgtcccagagcaaggactccgacgtgtacatcaccgataagtgcgtgctggacatgcggagcatggacttcaagagcaactccgccgtggcctggtccaacaagtccgatttcgcctgcgccaacgccttcaacaacagcattatccccgaggacacattcttcccaagccccgagagcagctgcggctttaccagcgagagctaccagcagggcgtgctgagcgccaccatcctgtacgagatcctgctgggcaaggccaccctgtacgccgtgctggtgtctgccctggtgctgatggctatggtcaagcggaaggacagccggggacgcgccaagagaagcggatctggcgtgaagcagaccctgaatttcgacctgctgaagctggctggcgacgtggaatccaacccaggccctactagtatggactggatttggcgcatccttttccttgtcggcgctgctaccggcgcgcattccttcgaacaagttcagctggttcagagcggagccgaagtgaagaaacctggggcctctgtgaaggtgtcctgcaaagccagcggctacacctttaccagctactggatcaactgggtccgacaggcccctggacaaggactggaatggatgggacagatccttccaggcggaggggacaccaactacaacggcaagttcaagggcagagtgaccatcaccgccgacaccagcacaagcaccgcctacatggaactgagcagcctgagaagcgaggacaccgccgtgtattattgcaccagacgggtgcccatccggctggattattggggacagggaaccctggtcaccgtgtctagtacgcgtgaggacctgaagaacgtgttcccacctgaggtggccgtgttcgagcctagcgaggccgagatcagccacacccagaaagccaccctcgtgtgcctggctaccggcttctaccccgaccatgtggaactgtcttggtgggtcaacggcaaagaggtgcacagcggcgtgtgtaccgacccccagccactgaaagaacagcccgccctgaacgacagccggtactgcctgagcagcagactgagagtgtccgccaccttctggcagaacccccggaaccacttcagatgccaggtgcagttctacggcctgagcgagaacgacgagtggacccaggacagagccaagcccgtgacccagatcgtgtctgccgaagcctggggcagagccgattgcgacgtgaagctggtggaaaagagcttcgagacagacaccaacctgaacttccagaacctgagcgtgatcggcttcagaatcctgctgctgaaagtggccggctttaacctgctgatgaccctgcggctgtggtccagc

SEQ ID NO: 38151 - DNA, 2679 bp, synthetic construct
  source 1..2679: mol_type = other DNA
atggccttaccagtgaccgccttgctcctgccgctggccttgctgctccacgccgccaggccggaagtgcagctggttgaatctggcggaggactggttcagcctggcggatctctgagactgtcttgtgccgccagcggcttcagcttcagcgacttttggatgagctgggtccgacaggcccctggcaaaggacttgaatgggtcgccacaatcagccaggccggcagcgagaaggactacgtggactctgtgaagggcagattcaccatcagccgggacaacgccaagaagtccctgtacctccagatgaacagcctgagagccgaggacaccgccgtgtactattgtgcctctggcgtgtacagcttcgactacagaggccagggcaccctggtcacagtctcttctggtaccggcggaggcggatctggcggcggaggtagcggtggcggaggatctgaattcgacatcgtgatgacacagagccctgatagcctggccgtgtctctgggagagagagccaccattaactgcaaggccagccagagcgtggactacgacggcgacagcttcctgaactggtatcagcagaagcccggccagcctcctaagctgctgatctacgccgccagcaatctggaaagcggcgtgccaagcagattttccggctctggcagcggcaccgatttcaccctgacaatatccagcctccagcctgaggacgtggccgtgtactactgccagcagagcaacgacgaccctctgacctttggacagggcaccaaggtggaaatcaaactcgaggacctgaagaacgtgttcccacctgaggtggccgtgttcgagcctagcgaggccgagatcagccacacccagaaagccaccctcgtgtgcctggctaccggcttctaccccgaccatgtggaactgtcttggtgggtcaacggcaaagaggtgcacagcggcgtgtgtaccgacccccagccactgaaagaacagcccgccctgaacgacagccggtactgcctgagcagcagactgagagtgtccgccaccttctggcagaacccccggaaccacttcagatgccaggtgcagttctacggcctgagcgagaacgacgagtggacccaggacagagccaagcccgtgacccagatcgtgtctgccgaagcctggggcagagccgattgcgacgtgaagctggtggaaaagagcttcgagacagacaccaacctgaacttccagaacctgagcgtgatcggcttcagaatcctgctgctgaaagtggccggctttaacctgctgatgaccctgcggctgtggtccagcagggccaagcgatctggatctggagcaacaaacttctcactactcaaacaagcaggtgacgtggaggagaatcccgggcctactagtatggactggatttggcgcatccttttccttgtcggcgctgctaccggcgcgcattccgggccccagctccagctgcaagagtctggacctggcctggtcaagcctagcgagacactgagcctgacctgtaccgtgtccggcgatagcatcagcagcggcgattactactggggctggatcagacagcctcctggcaaaggactggaatggatcggccacatctactacagcggcgtgacctactacaaccccagcctgaagtccagagtgaccatcagcgtggacaccagccggaaccagttctccctgaagctgtctagcgtgacagccgccgataccgccgtgtactactgcaccagagaggacagcagcaactggcggagtagaggccagggaacactggtcacagttagctctggatccggcggaggcggaagtggaggcggaggatctggcggcggaggctctttcgaacaagttcagctggttcagagcggagccgaagtgaagaaacctggggcctctgtgaaggtgtcctgcaaagccagcggctacacctttaccagctactggatcaactgggtccgacaggcccctggacaaggactggaatggatgggacagatccttccaggcggaggggacaccaactacaacggcaagttcaagggcagagtgaccatcaccgccgacaccagcacaagcaccgcctacatggaactgagcagcctgagaagcgaggacaccgccgtgtattattgcaccagacgggtgcccatccggctggattattggggacagggaaccctggtcaccgtgtctagtacgcgtatccagaaccctgatcctgccgtgtaccagctgcgggatagcaagagcagcgacaagagcgtgtgtctgttcaccgacttcgacagccagaccaacgtgtcccagagcaaggactccgacgtgtacatcaccgataagtgcgtgctggacatgcggagcatggacttcaagagcaactccgccgtggcctggtccaacaagtccgatttcgcctgcgccaacgccttcaacaacagcattatccccgaggacacattcttcccaagccccgagagcagctgcggctttaccagcgagagctaccagcagggcgtgctgagcgccaccatcctgtacgagatcctgctgggcaaggccaccctgtacgccgtgctggtgtctgccctggtgctgatggctatggtcaagcggaaggacagccgggga

SEQ ID NO: 38152 - DNA, 2691 bp, synthetic construct
  source 1..2691: mol_type = other DNA
atggccttaccagtgaccgccttgctcctgccgctggccttgctgctccacgccgccaggccggaagtgcagctggttgaatctggcggaggactggttcagcctggcggatctctgagactgtcttgtgccgccagcggcttcagcttcagcgacttttggatgagctgggtccgacaggcccctggcaaaggacttgaatgggtcgccacaatcagccaggccggcagcgagaaggactacgtggactctgtgaagggcagattcaccatcagccgggacaacgccaagaagtccctgtacctccagatgaacagcctgagagccgaggacaccgccgtgtactattgtgcctctggcgtgtacagcttcgactacagaggccagggcaccctggtcacagtctcttctggtaccggcggaggcggatctggcggcggaggtagcggtggcggaggatctgaattcgacatcgtgatgacacagagccctgatagcctggccgtgtctctgggagagagagccaccattaactgcaaggccagccagagcgtggactacgacggcgacagcttcctgaactggtatcagcagaagcccggccagcctcctaagctgctgatctacgccgccagcaatctggaaagcggcgtgccaagcagattttccggctctggcagcggcaccgatttcaccctgacaatatccagcctccagcctgaggacgtggccgtgtactactgccagcagagcaacgacgaccctctgacctttggacagggcaccaaggtggaaatcaaactcgagatccagaaccctgatcctgccgtgtaccagctgcgggatagcaagagcagcgacaagagcgtgtgtctgttcaccgacttcgacagccagaccaacgtgtcccagagcaaggactccgacgtgtacatcaccgataagtgcgtgctggacatgcggagcatggacttcaagagcaactccgccgtggcctggtccaacaagtccgatttcgcctgcgccaacgccttcaacaacagcattatccccgaggacacattcttcccaagccccgagagcagctgcggctttaccagcgagagctaccagcagggcgtgctgagcgccaccatcctgtacgagatcctgctgggcaaggccaccctgtacgccgtgctggtgtctgccctggtgctgatggctatggtcaagcggaaggacagccggggacgcgccaagagaagcggatctggcgtgaagcagaccctgaatttcgacctgctgaagctggctggcgacgtggaatccaacccaggccctactagtatggactggatttggcgcatccttttccttgtcggcgctgctaccggcgcgcattccgggccccagctccagctgcaagagtctggacctggcctggtcaagcctagcgagacactgagcctgacctgtaccgtgtccggcgatagcatcagcagcggcgattactactggggctggatcagacagcctcctggcaaaggactggaatggatcggccacatctactacagcggcgtgacctactacaaccccagcctgaagtccagagtgaccatcagcgtggacaccagccggaaccagttctccctgaagctgtctagcgtgacagccgccgataccgccgtgtactactgcaccagagaggacagcagcaactggcggagtagaggccagggaacactggtcacagttagctctggatccggcggaggcggaagtggaggcggaggatctggcggcggaggctctttcgaacaagttcagctggttcagagcggagccgaagtgaagaaacctggggcctctgtgaaggtgtcctgcaaagccagcggctacacctttaccagctactggatcaactgggtccgacaggcccctggacaaggactggaatggatgggacagatccttccaggcggaggggacaccaactacaacggcaagttcaagggcagagtgaccatcaccgccgacaccagcacaagcaccgcctacatggaactgagcagcctgagaagcgaggacaccgccgtgtattattgcaccagacgggtgcccatccggctggattattggggacagggaaccctggtcaccgtgtctagtacgcgtgaggacctgaagaacgtgttcccacctgaggtggccgtgttcgagcctagcgaggccgagatcagccacacccagaaagccaccctcgtgtgcctggctaccggcttctaccccgaccatgtggaactgtcttggtgggtcaacggcaaagaggtgcacagcggcgtgtgtaccgacccccagccactgaaagaacagcccgccctgaacgacagccggtactgcctgagcagcagactgagagtgtccgccaccttctggcagaacccccggaaccacttcagatgccaggtgcagttctacggcctgagcgagaacgacgagtggacccaggacagagccaagcccgtgacccagatcgtgtctgccgaagcctggggcagagccgattgcgacgtgaagctggtggaaaagagcttcgagacagacaccaacctgaacttccagaacctgagcgtgatcggcttcagaatcctgctgctgaaagtggccggctttaacctgctgatgaccctgcggctgtggtccagc

SEQ ID NO: 38153 - DNA, 2073 bp, synthetic construct
  source 1..2073: mol_type = other DNA
atggccttaccagtgaccgccttgctcctgccgctggccttgctgctccacgccgccaggccggacatcgtgatgacacagagccctgatagcctggccgtgtctctgggagagagagccaccattaactgcaaggccagccagagcgtggactacgacggcgacagcttcctgaactggtatcagcagaagcccggccagcctcctaagctgctgatctacgccgccagcaatctggaaagcggcgtgccaagcagattttccggctctggcagcggcaccgatttcaccctgacaatatccagcctccagcctgaggacgtggccgtgtactactgccagcagagcaacgacgaccctctgacctttggacagggcaccaaggtggaaatcaaactcgaggacctgaagaacgtgttcccacctgaggtggccgtgttcgagcctagcgaggccgagatcagccacacccagaaagccaccctcgtgtgcctggctaccggcttctaccccgaccatgtggaactgtcttggtgggtcaacggcaaagaggtgcacagcggcgtgtgtaccgacccccagccactgaaagaacagcccgccctgaacgacagccggtactgcctgagcagcagactgagagtgtccgccaccttctggcagaacccccggaaccacttcagatgccaggtgcagttctacggcctgagcgagaacgacgagtggacccaggacagagccaagcccgtgacccagatcgtgtctgccgaagcctggggcagagccgattgcgacgtgaagctggtggaaaagagcttcgagacagacaccaacctgaacttccagaacctgagcgtgatcggcttcagaatcctgctgctgaaagtggccggctttaacctgctgatgaccctgcggctgtggtccagcagggccaagcgatctggatctggagcaacaaacttctcactactcaaacaagcaggtgacgtggaggagaatcccgggcctactagtatggactggatttggcgcatccttttccttgtcggcgctgctaccggcgcccattccgggcccatggaccccgacctggaaatcagagccgccttcctgcggcagagaaacacagccctgagaacagaggtggccgagctggaacaagaggtgcagcggctggaaaacgaggtgtcccagtacgagacaagatacggccctctcggaggcggaaaaggatccggcggcggaggatctggcggaggcggatctgggggcggaggctctttcgaacaagttcagctggttcagagcggagccgaagtgaagaaacctggggcctctgtgaaggtgtcctgcaaagccagcggctacacctttaccagctactggatcaactgggtccgacaggcccctggacaaggactggaatggatgggacagatccttccaggcggaggggacaccaactacaacggcaagttcaagggcagagtgaccatcaccgccgacaccagcacaagcaccgcctacatggaactgagcagcctgagaagcgaggacaccgccgtgtattattgcaccagacgggtgcccatccggctggattattggggacagggaaccctggtcaccgtgtctagtacgcgtatccagaaccctgatcctgccgtgtaccagctgcgggatagcaagagcagcgacaagagcgtgtgtctgttcaccgacttcgacagccagaccaacgtgtcccagagcaaggactccgacgtgtacatcaccgataagtgcgtgctggacatgcggagcatggacttcaagagcaactccgccgtggcctggtccaacaagtccgatttcgcctgcgccaacgccttcaacaacagcattatccccgaggacacattcttcccaagccccgagagcagctgcggctttaccagcgagagctaccagcagggcgtgctgagcgccaccatcctgtacgagatcctgctgggcaaggccaccctgtacgccgtgctggtgtctgccctggtgctgatggctatggtcaagcggaaggacagccgggga

SEQ ID NO: 38154 - DNA, 2085 bp, synthetic construct
  source 1..2085: mol_type = other DNA
atggccttaccagtgaccgccttgctcctgccgctggccttgctgctccacgccgccaggccggacatcgtgatgacacagagccctgatagcctggccgtgtctctgggagagagagccaccattaactgcaaggccagccagagcgtggactacgacggcgacagcttcctgaactggtatcagcagaagcccggccagcctcctaagctgctgatctacgccgccagcaatctggaaagcggcgtgccaagcagattttccggctctggcagcggcaccgatttcaccctgacaatatccagcctccagcctgaggacgtggccgtgtactactgccagcagagcaacgacgaccctctgacctttggacagggcaccaaggtggaaatcaaactcgagatccagaaccctgatcctgccgtgtaccagctgcgggatagcaagagcagcgacaagagcgtgtgtctgttcaccgacttcgacagccagaccaacgtgtcccagagcaaggactccgacgtgtacatcaccgataagtgcgtgctggacatgcggagcatggacttcaagagcaactccgccgtggcctggtccaacaagtccgatttcgcctgcgccaacgccttcaacaacagcattatccccgaggacacattcttcccaagccccgagagcagctgcggctttaccagcgagagctaccagcagggcgtgctgagcgccaccatcctgtacgagatcctgctgggcaaggccaccctgtacgccgtgctggtgtctgccctggtgctgatggctatggtcaagcggaaggacagccggggacgcgccaagagaagcggatctggcgtgaagcagaccctgaatttcgacctgctgaagctggctggcgacgtggaatccaacccaggccctactagtatggactggatttggcgcatccttttccttgtcggcgctgctaccggcgcccattccgggcccatggaccccgacctggaaatcagagccgccttcctgcggcagagaaacacagccctgagaacagaggtggccgagctggaacaagaggtgcagcggctggaaaacgaggtgtcccagtacgagacaagatacggccctctcggaggcggaaaaggatccggcggcggaggatctggcggaggcggatctgggggcggaggctctttcgaacaagttcagctggttcagagcggagccgaagtgaagaaacctggggcctctgtgaaggtgtcctgcaaagccagcggctacacctttaccagctactggatcaactgggtccgacaggcccctggacaaggactggaatggatgggacagatccttccaggcggaggggacaccaactacaacggcaagttcaagggcagagtgaccatcaccgccgacaccagcacaagcaccgcctacatggaactgagcagcctgagaagcgaggacaccgccgtgtattattgcaccagacgggtgcccatccggctggattattggggacagggaaccctggtcaccgtgtctagtacgcgtgaggacctgaagaacgtgttcccacctgaggtggccgtgttcgagcctagcgaggccgagatcagccacacccagaaagccaccctcgtgtgcctggctaccggcttctaccccgaccatgtggaactgtcttggtgggtcaacggcaaagaggtgcacagcggcgtgtgtaccgacccccagccactgaaagaacagcccgccctgaacgacagccggtactgcctgagcagcagactgagagtgtccgccaccttctggcagaacccccggaaccacttcagatgccaggtgcagttctacggcctgagcgagaacgacgagtggacccaggacagagccaagcccgtgacccagatcgtgtctgccgaagcctggggcagagccgattgcgacgtgaagctggtggaaaagagcttcgagacagacaccaacctgaacttccagaacctgagcgtgatcggcttcagaatcctgctgctgaaagtggccggctttaacctgctgatgaccctgcggctgtggtccagc

SEQ ID NO: 38155 - DNA, 2004 bp, synthetic construct
  source 1..2004: mol_type = other DNA
atggccttaccagtgaccgccttgctcctgccgctggccttgctgctccacgccgccaggccggacatcgtgatgacacagagccctgatagcctggccgtgtctctgggagagagagccaccattaactgcaaggccagccagagcgtggactacgacggcgacagcttcctgaactggtatcagcagaagcccggccagcctcctaagctgctgatctacgccgccagcaatctggaaagcggcgtgccaagcagattttccggctctggcagcggcaccgatttcaccctgacaatatccagcctccagcctgaggacgtggccgtgtactactgccagcagagcaacgacgaccctctgacctttggacagggcaccaaggtggaaatcaaactcgaggacctgaagaacgtgttcccacctgaggtggccgtgttcgagcctagcgaggccgagatcagccacacccagaaagccaccctcgtgtgcctggctaccggcttctaccccgaccatgtggaactgtcttggtgggtcaacggcaaagaggtgcacagcggcgtgtgtaccgacccccagccactgaaagaacagcccgccctgaacgacagccggtactgcctgagcagcagactgagagtgtccgccaccttctggcagaacccccggaaccacttcagatgccaggtgcagttctacggcctgagcgagaacgacgagtggacccaggacagagccaagcccgtgacccagatcgtgtctgccgaagcctggggcagagccgattgcgacgtgaagctggtggaaaagagcttcgagacagacaccaacctgaacttccagaacctgagcgtgatcggcttcagaatcctgctgctgaaagtggccggctttaacctgctgatgaccctgcggctgtggtccagcagggccaagcgatctggatctggagcaacaaacttctcactactcaaacaagcaggtgacgtggaggagaatcccgggcctactagtatggactggatttggcgcatccttttccttgtcggcgctgctaccggcgcccattccgggcccgaagttgctgccctcgagaaggaggtagcagctttggaaaaagaagtcgcagcccttgagaaagaagttgcggctctggagaagggatccggcggcggaggatctggcggaggcggatctgggggcggaggctctttcgaacaagttcagctggttcagagcggagccgaagtgaagaaacctggggcctctgtgaaggtgtcctgcaaagccagcggctacacctttaccagctactggatcaactgggtccgacaggcccctggacaaggactggaatggatgggacagatccttccaggcggaggggacaccaactacaacggcaagttcaagggcagagtgaccatcaccgccgacaccagcacaagcaccgcctacatggaactgagcagcctgagaagcgaggacaccgccgtgtattattgcaccagacgggtgcccatccggctggattattggggacagggaaccctggtcaccgtgtctagtacgcgtatccagaaccctgatcctgccgtgtaccagctgcgggatagcaagagcagcgacaagagcgtgtgtctgttcaccgacttcgacagccagaccaacgtgtcccagagcaaggactccgacgtgtacatcaccgataagtgcgtgctggacatgcggagcatggacttcaagagcaactccgccgtggcctggtccaacaagtccgatttcgcctgcgccaacgccttcaacaacagcattatccccgaggacacattcttcccaagccccgagagcagctgcggctttaccagcgagagctaccagcagggcgtgctgagcgccaccatcctgtacgagatcctgctgggcaaggccaccctgtacgccgtgctggtgtctgccctggtgctgatggctatggtcaagcggaaggacagccgggga

SEQ ID NO: 38156 - DNA, 2016 bp, synthetic construct
  source 1..2016: mol_type = other DNA
atggccttaccagtgaccgccttgctcctgccgctggccttgctgctccacgccgccaggccggacatcgtgatgacacagagccctgatagcctggccgtgtctctgggagagagagccaccattaactgcaaggccagccagagcgtggactacgacggcgacagcttcctgaactggtatcagcagaagcccggccagcctcctaagctgctgatctacgccgccagcaatctggaaagcggcgtgccaagcagattttccggctctggcagcggcaccgatttcaccctgacaatatccagcctccagcctgaggacgtggccgtgtactactgccagcagagcaacgacgaccctctgacctttggacagggcaccaaggtggaaatcaaactcgagatccagaaccctgatcctgccgtgtaccagctgcgggatagcaagagcagcgacaagagcgtgtgtctgttcaccgacttcgacagccagaccaacgtgtcccagagcaaggactccgacgtgtacatcaccgataagtgcgtgctggacatgcggagcatggacttcaagagcaactccgccgtggcctggtccaacaagtccgatttcgcctgcgccaacgccttcaacaacagcattatccccgaggacacattcttcccaagccccgagagcagctgcggctttaccagcgagagctaccagcagggcgtgctgagcgccaccatcctgtacgagatcctgctgggcaaggccaccctgtacgccgtgctggtgtctgccctggtgctgatggctatggtcaagcggaaggacagccggggacgcgccaagagaagcggatctggcgtgaagcagaccctgaatttcgacctgctgaagctggctggcgacgtggaatccaacccaggccctactagtatggactggatttggcgcatccttttccttgtcggcgctgctaccggcgcccattccgggcccgaagttgctgccctcgagaaggaggtagcagctttggaaaaagaagtcgcagcccttgagaaagaagttgcggctctggagaagggatccggcggcggaggatctggcggaggcggatctgggggcggaggctctttcgaacaagttcagctggttcagagcggagccgaagtgaagaaacctggggcctctgtgaaggtgtcctgcaaagccagcggctacacctttaccagctactggatcaactgggtccgacaggcccctggacaaggactggaatggatgggacagatccttccaggcggaggggacaccaactacaacggcaagttcaagggcagagtgaccatcaccgccgacaccagcacaagcaccgcctacatggaactgagcagcctgagaagcgaggacaccgccgtgtattattgcaccagacgggtgcccatccggctggattattggggacagggaaccctggtcaccgtgtctagtacgcgtgaggacctgaagaacgtgttcccacctgaggtggccgtgttcgagcctagcgaggccgagatcagccacacccagaaagccaccctcgtgtgcctggctaccggcttctaccccgaccatgtggaactgtcttggtgggtcaacggcaaagaggtgcacagcggcgtgtgtaccgacccccagccactgaaagaacagcccgccctgaacgacagccggtactgcctgagcagcagactgagagtgtccgccaccttctggcagaacccccggaaccacttcagatgccaggtgcagttctacggcctgagcgagaacgacgagtggacccaggacagagccaagcccgtgacccagatcgtgtctgccgaagcctggggcagagccgattgcgacgtgaagctggtggaaaagagcttcgagacagacaccaacctgaacttccagaacctgagcgtgatcggcttcagaatcctgctgctgaaagtggccggctttaacctgctgatgaccctgcggctgtggtccagc

SEQ ID NO: 38157 - DNA, 2274 bp, synthetic construct
  source 1..2274: mol_type = other DNA
atggccttaccagtgaccgccttgctcctgccgctggccttgctgctccacgccgccaggccggacatcgtgatgacacagagccctgatagcctggccgtgtctctgggagagagagccaccattaactgcaaggccagccagagcgtggactacgacggcgacagcttcctgaactggtatcagcagaagcccggccagcctcctaagctgctgatctacgccgccagcaatctggaaagcggcgtgccaagcagattttccggctctggcagcggcaccgatttcaccctgacaatatccagcctccagcctgaggacgtggccgtgtactactgccagcagagcaacgacgaccctctgacctttggacagggcaccaaggtggaaatcaaactcgaggacctgaagaacgtgttcccacctgaggtggccgtgttcgagcctagcgaggccgagatcagccacacccagaaagccaccctcgtgtgcctggctaccggcttctaccccgaccatgtggaactgtcttggtgggtcaacggcaaagaggtgcacagcggcgtgtgtaccgacccccagccactgaaagaacagcccgccctgaacgacagccggtactgcctgagcagcagactgagagtgtccgccaccttctggcagaacccccggaaccacttcagatgccaggtgcagttctacggcctgagcgagaacgacgagtggacccaggacagagccaagcccgtgacccagatcgtgtctgccgaagcctggggcagagccgattgcgacgtgaagctggtggaaaagagcttcgagacagacaccaacctgaacttccagaacctgagcgtgatcggcttcagaatcctgctgctgaaagtggccggctttaacctgctgatgaccctgcggctgtggtccagcagggccaagcgatctggatctggagcaacaaacttctcactactcaaacaagcaggtgacgtggaggagaatcccgggcctactagtatggactggatttggcgcatccttttccttgtcggcgctgctaccggcgcccattccgggccccaggttcagctgcaagagtctggcggaggacttgctcaagctggcggaagcctgagactgtcttgtgccgcctctggcagaaccttcagcatgggctggtttagacaggcccctggcaaagagagagagttcgtcgccgccatcacatacagcggcggcagcccttactacgcctcttctgtcagaggccggttcaccatcagccgggacaacgccaagaacaccgtgtacctccagatgaacagcctgaagccagaggacaccgccgtgtactactgtgccgccaatccaacctacggcagcgactggaatgccgagaattggggccagggcacccaagtgacagtgtctagtggatccggcggcggaggatctggcggaggcggatctgggggcggaggctctttcgaacaagttcagctggttcagagcggagccgaagtgaagaaacctggggcctctgtgaaggtgtcctgcaaagccagcggctacacctttaccagctactggatcaactgggtccgacaggcccctggacaaggactggaatggatgggacagatccttccaggcggaggggacaccaactacaacggcaagttcaagggcagagtgaccatcaccgccgacaccagcacaagcaccgcctacatggaactgagcagcctgagaagcgaggacaccgccgtgtattattgcaccagacgggtgcccatccggctggattattggggacagggaaccctggtcaccgtgtctagtacgcgtatccagaaccctgatcctgccgtgtaccagctgcgggatagcaagagcagcgacaagagcgtgtgtctgttcaccgacttcgacagccagaccaacgtgtcccagagcaaggactccgacgtgtacatcaccgataagtgcgtgctggacatgcggagcatggacttcaagagcaactccgccgtggcctggtccaacaagtccgatttcgcctgcgccaacgccttcaacaacagcattatccccgaggacacattcttcccaagccccgagagcagctgcggctttaccagcgagagctaccagcagggcgtgctgagcgccaccatcctgtacgagatcctgctgggcaaggccaccctgtacgccgtgctggtgtctgccctggtgctgatggctatggtcaagcggaaggacagccgggga

SEQ ID NO: 38158 - DNA, 2286 bp, synthetic construct
  source 1..2286: mol_type = other DNA
atggccttaccagtgaccgccttgctcctgccgctggccttgctgctccacgccgccaggccggacatcgtgatgacacagagccctgatagcctggccgtgtctctgggagagagagccaccattaactgcaaggccagccagagcgtggactacgacggcgacagcttcctgaactggtatcagcagaagcccggccagcctcctaagctgctgatctacgccgccagcaatctggaaagcggcgtgccaagcagattttccggctctggcagcggcaccgatttcaccctgacaatatccagcctccagcctgaggacgtggccgtgtactactgccagcagagcaacgacgaccctctgacctttggacagggcaccaaggtggaaatcaaactcgagatccagaaccctgatcctgccgtgtaccagctgcgggatagcaagagcagcgacaagagcgtgtgtctgttcaccgacttcgacagccagaccaacgtgtcccagagcaaggactccgacgtgtacatcaccgataagtgcgtgctggacatgcggagcatggacttcaagagcaactccgccgtggcctggtccaacaagtccgatttcgcctgcgccaacgccttcaacaacagcattatccccgaggacacattcttcccaagccccgagagcagctgcggctttaccagcgagagctaccagcagggcgtgctgagcgccaccatcctgtacgagatcctgctgggcaaggccaccctgtacgccgtgctggtgtctgccctggtgctgatggctatggtcaagcggaaggacagccggggacgcgccaagagaagcggatctggcgtgaagcagaccctgaatttcgacctgctgaagctggctggcgacgtggaatccaacccaggccctactagtatggactggatttggcgcatccttttccttgtcggcgctgctaccggcgcccattccgggccccaggttcagctgcaagagtctggcggaggacttgctcaagctggcggaagcctgagactgtcttgtgccgcctctggcagaaccttcagcatgggctggtttagacaggcccctggcaaagagagagagttcgtcgccgccatcacatacagcggcggcagcccttactacgcctcttctgtcagaggccggttcaccatcagccgggacaacgccaagaacaccgtgtacctccagatgaacagcctgaagccagaggacaccgccgtgtactactgtgccgccaatccaacctacggcagcgactggaatgccgagaattggggccagggcacccaagtgacagtgtctagtggatccggcggcggaggatctggcggaggcggatctgggggcggaggctctttcgaacaagttcagctggttcagagcggagccgaagtgaagaaacctggggcctctgtgaaggtgtcctgcaaagccagcggctacacctttaccagctactggatcaactgggtccgacaggcccctggacaaggactggaatggatgggacagatccttccaggcggaggggacaccaactacaacggcaagttcaagggcagagtgaccatcaccgccgacaccagcacaagcaccgcctacatggaactgagcagcctgagaagcgaggacaccgccgtgtattattgcaccagacgggtgcccatccggctggattattggggacagggaaccctggtcaccgtgtctagtacgcgtgaggacctgaagaacgtgttcccacctgaggtggccgtgttcgagcctagcgaggccgagatcagccacacccagaaagccaccctcgtgtgcctggctaccggcttctaccccgaccatgtggaactgtcttggtgggtcaacggcaaagaggtgcacagcggcgtgtgtaccgacccccagccactgaaagaacagcccgccctgaacgacagccggtactgcctgagcagcagactgagagtgtccgccaccttctggcagaacccccggaaccacttcagatgccaggtgcagttctacggcctgagcgagaacgacgagtggacccaggacagagccaagcccgtgacccagatcgtgtctgccgaagcctggggcagagccgattgcgacgtgaagctggtggaaaagagcttcgagacagacaccaacctgaacttccagaacctgagcgtgatcggcttcagaatcctgctgctgaaagtggccggctttaacctgctgatgaccctgcggctgtggtccagc

SEQ ID NO: 38159 - DNA, 2292 bp, synthetic construct
  source 1..2292: mol_type = other DNA
atggccttaccagtgaccgccttgctcctgccgctggccttgctgctccacgccgccaggccggaagtgcaactggtggaatctggaggctctctggtgcagccagggggaagcctgagactgtcttgtgccgcttccggcttcaccttcgacgactacgccatgagctgggtgcgccaggtgccaggcaaaggcctggaatgggtgtccagcatcaactggagcggcacccacaccgattacgccgactccgtgaaaggcagattcacaatcagcagaaacaacgccaacaataccctgtacctgcagatgaactccctgaagtctgaggatacagcagtgtattattgcgccaagaactggcgggacgccggcaccacttggtttgagaaaagcggctctgccggacagggaacccaagtgacagtgtcctccggtaccggcggaggcggatctggcggcggaggtagcggtggcggaggatctgaattcgacatcgtgatgacacagagccctgatagcctggccgtgtctctgggagagagagccaccattaactgcaaggccagccagagcgtggactacgacggcgacagcttcctgaactggtatcagcagaagcccggccagcctcctaagctgctgatctacgccgccagcaatctggaaagcggcgtgccaagcagattttccggctctggcagcggcaccgatttcaccctgacaatatccagcctccagcctgaggacgtggccgtgtactactgccagcagagcaacgacgaccctctgacctttggacagggcaccaaggtggaaatcaaactcgaggacctgaagaacgtgttcccacctgaggtggccgtgttcgagcctagcgaggccgagatcagccacacccagaaagccaccctcgtgtgcctggctaccggcttctaccccgaccatgtggaactgtcttggtgggtcaacggcaaagaggtgcacagcggcgtgtgtaccgacccccagccactgaaagaacagcccgccctgaacgacagccggtactgcctgagcagcagactgagagtgtccgccaccttctggcagaacccccggaaccacttcagatgccaggtgcagttctacggcctgagcgagaacgacgagtggacccaggacagagccaagcccgtgacccagatcgtgtctgccgaagcctggggcagagccgattgcgacgtgaagctggtggaaaagagcttcgagacagacaccaacctgaacttccagaacctgagcgtgatcggcttcagaatcctgctgctgaaagtggccggctttaacctgctgatgaccctgcggctgtggtccagcagggccaagcgatctggatctggagcaacaaacttctcactactcaaacaagcaggtgacgtggaggagaatcccgggcctactagtatggactggatttggcgcatccttttccttgtcggcgctgctaccggcgcgcattccttcgaacaagttcagctggttcagagcggagccgaagtgaagaaacctggggcctctgtgaaggtgtcctgcaaagccagcggctacacctttaccagctactggatcaactgggtccgacaggcccctggacaaggactggaatggatgggacagatccttccaggcggaggggacaccaactacaacggcaagttcaagggcagagtgaccatcaccgccgacaccagcacaagcaccgcctacatggaactgagcagcctgagaagcgaggacaccgccgtgtattattgcaccagacgggtgcccatccggctggattattggggacagggaaccctggtcaccgtgtctagtacgcgtatccagaaccctgatcctgccgtgtaccagctgcgggatagcaagagcagcgacaagagcgtgtgtctgttcaccgacttcgacagccagaccaacgtgtcccagagcaaggactccgacgtgtacatcaccgataagtgcgtgctggacatgcggagcatggacttcaagagcaactccgccgtggcctggtccaacaagtccgatttcgcctgcgccaacgccttcaacaacagcattatccccgaggacacattcttcccaagccccgagagcagctgcggctttaccagcgagagctaccagcagggcgtgctgagcgccaccatcctgtacgagatcctgctgggcaaggccaccctgtacgccgtgctggtgtctgccctggtgctgatggctatggtcaagcggaaggacagccgggga

SEQ ID NO: 38160 - DNA, 2304 bp, synthetic construct
  source 1..2304: mol_type = other DNA
atggccttaccagtgaccgccttgctcctgccgctggccttgctgctccacgccgccaggccggaagtgcaactggtggaatctggaggctctctggtgcagccagggggaagcctgagactgtcttgtgccgcttccggcttcaccttcgacgactacgccatgagctgggtgcgccaggtgccaggcaaaggcctggaatgggtgtccagcatcaactggagcggcacccacaccgattacgccgactccgtgaaaggcagattcacaatcagcagaaacaacgccaacaataccctgtacctgcagatgaactccctgaagtctgaggatacagcagtgtattattgcgccaagaactggcgggacgccggcaccacttggtttgagaaaagcggctctgccggacagggaacccaagtgacagtgtcctccggtaccggcggaggcggatctggcggcggaggtagcggtggcggaggatctgaattcgacatcgtgatgacacagagccctgatagcctggccgtgtctctgggagagagagccaccattaactgcaaggccagccagagcgtggactacgacggcgacagcttcctgaactggtatcagcagaagcccggccagcctcctaagctgctgatctacgccgccagcaatctggaaagcggcgtgccaagcagattttccggctctggcagcggcaccgatttcaccctgacaatatccagcctccagcctgaggacgtggccgtgtactactgccagcagagcaacgacgaccctctgacctttggacagggcaccaaggtggaaatcaaactcgagatccagaaccctgatcctgccgtgtaccagctgcgggatagcaagagcagcgacaagagcgtgtgtctgttcaccgacttcgacagccagaccaacgtgtcccagagcaaggactccgacgtgtacatcaccgataagtgcgtgctggacatgcggagcatggacttcaagagcaactccgccgtggcctggtccaacaagtccgatttcgcctgcgccaacgccttcaacaacagcattatccccgaggacacattcttcccaagccccgagagcagctgcggctttaccagcgagagctaccagcagggcgtgctgagcgccaccatcctgtacgagatcctgctgggcaaggccaccctgtacgccgtgctggtgtctgccctggtgctgatggctatggtcaagcggaaggacagccggggacgcgccaagagaagcggatctggcgtgaagcagaccctgaatttcgacctgctgaagctggctggcgacgtggaatccaacccaggccctactagtatggactggatttggcgcatccttttccttgtcggcgctgctaccggcgcgcattccttcgaacaagttcagctggttcagagcggagccgaagtgaagaaacctggggcctctgtgaaggtgtcctgcaaagccagcggctacacctttaccagctactggatcaactgggtccgacaggcccctggacaaggactggaatggatgggacagatccttccaggcggaggggacaccaactacaacggcaagttcaagggcagagtgaccatcaccgccgacaccagcacaagcaccgcctacatggaactgagcagcctgagaagcgaggacaccgccgtgtattattgcaccagacgggtgcccatccggctggattattggggacagggaaccctggtcaccgtgtctagtacgcgtgaggacctgaagaacgtgttcccacctgaggtggccgtgttcgagcctagcgaggccgagatcagccacacccagaaagccaccctcgtgtgcctggctaccggcttctaccccgaccatgtggaactgtcttggtgggtcaacggcaaagaggtgcacagcggcgtgtgtaccgacccccagccactgaaagaacagcccgccctgaacgacagccggtactgcctgagcagcagactgagagtgtccgccaccttctggcagaacccccggaaccacttcagatgccaggtgcagttctacggcctgagcgagaacgacgagtggacccaggacagagccaagcccgtgacccagatcgtgtctgccgaagcctggggcagagccgattgcgacgtgaagctggtggaaaagagcttcgagacagacaccaacctgaacttccagaacctgagcgtgatcggcttcagaatcctgctgctgaaagtggccggctttaacctgctgatgaccctgcggctgtggtccagc

SEQ ID NO: 38161 - DNA, 2286 bp, synthetic construct
  source 1..2286: mol_type = other DNA
atggccttaccagtgaccgccttgctcctgccgctggccttgctgctccacgccgccaggccggaagttcagctgcttgagtctggcggaggactggttcaacctggcggaagcctgagactgtcttgtgccgccagcggcttcatcttcagcagctacgccatgagctgggtccgacaggctcctggaaagggccaagaatgggtttccggcgttagcggcacaggcgtgaacacctactacgccgatagcgtgaagggcagattcaccatcagccgggacaacagcaagaacaccctgtacctccagatgaacagcctgagagccgaggacaccgccgtgtactattgtgcctctggcaaaggctgggacagcggctcttggtacgaggactatagaggccagggcaccctggtcacagtttcttcaggtaccggcggaggcggatctggcggcggaggtagcggtggcggaggatctgaattcgacatcgtgatgacacagagccctgatagcctggccgtgtctctgggagagagagccaccattaactgcaaggccagccagagcgtggactacgacggcgacagcttcctgaactggtatcagcagaagcccggccagcctcctaagctgctgatctacgccgccagcaatctggaaagcggcgtgccaagcagattttccggctctggcagcggcaccgatttcaccctgacaatatccagcctccagcctgaggacgtggccgtgtactactgccagcagagcaacgacgaccctctgacctttggacagggcaccaaggtggaaatcaaactcgaggacctgaagaacgtgttcccacctgaggtggccgtgttcgagcctagcgaggccgagatcagccacacccagaaagccaccctcgtgtgcctggctaccggcttctaccccgaccatgtggaactgtcttggtgggtcaacggcaaagaggtgcacagcggcgtgtgtaccgacccccagccactgaaagaacagcccgccctgaacgacagccggtactgcctgagcagcagactgagagtgtccgccaccttctggcagaacccccggaaccacttcagatgccaggtgcagttctacggcctgagcgagaacgacgagtggacccaggacagagccaagcccgtgacccagatcgtgtctgccgaagcctggggcagagccgattgcgacgtgaagctggtggaaaagagcttcgagacagacaccaacctgaacttccagaacctgagcgtgatcggcttcagaatcctgctgctgaaagtggccggctttaacctgctgatgaccctgcggctgtggtccagcagggccaagcgatctggatctggagcaacaaacttctcactactcaaacaagcaggtgacgtggaggagaatcccgggcctactagtatggactggatttggcgcatccttttccttgtcggcgctgctaccggcgcgcattccttcgaacaagttcagctggttcagagcggagccgaagtgaagaaacctggggcctctgtgaaggtgtcctgcaaagccagcggctacacctttaccagctactggatcaactgggtccgacaggcccctggacaaggactggaatggatgggacagatccttccaggcggaggggacaccaactacaacggcaagttcaagggcagagtgaccatcaccgccgacaccagcacaagcaccgcctacatggaactgagcagcctgagaagcgaggacaccgccgtgtattattgcaccagacgggtgcccatccggctggattattggggacagggaaccctggtcaccgtgtctagtacgcgtatccagaaccctgatcctgccgtgtaccagctgcgggatagcaagagcagcgacaagagcgtgtgtctgttcaccgacttcgacagccagaccaacgtgtcccagagcaaggactccgacgtgtacatcaccgataagtgcgtgctggacatgcggagcatggacttcaagagcaactccgccgtggcctggtccaacaagtccgatttcgcctgcgccaacgccttcaacaacagcattatccccgaggacacattcttcccaagccccgagagcagctgcggctttaccagcgagagctaccagcagggcgtgctgagcgccaccatcctgtacgagatcctgctgggcaaggccaccctgtacgccgtgctggtgtctgccctggtgctgatggctatggtcaagcggaaggacagccgggga

SEQ ID NO: 38162 - DNA, 2298 bp, synthetic construct
  source 1..2298: mol_type = other DNA
atggccttaccagtgaccgccttgctcctgccgctggccttgctgctccacgccgccaggccggaagttcagctgcttgagtctggcggaggactggttcaacctggcggaagcctgagactgtcttgtgccgccagcggcttcatcttcagcagctacgccatgagctgggtccgacaggctcctggaaagggccaagaatgggtttccggcgttagcggcacaggcgtgaacacctactacgccgatagcgtgaagggcagattcaccatcagccgggacaacagcaagaacaccctgtacctccagatgaacagcctgagagccgaggacaccgccgtgtactattgtgcctctggcaaaggctgggacagcggctcttggtacgaggactatagaggccagggcaccctggtcacagtttcttcaggtaccggcggaggcggatctggcggcggaggtagcggtggcggaggatctgaattcgacatcgtgatgacacagagccctgatagcctggccgtgtctctgggagagagagccaccattaactgcaaggccagccagagcgtggactacgacggcgacagcttcctgaactggtatcagcagaagcccggccagcctcctaagctgctgatctacgccgccagcaatctggaaagcggcgtgccaagcagattttccggctctggcagcggcaccgatttcaccctgacaatatccagcctccagcctgaggacgtggccgtgtactactgccagcagagcaacgacgaccctctgacctttggacagggcaccaaggtggaaatcaaactcgagatccagaaccctgatcctgccgtgtaccagctgcgggatagcaagagcagcgacaagagcgtgtgtctgttcaccgacttcgacagccagaccaacgtgtcccagagcaaggactccgacgtgtacatcaccgataagtgcgtgctggacatgcggagcatggacttcaagagcaactccgccgtggcctggtccaacaagtccgatttcgcctgcgccaacgccttcaacaacagcattatccccgaggacacattcttcccaagccccgagagcagctgcggctttaccagcgagagctaccagcagggcgtgctgagcgccaccatcctgtacgagatcctgctgggcaaggccaccctgtacgccgtgctggtgtctgccctggtgctgatggctatggtcaagcggaaggacagccggggacgcgccaagagaagcggatctggcgtgaagcagaccctgaatttcgacctgctgaagctggctggcgacgtggaatccaacccaggccctactagtatggactggatttggcgcatccttttccttgtcggcgctgctaccggcgcgcattccttcgaacaagttcagctggttcagagcggagccgaagtgaagaaacctggggcctctgtgaaggtgtcctgcaaagccagcggctacacctttaccagctactggatcaactgggtccgacaggcccctggacaaggactggaatggatgggacagatccttccaggcggaggggacaccaactacaacggcaagttcaagggcagagtgaccatcaccgccgacaccagcacaagcaccgcctacatggaactgagcagcctgagaagcgaggacaccgccgtgtattattgcaccagacgggtgcccatccggctggattattggggacagggaaccctggtcaccgtgtctagtacgcgtgaggacctgaagaacgtgttcccacctgaggtggccgtgttcgagcctagcgaggccgagatcagccacacccagaaagccaccctcgtgtgcctggctaccggcttctaccccgaccatgtggaactgtcttggtgggtcaacggcaaagaggtgcacagcggcgtgtgtaccgacccccagccactgaaagaacagcccgccctgaacgacagccggtactgcctgagcagcagactgagagtgtccgccaccttctggcagaacccccggaaccacttcagatgccaggtgcagttctacggcctgagcgagaacgacgagtggacccaggacagagccaagcccgtgacccagatcgtgtctgccgaagcctggggcagagccgattgcgacgtgaagctggtggaaaagagcttcgagacagacaccaacctgaacttccagaacctgagcgtgatcggcttcagaatcctgctgctgaaagtggccggctttaacctgctgatgaccctgcggctgtggtccagc

SEQ ID NO: 38163 - DNA, 2190 bp, synthetic construct
  source 1..2190: mol_type = other DNA
atggccttaccagtgaccgccttgctcctgccgctggccttgctgctccacgccgccaggccgatgctgcccgctcctaagaatctggtggtgtccagaatcaccgaggacagcgccagactgtcttggacagctcctgatgccgccttcgacagcttccccatccggtacatcgagacactgatctggggcgaagccatctggctggatgtgcctggaagcgagagaagctacgacctgaccggactgaagcctggcacagagtatgccgtggtcatcaccggcgtgaaaggcggcagattctctagccctctggtggcctctttcaccaccggtaccggcggaggcggatctggcggcggaggtagcggtggcggaggatctgaattcgacatcgtgatgacacagagccctgatagcctggccgtgtctctgggagagagagccaccattaactgcaaggccagccagagcgtggactacgacggcgacagcttcctgaactggtatcagcagaagcccggccagcctcctaagctgctgatctacgccgccagcaatctggaaagcggcgtgccaagcagattttccggctctggcagcggcaccgatttcaccctgacaatatccagcctccagcctgaggacgtggccgtgtactactgccagcagagcaacgacgaccctctgacctttggacagggcaccaaggtggaaatcaaactcgaggacctgaagaacgtgttcccacctgaggtggccgtgttcgagcctagcgaggccgagatcagccacacccagaaagccaccctcgtgtgcctggctaccggcttctaccccgaccatgtggaactgtcttggtgggtcaacggcaaagaggtgcacagcggcgtgtgtaccgacccccagccactgaaagaacagcccgccctgaacgacagccggtactgcctgagcagcagactgagagtgtccgccaccttctggcagaacccccggaaccacttcagatgccaggtgcagttctacggcctgagcgagaacgacgagtggacccaggacagagccaagcccgtgacccagatcgtgtctgccgaagcctggggcagagccgattgcgacgtgaagctggtggaaaagagcttcgagacagacaccaacctgaacttccagaacctgagcgtgatcggcttcagaatcctgctgctgaaagtggccggctttaacctgctgatgaccctgcggctgtggtccagcagggccaagcgatctggatctggagcaacaaacttctcactactcaaacaagcaggtgacgtggaggagaatcccgggcctactagtatggactggatttggcgcatccttttccttgtcggcgctgctaccggcgcgcattccttcgaacaagttcagctggttcagagcggagccgaagtgaagaaacctggggcctctgtgaaggtgtcctgcaaagccagcggctacacctttaccagctactggatcaactgggtccgacaggcccctggacaaggactggaatggatgggacagatccttccaggcggaggggacaccaactacaacggcaagttcaagggcagagtgaccatcaccgccgacaccagcacaagcaccgcctacatggaactgagcagcctgagaagcgaggacaccgccgtgtattattgcaccagacgggtgcccatccggctggattattggggacagggaaccctggtcaccgtgtctagtacgcgtatccagaaccctgatcctgccgtgtaccagctgcgggatagcaagagcagcgacaagagcgtgtgtctgttcaccgacttcgacagccagaccaacgtgtcccagagcaaggactccgacgtgtacatcaccgataagtgcgtgctggacatgcggagcatggacttcaagagcaactccgccgtggcctggtccaacaagtccgatttcgcctgcgccaacgccttcaacaacagcattatccccgaggacacattcttcccaagccccgagagcagctgcggctttaccagcgagagctaccagcagggcgtgctgagcgccaccatcctgtacgagatcctgctgggcaaggccaccctgtacgccgtgctggtgtctgccctggtgctgatggctatggtcaagcggaaggacagccgggga

SEQ ID NO: 38164 - DNA, 2202 bp, synthetic construct
  source 1..2202: mol_type = other DNA
atggccttaccagtgaccgccttgctcctgccgctggccttgctgctccacgccgccaggccgatgctgcccgctcctaagaatctggtggtgtccagaatcaccgaggacagcgccagactgtcttggacagctcctgatgccgccttcgacagcttccccatccggtacatcgagacactgatctggggcgaagccatctggctggatgtgcctggaagcgagagaagctacgacctgaccggactgaagcctggcacagagtatgccgtggtcatcaccggcgtgaaaggcggcagattctctagccctctggtggcctctttcaccaccggtaccggcggaggcggatctggcggcggaggtagcggtggcggaggatctgaattcgacatcgtgatgacacagagccctgatagcctggccgtgtctctgggagagagagccaccattaactgcaaggccagccagagcgtggactacgacggcgacagcttcctgaactggtatcagcagaagcccggccagcctcctaagctgctgatctacgccgccagcaatctggaaagcggcgtgccaagcagattttccggctctggcagcggcaccgatttcaccctgacaatatccagcctccagcctgaggacgtggccgtgtactactgccagcagagcaacgacgaccctctgacctttggacagggcaccaaggtggaaatcaaactcgagatccagaaccctgatcctgccgtgtaccagctgcgggatagcaagagcagcgacaagagcgtgtgtctgttcaccgacttcgacagccagaccaacgtgtcccagagcaaggactccgacgtgtacatcaccgataagtgcgtgctggacatgcggagcatggacttcaagagcaactccgccgtggcctggtccaacaagtccgatttcgcctgcgccaacgccttcaacaacagcattatccccgaggacacattcttcccaagccccgagagcagctgcggctttaccagcgagagctaccagcagggcgtgctgagcgccaccatcctgtacgagatcctgctgggcaaggccaccctgtacgccgtgctggtgtctgccctggtgctgatggctatggtcaagcggaaggacagccggggacgcgccaagagaagcggatctggcgtgaagcagaccctgaatttcgacctgctgaagctggctggcgacgtggaatccaacccaggccctactagtatggactggatttggcgcatccttttccttgtcggcgctgctaccggcgcgcattccttcgaacaagttcagctggttcagagcggagccgaagtgaagaaacctggggcctctgtgaaggtgtcctgcaaagccagcggctacacctttaccagctactggatcaactgggtccgacaggcccctggacaaggactggaatggatgggacagatccttccaggcggaggggacaccaactacaacggcaagttcaagggcagagtgaccatcaccgccgacaccagcacaagcaccgcctacatggaactgagcagcctgagaagcgaggacaccgccgtgtattattgcaccagacgggtgcccatccggctggattattggggacagggaaccctggtcaccgtgtctagtacgcgtgaggacctgaagaacgtgttcccacctgaggtggccgtgttcgagcctagcgaggccgagatcagccacacccagaaagccaccctcgtgtgcctggctaccggcttctaccccgaccatgtggaactgtcttggtgggtcaacggcaaagaggtgcacagcggcgtgtgtaccgacccccagccactgaaagaacagcccgccctgaacgacagccggtactgcctgagcagcagactgagagtgtccgccaccttctggcagaacccccggaaccacttcagatgccaggtgcagttctacggcctgagcgagaacgacgagtggacccaggacagagccaagcccgtgacccagatcgtgtctgccgaagcctggggcagagccgattgcgacgtgaagctggtggaaaagagcttcgagacagacaccaacctgaacttccagaacctgagcgtgatcggcttcagaatcctgctgctgaaagtggccggctttaacctgctgatgaccctgcggctgtggtccagc

SEQ ID NO: 38165 - DNA, 2277 bp, synthetic construct
  source 1..2277: mol_type = other DNA
atggccttaccagtgaccgccttgctcctgccgctggccttgctgctccacgccgccaggccggaggtgcagctggttgaatctggcggaggactggttcagcctggcggatctctgagactgtcttgtgccgccagcggcttcaacatcaaggatacctgtatcggctgggttcgcagagcccctggcaaagaggaagaactggtcgccaaaatctgcaagtacagcggccacaccagatacgccgacagcgtgaagggcagattcaccatcagcgccgacaccagcaagaacaccgcctacctccagatgaacagcctgagagccgaggacaccgccgtgtactattgtgccgctgtgtccgtcagagatgggcactacaattactggggccagggcaccaccgtgaccgtttcttcaggtaccggcggaggcggatctggcggcggaggtagcggtggcggaggatctgaattcgacatcgtgatgacacagagccctgatagcctggccgtgtctctgggagagagagccaccattaactgcaaggccagccagagcgtggactacgacggcgacagcttcctgaactggtatcagcagaagcccggccagcctcctaagctgctgatctacgccgccagcaatctggaaagcggcgtgccaagcagattttccggctctggcagcggcaccgatttcaccctgacaatatccagcctccagcctgaggacgtggccgtgtactactgccagcagagcaacgacgaccctctgacctttggacagggcaccaaggtggaaatcaaactcgaggacctgaagaacgtgttcccacctgaggtggccgtgttcgagcctagcgaggccgagatcagccacacccagaaagccaccctcgtgtgcctggctaccggcttctaccccgaccatgtggaactgtcttggtgggtcaacggcaaagaggtgcacagcggcgtgtgtaccgacccccagccactgaaagaacagcccgccctgaacgacagccggtactgcctgagcagcagactgagagtgtccgccaccttctggcagaacccccggaaccacttcagatgccaggtgcagttctacggcctgagcgagaacgacgagtggacccaggacagagccaagcccgtgacccagatcgtgtctgccgaagcctggggcagagccgattgcgacgtgaagctggtggaaaagagcttcgagacagacaccaacctgaacttccagaacctgagcgtgatcggcttcagaatcctgctgctgaaagtggccggctttaacctgctgatgaccctgcggctgtggtccagcagggccaagcgatctggatctggagcaacaaacttctcactactcaaacaagcaggtgacgtggaggagaatcccgggcctactagtatggactggatttggcgcatccttttccttgtcggcgctgctaccggcgcgcattccttcgaacaagttcagctggttcagagcggagccgaagtgaagaaacctggggcctctgtgaaggtgtcctgcaaagccagcggctacacctttaccagctactggatcaactgggtccgacaggcccctggacaaggactggaatggatgggacagatccttccaggcggaggggacaccaactacaacggcaagttcaagggcagagtgaccatcaccgccgacaccagcacaagcaccgcctacatggaactgagcagcctgagaagcgaggacaccgccgtgtattattgcaccagacgggtgcccatccggctggattattggggacagggaaccctggtcaccgtgtctagtacgcgtatccagaaccctgatcctgccgtgtaccagctgcgggatagcaagagcagcgacaagagcgtgtgtctgttcaccgacttcgacagccagaccaacgtgtcccagagcaaggactccgacgtgtacatcaccgataagtgcgtgctggacatgcggagcatggacttcaagagcaactccgccgtggcctggtccaacaagtccgatttcgcctgcgccaacgccttcaacaacagcattatccccgaggacacattcttcccaagccccgagagcagctgcggctttaccagcgagagctaccagcagggcgtgctgagcgccaccatcctgtacgagatcctgctgggcaaggccaccctgtacgccgtgctggtgtctgccctggtgctgatggctatggtcaagcggaaggacagccgggga

SEQ ID NO: 38166 - DNA, 2289 bp, synthetic construct
  source 1..2289: mol_type = other DNA
atggccttaccagtgaccgccttgctcctgccgctggccttgctgctccacgccgccaggccggaggtgcagctggttgaatctggcggaggactggttcagcctggcggatctctgagactgtcttgtgccgccagcggcttcaacatcaaggatacctgtatcggctgggttcgcagagcccctggcaaagaggaagaactggtcgccaaaatctgcaagtacagcggccacaccagatacgccgacagcgtgaagggcagattcaccatcagcgccgacaccagcaagaacaccgcctacctccagatgaacagcctgagagccgaggacaccgccgtgtactattgtgccgctgtgtccgtcagagatgggcactacaattactggggccagggcaccaccgtgaccgtttcttcaggtaccggcggaggcggatctggcggcggaggtagcggtggcggaggatctgaattcgacatcgtgatgacacagagccctgatagcctggccgtgtctctgggagagagagccaccattaactgcaaggccagccagagcgtggactacgacggcgacagcttcctgaactggtatcagcagaagcccggccagcctcctaagctgctgatctacgccgccagcaatctggaaagcggcgtgccaagcagattttccggctctggcagcggcaccgatttcaccctgacaatatccagcctccagcctgaggacgtggccgtgtactactgccagcagagcaacgacgaccctctgacctttggacagggcaccaaggtggaaatcaaactcgagatccagaaccctgatcctgccgtgtaccagctgcgggatagcaagagcagcgacaagagcgtgtgtctgttcaccgacttcgacagccagaccaacgtgtcccagagcaaggactccgacgtgtacatcaccgataagtgcgtgctggacatgcggagcatggacttcaagagcaactccgccgtggcctggtccaacaagtccgatttcgcctgcgccaacgccttcaacaacagcattatccccgaggacacattcttcccaagccccgagagcagctgcggctttaccagcgagagctaccagcagggcgtgctgagcgccaccatcctgtacgagatcctgctgggcaaggccaccctgtacgccgtgctggtgtctgccctggtgctgatggctatggtcaagcggaaggacagccggggacgcgccaagagaagcggatctggcgtgaagcagaccctgaatttcgacctgctgaagctggctggcgacgtggaatccaacccaggccctactagtatggactggatttggcgcatccttttccttgtcggcgctgctaccggcgcgcattccttcgaacaagttcagctggttcagagcggagccgaagtgaagaaacctggggcctctgtgaaggtgtcctgcaaagccagcggctacacctttaccagctactggatcaactgggtccgacaggcccctggacaaggactggaatggatgggacagatccttccaggcggaggggacaccaactacaacggcaagttcaagggcagagtgaccatcaccgccgacaccagcacaagcaccgcctacatggaactgagcagcctgagaagcgaggacaccgccgtgtattattgcaccagacgggtgcccatccggctggattattggggacagggaaccctggtcaccgtgtctagtacgcgtgaggacctgaagaacgtgttcccacctgaggtggccgtgttcgagcctagcgaggccgagatcagccacacccagaaagccaccctcgtgtgcctggctaccggcttctaccccgaccatgtggaactgtcttggtgggtcaacggcaaagaggtgcacagcggcgtgtgtaccgacccccagccactgaaagaacagcccgccctgaacgacagccggtactgcctgagcagcagactgagagtgtccgccaccttctggcagaacccccggaaccacttcagatgccaggtgcagttctacggcctgagcgagaacgacgagtggacccaggacagagccaagcccgtgacccagatcgtgtctgccgaagcctggggcagagccgattgcgacgtgaagctggtggaaaagagcttcgagacagacaccaacctgaacttccagaacctgagcgtgatcggcttcagaatcctgctgctgaaagtggccggctttaacctgctgatgaccctgcggctgtggtccagc

SEQ ID NO: 38167 - DNA, 3393 bp, synthetic construct
  source 1..3393: mol_type = other DNA
atggccttaccagtgaccgccttgctcctgccgctggccttgctgctccacgccgccaggccggaagtgcagctggttgaatctggcggaggactggttcaggctggcggatctctgagactgtcttgtgccgccagcggcagaacctttagcatgggctggtttagacaggcccctggcaaagagagagagttcgtcgccgccatcacatactctggcggcagcccttactacgccgactctgtgaagggcagattcaccatcagccgggacaacgccaagaacaccgtgtacctccagatgaacagcctgaagcctgaggacaccgccgtgtactactgcgccgccaatccaacatacggcagcgactggaacgccgagaattggggccagggaacccaagtgacagtgtctagcggtaccggcggaggcggatctggcggcggaggtagcggtggcggaggatctgaattcgacatcgtgatgacacagagccctgatagcctggccgtgtctctgggagagagagccaccattaactgcaaggccagccagagcgtggactacgacggcgacagcttcctgaactggtatcagcagaagcccggccagcctcctaagctgctgatctacgccgccagcaatctggaaagcggcgtgccaagcagattttccggctctggcagcggcaccgatttcaccctgacaatatccagcctccagcctgaggacgtggccgtgtactactgccagcagagcaacgacgaccctctgacctttggacagggcaccaaggtggaaatcaaactcgaggacctgaagaacgtgttcccacctgaggtggccgtgttcgagcctagcgaggccgagatcagccacacccagaaagccaccctcgtgtgcctggctaccggcttctaccccgaccatgtggaactgtcttggtgggtcaacggcaaagaggtgcacagcggcgtgtgtaccgacccccagccactgaaagaacagcccgccctgaacgacagccggtactgcctgagcagcagactgagagtgtccgccaccttctggcagaacccccggaaccacttcagatgccaggtgcagttctacggcctgagcgagaacgacgagtggacccaggacagagccaagcccgtgacccagatcgtgtctgccgaagcctggggcagagccgattgcgacgtgaagctggtggaaaagagcttcgagacagacaccaacctgaacttccagaacctgagcgtgatcggcttcagaatcctgctgctgaaagtggccggctttaacctgctgatgaccctgcggctgtggtccagcagggccaagcgatctggatctggagcaacaaacttctcactactcaaacaagcaggtgacgtggaggagaatcccgggcctactagtgccaccatggactggatttggcgcatccttttccttgtcggcgctgctaccggcgcccattccgggcccgaagtgcaactggttgaatccggtggcggcctggtgcaagcaggcggatctctcagacttagctgtgccgcctccggcagaaccttcacaatgggatggtttaggcaggctccagggaaagagagagagttcgtcgccgccatctctctgtctcccacactggcctactacgccgactctgtgaaaggccggttcaccatctccagagataatgccaagaacaccgtggtgctgcaaatgaactctctgaaacccgaggatacagccctgtactattgtgccgctgaccggaagtccgtgatgagcatcagacccgattactggggacagggcacacaagtcacagtgtcctctggatccggcggcggaggatctggcggaggcggatctgggggcggaggctctttcgaacaagttcagctggttcagagcggagccgaagtgaagaaacctggggcctctgtgaaggtgtcctgcaaagccagcggctacacctttaccagctactggatcaactgggtccgacaggcccctggacaaggactggaatggatgggacagatccttccaggcggaggggacaccaactacaacggcaagttcaagggcagagtgaccatcaccgccgacaccagcacaagcaccgcctacatggaactgagcagcctgagaagcgaggacaccgccgtgtattattgcaccagacgggtgcccatccggctggattattggggacagggaaccctggtcaccgtgtctagtacgcgtatccagaaccctgatcctgccgtgtaccagctgcgggatagcaagagcagcgacaagagcgtgtgtctgttcaccgacttcgacagccagaccaacgtgtcccagagcaaggactccgacgtgtacatcaccgataagtgcgtgctggacatgcggagcatggacttcaagagcaactccgccgtggcctggtccaacaagtccgatttcgcctgcgccaacgccttcaacaacagcattatccccgaggacacattcttcccaagccccgagagcagctgcggctttaccagcgagagctaccagcagggcgtgctgagcgccaccatcctgtacgagatcctgctgggcaaggccaccctgtacgccgtgctggtgtctgccctggtgctgatggctatggtcaagcggaaggacagccggggacgcgccaagagaagcggatctggcgtgaagcagaccctgaatttcgacctgctgaagctggctggcgacgtggaatccaacccaggcccttctagaggccatatgaccgagtacaagcccacggtgcgcctcgccacccgcgacgacgtccccagggccgtacgcaccctcgccgccgcgttcgccgactaccccgccacgcgccacaccgtcgatccggaccgccacatcgagcgggtcaccgagctgcaagaactcttcctcacgcgcgtcgggctcgacatcggcaaggtgtgggtcgcggacgacggcgccgcggtggcggtctggaccacgccggagagcgtcgaagcgggggcggtgttcgccgagatcggcccgcgcatggccgagttgagcggttcccggctggccgcgcagcaacagatggaaggcctcctggcgccgcaccggcccaaggagcccgcgtggttcctggccaccgtcggcgtctcgcccgaccaccagggcaagggtctgggcagcgccgtcgtgctccccggagtggaggcggccgagcgcgccggggtgcccgccttcctggagacctccgcgccccgcaacctccccttctacgagcggctcggcttcaccgtcaccgccgacgtcgaggtgcccgaaggaccgcgcacctggtgcatgacccgcaagcccggtgcctga

SEQ ID NO: 38168 - DNA, 2307 bp, synthetic construct
  source 1..2307: mol_type = other DNA
atggccttaccagtgaccgccttgctcctgccgctggccttgctgctccacgccgccaggccggaagtgcagctggttgaatctggcggaggactggttcagcctggcggatctctgagactgtcttgtgccgcctctggcttcgccagcgactactatatcatcggctggttcagacaggcccctggcaaagagagagagggcgtcagctgtatcagcagcagatacgccaacaccaactacgccgacagcgtgaagggcagattcaccatcagccgggacaacgccaagaacaccgtgtacctccagatgaacagcctgaagcctgaggacaccgccgtgtactactgtgccgccgacaccagaagatacacctgtcctgacattgccaccatgcaccggaacttcgattcttggggccagggcacactggtcaccgtttcttctggtaccggcggaggcggatctggcggcggaggtagcggtggcggaggatctgaattcgacatcgtgatgacacagagccctgatagcctggccgtgtctctgggagagagagccaccattaactgcaaggccagccagagcgtggactacgacggcgacagcttcctgaactggtatcagcagaagcccggccagcctcctaagctgctgatctacgccgccagcaatctggaaagcggcgtgccaagcagattttccggctctggcagcggcaccgatttcaccctgacaatatccagcctccagcctgaggacgtggccgtgtactactgccagcagagcaacgacgaccctctgacctttggacagggcaccaaggtggaaatcaaactcgaggacctgaagaacgtgttcccacctgaggtggccgtgttcgagcctagcgaggccgagatcagccacacccagaaagccaccctcgtgtgcctggctaccggcttctaccccgaccatgtggaactgtcttggtgggtcaacggcaaagaggtgcacagcggcgtgtgtaccgacccccagccactgaaagaacagcccgccctgaacgacagccggtactgcctgagcagcagactgagagtgtccgccaccttctggcagaacccccggaaccacttcagatgccaggtgcagttctacggcctgagcgagaacgacgagtggacccaggacagagccaagcccgtgacccagatcgtgtctgccgaagcctggggcagagccgattgcgacgtgaagctggtggaaaagagcttcgagacagacaccaacctgaacttccagaacctgagcgtgatcggcttcagaatcctgctgctgaaagtggccggctttaacctgctgatgaccctgcggctgtggtccagcagggccaagcgatctggatctggagcaacaaacttctcactactcaaacaagcaggtgacgtggaggagaatcccgggcctactagtatggactggatttggcgcatccttttccttgtcggcgctgctaccggcgcgcattccttcgaacaagttcagctggttcagagcggagccgaagtgaagaaacctggggcctctgtgaaggtgtcctgcaaagccagcggctacacctttaccagctactggatcaactgggtccgacaggcccctggacaaggactggaatggatgggacagatccttccaggcggaggggacaccaactacaacggcaagttcaagggcagagtgaccatcaccgccgacaccagcacaagcaccgcctacatggaactgagcagcctgagaagcgaggacaccgccgtgtattattgcaccagacgggtgcccatccggctggattattggggacagggaaccctggtcaccgtgtctagtacgcgtatccagaaccctgatcctgccgtgtaccagctgcgggatagcaagagcagcgacaagagcgtgtgtctgttcaccgacttcgacagccagaccaacgtgtcccagagcaaggactccgacgtgtacatcaccgataagtgcgtgctggacatgcggagcatggacttcaagagcaactccgccgtggcctggtccaacaagtccgatttcgcctgcgccaacgccttcaacaacagcattatccccgaggacacattcttcccaagccccgagagcagctgcggctttaccagcgagagctaccagcagggcgtgctgagcgccaccatcctgtacgagatcctgctgggcaaggccaccctgtacgccgtgctggtgtctgccctggtgctgatggctatggtcaagcggaaggacagccggggataa

SEQ ID NO: 38169 - DNA, 2307 bp, synthetic construct
  source 1..2307: mol_type = other DNA
atggccttaccagtgaccgccttgctcctgccgctggccttgctgctccacgccgccaggccggaagtgcagctggttgaatctggcggaggactggttcagcctggcggatctctgagactgagctgtgaagccagcggcttcgccagcgacgattacatcatcggctggttcagacaggcccctggcaaagagagagagggcgtcagctgcatcagctctaagtacgccaacaccgtgtacaccgacagcgtgaagggcagattcagactgagcagaggcaccgccaagaataccgtgtacctccagatgagcgccctgaagcctgaggataccgccgtgtactactgcgctatggacagccgcagagtgacatgccctgagatcagcaccatgcaccggaacttcgattcttggggccagggcacactggtcacagtgtcatctggtaccggcggaggcggatctggcggcggaggtagcggtggcggaggatctgaattcgacatcgtgatgacacagagccctgatagcctggccgtgtctctgggagagagagccaccattaactgcaaggccagccagagcgtggactacgacggcgacagcttcctgaactggtatcagcagaagcccggccagcctcctaagctgctgatctacgccgccagcaatctggaaagcggcgtgccaagcagattttccggctctggcagcggcaccgatttcaccctgacaatatccagcctccagcctgaggacgtggccgtgtactactgccagcagagcaacgacgaccctctgacctttggacagggcaccaaggtggaaatcaaactcgaggacctgaagaacgtgttcccacctgaggtggccgtgttcgagcctagcgaggccgagatcagccacacccagaaagccaccctcgtgtgcctggctaccggcttctaccccgaccatgtggaactgtcttggtgggtcaacggcaaagaggtgcacagcggcgtgtgtaccgacccccagccactgaaagaacagcccgccctgaacgacagccggtactgcctgagcagcagactgagagtgtccgccaccttctggcagaacccccggaaccacttcagatgccaggtgcagttctacggcctgagcgagaacgacgagtggacccaggacagagccaagcccgtgacccagatcgtgtctgccgaagcctggggcagagccgattgcgacgtgaagctggtggaaaagagcttcgagacagacaccaacctgaacttccagaacctgagcgtgatcggcttcagaatcctgctgctgaaagtggccggctttaacctgctgatgaccctgcggctgtggtccagcagggccaagcgatctggatctggagcaacaaacttctcactactcaaacaagcaggtgacgtggaggagaatcccgggcctactagtatggactggatttggcgcatccttttccttgtcggcgctgctaccggcgcgcattccttcgaacaagttcagctggttcagagcggagccgaagtgaagaaacctggggcctctgtgaaggtgtcctgcaaagccagcggctacacctttaccagctactggatcaactgggtccgacaggcccctggacaaggactggaatggatgggacagatccttccaggcggaggggacaccaactacaacggcaagttcaagggcagagtgaccatcaccgccgacaccagcacaagcaccgcctacatggaactgagcagcctgagaagcgaggacaccgccgtgtattattgcaccagacgggtgcccatccggctggattattggggacagggaaccctggtcaccgtgtctagtacgcgtatccagaaccctgatcctgccgtgtaccagctgcgggatagcaagagcagcgacaagagcgtgtgtctgttcaccgacttcgacagccagaccaacgtgtcccagagcaaggactccgacgtgtacatcaccgataagtgcgtgctggacatgcggagcatggacttcaagagcaactccgccgtggcctggtccaacaagtccgatttcgcctgcgccaacgccttcaacaacagcattatccccgaggacacattcttcccaagccccgagagcagctgcggctttaccagcgagagctaccagcagggcgtgctgagcgccaccatcctgtacgagatcctgctgggcaaggccaccctgtacgccgtgctggtgtctgccctggtgctgatggctatggtcaagcggaaggacagccggggataa

SEQ ID NO: 38170 - DNA, 2304 bp, synthetic construct
  source 1..2304: mol_type = other DNA
atggccttaccagtgaccgccttgctcctgccgctggccttgctgctccacgccgccaggccggaagtgcagctggttgaatctggcggaggactggttcagcctggcggatctctgagactgtcttgtgccgcctctggcttcgccagcgactactatatcatcggctggttcagacaggcccctggcaaagagagagagggcgtcagctgtatcagcagcagatacgccaacaccaactacgccgacagcgtgaagggcagattcaccatcagccgggacaacgccaagaacaccgtgtacctccagatgaacagcctgaagcctgaggacaccgccgtgtactactgtgccgccgacaccagaagatacacctgtcctgacattgccaccatgcaccggaacttcgattcttggggccagggcacactggtcaccgtttcttctggtaccggcggaggcggatctggcggcggaggtagcggtggcggaggatctgaattcgacatcgtgatgacacagagccctgatagcctggccgtgtctctgggagagagagccaccattaactgcaaggccagccagagcgtggactacgacggcgacagcttcctgaactggtatcagcagaagcccggccagcctcctaagctgctgatctacgccgccagcaatctggaaagcggcgtgccaagcagattttccggctctggcagcggcaccgatttcaccctgacaatatccagcctccagcctgaggacgtggccgtgtactactgccagcagagcaacgacgaccctctgacctttggacagggcaccaaggtggaaatcaaactcgagatccagaaccctgatcctgccgtgtaccagctgcgggatagcaagagcagcgacaagagcgtgtgtctgttcaccgacttcgacagccagaccaacgtgtcccagagcaaggactccgacgtgtacatcaccgataagtgcgtgctggacatgcggagcatggacttcaagagcaactccgccgtggcctggtccaacaagtccgatttcgcctgcgccaacgccttcaacaacagcattatccccgaggacacattcttcccaagccccgagagcagctgcggctttaccagcgagagctaccagcagggcgtgctgagcgccaccatcctgtacgagatcctgctgggcaaggccaccctgtacgccgtgctggtgtctgccctggtgctgatggctatggtcaagcggaaggacagccggggaagggccaagcgatctggatctggagcaacaaacttctcactactcaaacaagcaggtgacgtggaggagaatcccgggcctactagtatggactggatttggcgcatccttttccttgtcggcgctgctaccggcgcgcattccttcgaacaagttcagctggttcagagcggagccgaagtgaagaaacctggggcctctgtgaaggtgtcctgcaaagccagcggctacacctttaccagctactggatcaactgggtccgacaggcccctggacaaggactggaatggatgggacagatccttccaggcggaggggacaccaactacaacggcaagttcaagggcagagtgaccatcaccgccgacaccagcacaagcaccgcctacatggaactgagcagcctgagaagcgaggacaccgccgtgtattattgcaccagacgggtgcccatccggctggattattggggacagggaaccctggtcaccgtgtctagtacgcgtgacctgaagaacgtgttcccacctgaggtggccgtgttcgagcctagcgaggccgagatcagccacacccagaaagccaccctcgtgtgcctggctaccggcttctaccccgaccatgtggaactgtcttggtgggtcaacggcaaagaggtgcacagcggcgtgtgtaccgacccccagccactgaaagaacagcccgccctgaacgacagccggtactgcctgagcagcagactgagagtgtccgccaccttctggcagaacccccggaaccacttcagatgccaggtgcagttctacggcctgagcgagaacgacgagtggacccaggacagagccaagcccgtgacccagatcgtgtctgccgaagcctggggcagagccgattgcgacgtgaagctggtggaaaagagcttcgagacagacaccaacctgaacttccagaacctgagcgtgatcggcttcagaatcctgctgctgaaagtggccggctttaacctgctgatgaccctgcggctgtggtccagc

SEQ ID NO: 38171 - DNA, 2304 bp, synthetic construct
  source 1..2304: mol_type = other DNA
atggccttaccagtgaccgccttgctcctgccgctggccttgctgctccacgccgccaggccggaagtgcagctggttgaatctggcggaggactggttcagcctggcggatctctgagactgagctgtgaagccagcggcttcgccagcgacgattacatcatcggctggttcagacaggcccctggcaaagagagagagggcgtcagctgcatcagctctaagtacgccaacaccgtgtacaccgacagcgtgaagggcagattcagactgagcagaggcaccgccaagaataccgtgtacctccagatgagcgccctgaagcctgaggataccgccgtgtactactgcgctatggacagccgcagagtgacatgccctgagatcagcaccatgcaccggaacttcgattcttggggccagggcacactggtcacagtgtcatctggtaccggcggaggcggatctggcggcggaggtagcggtggcggaggatctgaattcgacatcgtgatgacacagagccctgatagcctggccgtgtctctgggagagagagccaccattaactgcaaggccagccagagcgtggactacgacggcgacagcttcctgaactggtatcagcagaagcccggccagcctcctaagctgctgatctacgccgccagcaatctggaaagcggcgtgccaagcagattttccggctctggcagcggcaccgatttcaccctgacaatatccagcctccagcctgaggacgtggccgtgtactactgccagcagagcaacgacgaccctctgacctttggacagggcaccaaggtggaaatcaaactcgagatccagaaccctgatcctgccgtgtaccagctgcgggatagcaagagcagcgacaagagcgtgtgtctgttcaccgacttcgacagccagaccaacgtgtcccagagcaaggactccgacgtgtacatcaccgataagtgcgtgctggacatgcggagcatggacttcaagagcaactccgccgtggcctggtccaacaagtccgatttcgcctgcgccaacgccttcaacaacagcattatccccgaggacacattcttcccaagccccgagagcagctgcggctttaccagcgagagctaccagcagggcgtgctgagcgccaccatcctgtacgagatcctgctgggcaaggccaccctgtacgccgtgctggtgtctgccctggtgctgatggctatggtcaagcggaaggacagccggggaagggccaagcgatctggatctggagcaacaaacttctcactactcaaacaagcaggtgacgtggaggagaatcccgggcctactagtatggactggatttggcgcatccttttccttgtcggcgctgctaccggcgcgcattccttcgaacaagttcagctggttcagagcggagccgaagtgaagaaacctggggcctctgtgaaggtgtcctgcaaagccagcggctacacctttaccagctactggatcaactgggtccgacaggcccctggacaaggactggaatggatgggacagatccttccaggcggaggggacaccaactacaacggcaagttcaagggcagagtgaccatcaccgccgacaccagcacaagcaccgcctacatggaactgagcagcctgagaagcgaggacaccgccgtgtattattgcaccagacgggtgcccatccggctggattattggggacagggaaccctggtcaccgtgtctagtacgcgtgacctgaagaacgtgttcccacctgaggtggccgtgttcgagcctagcgaggccgagatcagccacacccagaaagccaccctcgtgtgcctggctaccggcttctaccccgaccatgtggaactgtcttggtgggtcaacggcaaagaggtgcacagcggcgtgtgtaccgacccccagccactgaaagaacagcccgccctgaacgacagccggtactgcctgagcagcagactgagagtgtccgccaccttctggcagaacccccggaaccacttcagatgccaggtgcagttctacggcctgagcgagaacgacgagtggacccaggacagagccaagcccgtgacccagatcgtgtctgccgaagcctggggcagagccgattgcgacgtgaagctggtggaaaagagcttcgagacagacaccaacctgaacttccagaacctgagcgtgatcggcttcagaatcctgctgctgaaagtggccggctttaacctgctgatgaccctgcggctgtggtccagc

SEQ ID NO: 38172 - DNA, 2277 bp, synthetic construct
  source 1..2277: mol_type = other DNA
atggccttaccagtgaccgccttgctcctgccgctggccttgctgctccacgccgccaggccgcaagtcaaactggaagaaagcggtggcggcctggtgcaacctggcgaatctctgagactgagctgtagcgccagcggctccatcttcaaggtgttcagagtgttcgccatgagctggtacaggcaaggccctggcaagcagagagagctggtcgcctctatcagcagcggcgagacaaccacatacgccgaatctgtgaaaggccggttcaccatcagccgggataatgccaagaataccgcctatctccagatggactccctgaagcctgaagatacagctgtgtactactgcaacgccgaccataccttcaccggcgatttttggggccagggaacccaagtgaccgtgtctagtggtaccggcggaggcggatctggcggcggaggtagcggtggcggaggatctgaattcgacatcgtgatgacacagagccctgatagcctggccgtgtctctgggagagagagccaccattaactgcaaggccagccagagcgtggactacgacggcgacagcttcctgaactggtatcagcagaagcccggccagcctcctaagctgctgatctacgccgccagcaatctggaaagcggcgtgccaagcagattttccggctctggcagcggcaccgatttcaccctgacaatatccagcctccagcctgaggacgtggccgtgtactactgccagcagagcaacgacgaccctctgacctttggacagggcaccaaggtggaaatcaaactcgagatccagaaccctgatcctgccgtgtaccagctgcgggatagcaagagcagcgacaagagcgtgtgtctgttcaccgacttcgacagccagaccaacgtgtcccagagcaaggactccgacgtgtacatcaccgataagtgcgtgctggacatgcggagcatggacttcaagagcaactccgccgtggcctggtccaacaagtccgatttcgcctgcgccaacgccttcaacaacagcattatccccgaggacacattcttcccaagccccgagagcagctgcggctttaccagcgagagctaccagcagggcgtgctgagcgccaccatcctgtacgagatcctgctgggcaaggccaccctgtacgccgtgctggtgtctgccctggtgctgatggctatggtcaagcggaaggacagccggggaagggccaagcgatctggatctggagcaacaaacttctcactactcaaacaagcaggtgacgtggaggagaatcccgggcctactagtatggactggatttggcgcatccttttccttgtcggcgctgctaccggcgcgcattccttcgaacaagttcagctggttcagagcggagccgaagtgaagaaacctggggcctctgtgaaggtgtcctgcaaagccagcggctacacctttaccagctactggatcaactgggtccgacaggcccctggacaaggactggaatggatgggacagatccttccaggcggaggggacaccaactacaacggcaagttcaagggcagagtgaccatcaccgccgacaccagcacaagcaccgcctacatggaactgagcagcctgagaagcgaggacaccgccgtgtattattgcaccagacgggtgcccatccggctggattattggggacagggaaccctggtcaccgtgtctagtacgcgtgacctgaagaacgtgttcccacctgaggtggccgtgttcgagcctagcgaggccgagatcagccacacccagaaagccaccctcgtgtgcctggctaccggcttctaccccgaccatgtggaactgtcttggtgggtcaacggcaaagaggtgcacagcggcgtgtgtaccgacccccagccactgaaagaacagcccgccctgaacgacagccggtactgcctgagcagcagactgagagtgtccgccaccttctggcagaacccccggaaccacttcagatgccaggtgcagttctacggcctgagcgagaacgacgagtggacccaggacagagccaagcccgtgacccagatcgtgtctgccgaagcctggggcagagccgattgcgacgtgaagctggtggaaaagagcttcgagacagacaccaacctgaacttccagaacctgagcgtgatcggcttcagaatcctgctgctgaaagtggccggctttaacctgctgatgaccctgcggctgtggtccagc

SEQ ID NO: 38173 - DNA, 2283 bp, synthetic construct
  source 1..2283: mol_type = other DNA
atggccttaccagtgaccgccttgctcctgccgctggccttgctgctccacgccgccaggccggacatcgtgatgacacagagccctgatagcctggccgtgtctctgggagagagagccaccattaactgcaaggccagccagagcgtggactacgacggcgacagcttcctgaactggtatcagcagaagcccggccagcctcctaagctgctgatctacgccgccagcaatctggaaagcggcgtgccaagcagattttccggctctggcagcggcaccgatttcaccctgacaatatccagcctccagcctgaggacgtggccgtgtactactgccagcagagcaacgacgaccctctgacctttggacagggcaccaaggtggaaatcaaactcgaggacctgaagaacgtgttcccacctgaggtggccgtgttcgagcctagcgaggccgagatcagccacacccagaaagccaccctcgtgtgcctggctaccggcttctaccccgaccatgtggaactgtcttggtgggtcaacggcaaagaggtgcacagcggcgtgtgtaccgacccccagccactgaaagaacagcccgccctgaacgacagccggtactgcctgagcagcagactgagagtgtccgccaccttctggcagaacccccggaaccacttcagatgccaggtgcagttctacggcctgagcgagaacgacgagtggacccaggacagagccaagcccgtgacccagatcgtgtctgccgaagcctggggcagagccgattgcgacgtgaagctggtggaaaagagcttcgagacagacaccaacctgaacttccagaacctgagcgtgatcggcttcagaatcctgctgctgaaagtggccggctttaacctgctgatgaccctgcggctgtggtccagcagggccaagcgatctggatctggagcaacaaacttctcactactcaaacaagcaggtgacgtggaggagaatcccgggcctactagtgccaccatggactggatttggcgcatccttttccttgtcggcgctgctaccggcgcccattccgggcccgaagtgcagctggttgaatctggcggaggactggttcaggctggcggatctctgagactgtcttgtgccgccagcggcagaacctttagcatgggctggtttagacaggcccctggcaaagagagagagttcgtcgccgccatcacatactctggcggcagcccttactacgccgactctgtgaagggcagattcaccatcagccgggacaacgccaagaacaccgtgtacctccagatgaacagcctgaagcctgaggacaccgccgtgtactactgcgccgccaatccaacatacggcagcgactggaacgccgagaattggggccagggaacccaagtgacagtgtctagcggatccggcggcggaggatctggcggaggcggatctgggggcggaggctctttcgaacaagttcagctggttcagagcggagccgaagtgaagaaacctggggcctctgtgaaggtgtcctgcaaagccagcggctacacctttaccagctactggatcaactgggtccgacaggcccctggacaaggactggaatggatgggacagatccttccaggcggaggggacaccaactacaacggcaagttcaagggcagagtgaccatcaccgccgacaccagcacaagcaccgcctacatggaactgagcagcctgagaagcgaggacaccgccgtgtattattgcaccagacgggtgcccatccggctggattattggggacagggaaccctggtcaccgtgtctagtacgcgtatccagaaccctgatcctgccgtgtaccagctgcgggatagcaagagcagcgacaagagcgtgtgtctgttcaccgacttcgacagccagaccaacgtgtcccagagcaaggactccgacgtgtacatcaccgataagtgcgtgctggacatgcggagcatggacttcaagagcaactccgccgtggcctggtccaacaagtccgatttcgcctgcgccaacgccttcaacaacagcattatccccgaggacacattcttcccaagccccgagagcagctgcggctttaccagcgagagctaccagcagggcgtgctgagcgccaccatcctgtacgagatcctgctgggcaaggccaccctgtacgccgtgctggtgtctgccctggtgctgatggctatggtcaagcggaaggacagccggggataa

SEQ ID NO: 38174 - DNA, 2286 bp, synthetic construct
  source 1..2286: mol_type = other DNA
atggccttaccagtgaccgccttgctcctgccgctggccttgctgctccacgccgccaggccggacatcgtgatgacacagagccctgatagcctggccgtgtctctgggagagagagccaccattaactgcaaggccagccagagcgtggactacgacggcgacagcttcctgaactggtatcagcagaagcccggccagcctcctaagctgctgatctacgccgccagcaatctggaaagcggcgtgccaagcagattttccggctctggcagcggcaccgatttcaccctgacaatatccagcctccagcctgaggacgtggccgtgtactactgccagcagagcaacgacgaccctctgacctttggacagggcaccaaggtggaaatcaaactcgaggacctgaagaacgtgttcccacctgaggtggccgtgttcgagcctagcgaggccgagatcagccacacccagaaagccaccctcgtgtgcctggctaccggcttctaccccgaccatgtggaactgtcttggtgggtcaacggcaaagaggtgcacagcggcgtgtgtaccgacccccagccactgaaagaacagcccgccctgaacgacagccggtactgcctgagcagcagactgagagtgtccgccaccttctggcagaacccccggaaccacttcagatgccaggtgcagttctacggcctgagcgagaacgacgagtggacccaggacagagccaagcccgtgacccagatcgtgtctgccgaagcctggggcagagccgattgcgacgtgaagctggtggaaaagagcttcgagacagacaccaacctgaacttccagaacctgagcgtgatcggcttcagaatcctgctgctgaaagtggccggctttaacctgctgatgaccctgcggctgtggtccagcagggccaagcgatctggatctggagcaacaaacttctcactactcaaacaagcaggtgacgtggaggagaatcccgggcctactagtgccaccatggactggatttggcgcatccttttccttgtcggcgctgctaccggcgcccattccgggcccgaagtgcaactggtggaatctgggggcggactggtgcagccaggcggaagtctgaggctgtcttgtgccgcctccggcagcatcttcggcttcaacgacatggcctggtatcggcaggctcccggaaaacagcgcgagctggtggctctgattagcagagtgggcgtgaccagcagcgccgactctgtgaagggcagattcacaatctccagagtgaacgccaaggatacagtgtacctccagatgaactctctgaaacctgaggatacagcagtgtactattgctacatggaccagcggctggacggcagcacactggcctactggggacagggaactcaagtgacagtgtctagcggatccggcggcggaggatctggcggaggcggatctgggggcggaggctctttcgaacaagttcagctggttcagagcggagccgaagtgaagaaacctggggcctctgtgaaggtgtcctgcaaagccagcggctacacctttaccagctactggatcaactgggtccgacaggcccctggacaaggactggaatggatgggacagatccttccaggcggaggggacaccaactacaacggcaagttcaagggcagagtgaccatcaccgccgacaccagcacaagcaccgcctacatggaactgagcagcctgagaagcgaggacaccgccgtgtattattgcaccagacgggtgcccatccggctggattattggggacagggaaccctggtcaccgtgtctagtacgcgtatccagaaccctgatcctgccgtgtaccagctgcgggatagcaagagcagcgacaagagcgtgtgtctgttcaccgacttcgacagccagaccaacgtgtcccagagcaaggactccgacgtgtacatcaccgataagtgcgtgctggacatgcggagcatggacttcaagagcaactccgccgtggcctggtccaacaagtccgatttcgcctgcgccaacgccttcaacaacagcattatccccgaggacacattcttcccaagccccgagagcagctgcggctttaccagcgagagctaccagcagggcgtgctgagcgccaccatcctgtacgagatcctgctgggcaaggccaccctgtacgccgtgctggtgtctgccctggtgctgatggctatggtcaagcggaaggacagccggggataa

SEQ ID NO: 38175 - DNA, 2274 bp, synthetic construct
  source 1..2274: mol_type = other DNA
atggccttaccagtgaccgccttgctcctgccgctggccttgctgctccacgccgccaggccggacatcgtgatgacacagagccctgatagcctggccgtgtctctgggagagagagccaccattaactgcaaggccagccagagcgtggactacgacggcgacagcttcctgaactggtatcagcagaagcccggccagcctcctaagctgctgatctacgccgccagcaatctggaaagcggcgtgccaagcagattttccggctctggcagcggcaccgatttcaccctgacaatatccagcctccagcctgaggacgtggccgtgtactactgccagcagagcaacgacgaccctctgacctttggacagggcaccaaggtggaaatcaaactcgaggacctgaagaacgtgttcccacctgaggtggccgtgttcgagcctagcgaggccgagatcagccacacccagaaagccaccctcgtgtgcctggctaccggcttctaccccgaccatgtggaactgtcttggtgggtcaacggcaaagaggtgcacagcggcgtgtgtaccgacccccagccactgaaagaacagcccgccctgaacgacagccggtactgcctgagcagcagactgagagtgtccgccaccttctggcagaacccccggaaccacttcagatgccaggtgcagttctacggcctgagcgagaacgacgagtggacccaggacagagccaagcccgtgacccagatcgtgtctgccgaagcctggggcagagccgattgcgacgtgaagctggtggaaaagagcttcgagacagacaccaacctgaacttccagaacctgagcgtgatcggcttcagaatcctgctgctgaaagtggccggctttaacctgctgatgaccctgcggctgtggtccagcagggccaagcgatctggatctggagcaacaaacttctcactactcaaacaagcaggtgacgtggaggagaatcccgggcctactagtgccaccatggactggatttggcgcatccttttccttgtcggcgctgctaccggcgcccattccgggcccgaggtgcagctggttgaatctggcggaggactggttcaggctggcggatctctgagactgtcttgtgccgccagcggctctgtgttcagcggcaatgtgatgggctggtacagacaggcccctggcaaagaaagagagtgggttgccgccattgccagcggcggcagcatctactacagagactctgtgaagggcagattcaccatcagccgggacaacgccaagaacaccgtgtacctccagatgaacagcctgaagcctgaggacaccgccgtgtactactgcaactctcaccctcctacactgccctattggggcctgggaacccaagtgacagtgtcctctggatccggcggcggaggatctggcggaggcggatctgggggcggaggctctttcgaacaagttcagctggttcagagcggagccgaagtgaagaaacctggggcctctgtgaaggtgtcctgcaaagccagcggctacacctttaccagctactggatcaactgggtccgacaggcccctggacaaggactggaatggatgggacagatccttccaggcggaggggacaccaactacaacggcaagttcaagggcagagtgaccatcaccgccgacaccagcacaagcaccgcctacatggaactgagcagcctgagaagcgaggacaccgccgtgtattattgcaccagacgggtgcccatccggctggattattggggacagggaaccctggtcaccgtgtctagtacgcgtatccagaaccctgatcctgccgtgtaccagctgcgggatagcaagagcagcgacaagagcgtgtgtctgttcaccgacttcgacagccagaccaacgtgtcccagagcaaggactccgacgtgtacatcaccgataagtgcgtgctggacatgcggagcatggacttcaagagcaactccgccgtggcctggtccaacaagtccgatttcgcctgcgccaacgccttcaacaacagcattatccccgaggacacattcttcccaagccccgagagcagctgcggctttaccagcgagagctaccagcagggcgtgctgagcgccaccatcctgtacgagatcctgctgggcaaggccaccctgtacgccgtgctggtgtctgccctggtgctgatggctatggtcaagcggaaggacagccggggataa

SEQ ID NO: 38176 - DNA, 2268 bp, synthetic construct
  source 1..2268: mol_type = other DNA
atggccttaccagtgaccgccttgctcctgccgctggccttgctgctccacgccgccaggccggacatcgtgatgacacagagccctgatagcctggccgtgtctctgggagagagagccaccattaactgcaaggccagccagagcgtggactacgacggcgacagcttcctgaactggtatcagcagaagcccggccagcctcctaagctgctgatctacgccgccagcaatctggaaagcggcgtgccaagcagattttccggctctggcagcggcaccgatttcaccctgacaatatccagcctccagcctgaggacgtggccgtgtactactgccagcagagcaacgacgaccctctgacctttggacagggcaccaaggtggaaatcaaactcgaggacctgaagaacgtgttcccacctgaggtggccgtgttcgagcctagcgaggccgagatcagccacacccagaaagccaccctcgtgtgcctggctaccggcttctaccccgaccatgtggaactgtcttggtgggtcaacggcaaagaggtgcacagcggcgtgtgtaccgacccccagccactgaaagaacagcccgccctgaacgacagccggtactgcctgagcagcagactgagagtgtccgccaccttctggcagaacccccggaaccacttcagatgccaggtgcagttctacggcctgagcgagaacgacgagtggacccaggacagagccaagcccgtgacccagatcgtgtctgccgaagcctggggcagagccgattgcgacgtgaagctggtggaaaagagcttcgagacagacaccaacctgaacttccagaacctgagcgtgatcggcttcagaatcctgctgctgaaagtggccggctttaacctgctgatgaccctgcggctgtggtccagcagggccaagcgatctggatctggagcaacaaacttctcactactcaaacaagcaggtgacgtggaggagaatcccgggcctactagtgccaccatggactggatttggcgcatccttttccttgtcggcgctgctaccggcgcccattccgggcccgaagttcagctgctggaatctggcggaggactcgttcaacctggcggctctctgagactgagctgtgccgcttctggcttcagcttctctagctacgccctgagctgggttcgacaagctcccggaaagggccttgaatgggtgtccagcatcggcgagaatgacggcaccacagactatgccgatgccgtgaaaggccggtttaccatcagcagagacaattccaagaacacgctctatctgcaaatgaactccctgcgcgtggaagatacagccgtgtattattgcgtgaaggacggcatccactggggacagggaaccctggttacagtgtctagcggatccggcggcggaggatctggcggaggcggatctgggggcggaggctctttcgaacaagttcagctggttcagagcggagccgaagtgaagaaacctggggcctctgtgaaggtgtcctgcaaagccagcggctacacctttaccagctactggatcaactgggtccgacaggcccctggacaaggactggaatggatgggacagatccttccaggcggaggggacaccaactacaacggcaagttcaagggcagagtgaccatcaccgccgacaccagcacaagcaccgcctacatggaactgagcagcctgagaagcgaggacaccgccgtgtattattgcaccagacgggtgcccatccggctggattattggggacagggaaccctggtcaccgtgtctagtacgcgtatccagaaccctgatcctgccgtgtaccagctgcgggatagcaagagcagcgacaagagcgtgtgtctgttcaccgacttcgacagccagaccaacgtgtcccagagcaaggactccgacgtgtacatcaccgataagtgcgtgctggacatgcggagcatggacttcaagagcaactccgccgtggcctggtccaacaagtccgatttcgcctgcgccaacgccttcaacaacagcattatccccgaggacacattcttcccaagccccgagagcagctgcggctttaccagcgagagctaccagcagggcgtgctgagcgccaccatcctgtacgagatcctgctgggcaaggccaccctgtacgccgtgctggtgtctgccctggtgctgatggctatggtcaagcggaaggacagccggggataa

SEQ ID NO: 38177 - DNA, 3375 bp, synthetic construct
  source 1..3375: mol_type = other DNA
atgggacccagactgctgttttgggctctgctgtgtctgctcggcacaggacctgttgaagctggcgtgacacagagccccacacacctgattaagaccagaggccagcaggccacactgagatgcagccctatcagcggccacaccagcgtgtactggtatcagcaggctctcggactgggcctccagttcctgctttggtacgacgagggcgaagagagaaaccggggcaacttccctcctcggttttccggcagacagttccccaactacagcagcgagctgaacgtgaacgccctggaactggaagatagcgccctgtacctgtgtgcctcttctcttggtggacctcgcggactggctggactgagaggggatgagcagtttttcggccctggcaccagactgaccgtgctggaaggtaccggcggaggcggatctggcggcggagaattcgacatcgtgatgacacagagccctgatagcctggccgtgtctctgggagagagagccaccattaactgcaaggccagccagagcgtggactacgacggcgacagcttcctgaactggtatcagcagaagcccggccagcctcctaagctgctgatctacgccgccagcaatctggaaagcggcgtgccaagcagattttccggctctggcagcggcaccgatttcaccctgacaatatccagcctccagcctgaggacgtggccgtgtactactgccagcagagcaacgacgaccctctgacctttggacagggcaccaaggtggaaatcaaactcgaggacctgaagaacgtgttcccacctgaggtggccgtgttcgagcctagcgaggccgagatcagccacacccagaaagccaccctcgtgtgcctggctaccggcttctaccccgaccatgtggaactgtcttggtgggtcaacggcaaagaggtgcacagcggcgtgtgtaccgacccccagccactgaaagaacagcccgccctgaacgacagccggtactgcctgagcagcagactgagagtgtccgccaccttctggcagaacccccggaaccacttcagatgccaggtgcagttctacggcctgagcgagaacgacgagtggacccaggacagagccaagcccgtgacccagatcgtgtctgccgaagcctggggcagagccgattgcgacgtgaagctggtggaaaagagcttcgagacagacaccaacctgaacttccagaacctgagcgtgatcggcttcagaatcctgctgctgaaagtggccggctttaacctgctgatgaccctgcggctgtggtccagcagggccaagcgatctggatctggagcaacaaacttctcactactcaaacaagcaggtgacgtggaggagaatcccgggcctactagtgccaccatggactggatttggcgcatccttttccttgtcggcgctgctaccggcgcccattccgggcccgaagtgcagctggttgaatctggcggaggactggttcaggctggcggatctctgagactgtcttgtgccgccagcggcagaacctttagcatgggctggtttagacaggcccctggcaaagagagagagttcgtcgccgccatcacatactctggcggcagcccttactacgccgactctgtgaagggcagattcaccatcagccgggacaacgccaagaacaccgtgtacctccagatgaacagcctgaagcctgaggacaccgccgtgtactactgcgccgccaatccaacatacggcagcgactggaacgccgagaattggggccagggaacccaagtgacagtgtctagcggatccggcggcggaggatctggcggaggcggatctgggggcggaggctctttcgaacaagttcagctggttcagagcggagccgaagtgaagaaacctggggcctctgtgaaggtgtcctgcaaagccagcggctacacctttaccagctactggatcaactgggtccgacaggcccctggacaaggactggaatggatgggacagatccttccaggcggaggggacaccaactacaacggcaagttcaagggcagagtgaccatcaccgccgacaccagcacaagcaccgcctacatggaactgagcagcctgagaagcgaggacaccgccgtgtattattgcaccagacgggtgcccatccggctggattattggggacagggaaccctggtcaccgtgtctagtacgcgtatccagaaccctgatcctgccgtgtaccagctgcgggatagcaagagcagcgacaagagcgtgtgtctgttcaccgacttcgacagccagaccaacgtgtcccagagcaaggactccgacgtgtacatcaccgataagtgcgtgctggacatgcggagcatggacttcaagagcaactccgccgtggcctggtccaacaagtccgatttcgcctgcgccaacgccttcaacaacagcattatccccgaggacacattcttcccaagccccgagagcagctgcggctttaccagcgagagctaccagcagggcgtgctgagcgccaccatcctgtacgagatcctgctgggcaaggccaccctgtacgccgtgctggtgtctgccctggtgctgatggctatggtcaagcggaaggacagccggggacgcgccaagagaagcggatctggcgtgaagcagaccctgaatttcgacctgctgaagctggctggcgacgtggaatccaacccaggcccttctagaggccatatgaccgagtacaagcccacggtgcgcctcgccacccgcgacgacgtccccagggccgtacgcaccctcgccgccgcgttcgccgactaccccgccacgcgccacaccgtcgatccggaccgccacatcgagcgggtcaccgagctgcaagaactcttcctcacgcgcgtcgggctcgacatcggcaaggtgtgggtcgcggacgacggcgccgcggtggcggtctggaccacgccggagagcgtcgaagcgggggcggtgttcgccgagatcggcccgcgcatggccgagttgagcggttcccggctggccgcgcagcaacagatggaaggcctcctggcgccgcaccggcccaaggagcccgcgtggttcctggccaccgtcggcgtctcgcccgaccaccagggcaagggtctgggcagcgccgtcgtgctccccggagtggaggcggccgagcgcgccggggtgcccgccttcctggagacctccgcgccccgcaacctccccttctacgagcggctcggcttcaccgtcaccgccgacgtcgaggtgcccgaaggaccgcgcacctggtgcatgacccgcaagcccggtgcctga

SEQ ID NO: 38178 - DNA, 3372 bp, synthetic construct
  source 1..3372: mol_type = other DNA
atgggacccagactgctgttttgggctctgctgtgtctgctcggcacaggacctgttgaagctggcgtgacacagagccccacacacctgattaagaccagaggccagcaggccacactgagatgcagccctatcagcggccacaccagcgtgtactggtatcagcaggctctcggactgggcctccagttcctgctttggtacgacgagggcgaagagagaaaccggggcaacttccctcctcggttttccggcagacagttccccaactacagcagcgagctgaacgtgaacgccctggaactggaagatagcgccctgtacctgtgtgccagctctctcggcggagatgaactgggagccgatggcaacgagcagttctttggccctggcaccagactgaccgtgctggaaggtaccggcggaggcggatctggcggcggaagcgaattcgacatcgtgatgacacagagccctgatagcctggccgtgtctctgggagagagagccaccattaactgcaaggccagccagagcgtggactacgacggcgacagcttcctgaactggtatcagcagaagcccggccagcctcctaagctgctgatctacgccgccagcaatctggaaagcggcgtgccaagcagattttccggctctggcagcggcaccgatttcaccctgacaatatccagcctccagcctgaggacgtggccgtgtactactgccagcagagcaacgacgaccctctgacctttggacagggcaccaaggtggaaatcaaactcgaggacctgaagaacgtgttcccacctgaggtggccgtgttcgagcctagcgaggccgagatcagccacacccagaaagccaccctcgtgtgcctggctaccggcttctaccccgaccatgtggaactgtcttggtgggtcaacggcaaagaggtgcacagcggcgtgtgtaccgacccccagccactgaaagaacagcccgccctgaacgacagccggtactgcctgagcagcagactgagagtgtccgccaccttctggcagaacccccggaaccacttcagatgccaggtgcagttctacggcctgagcgagaacgacgagtggacccaggacagagccaagcccgtgacccagatcgtgtctgccgaagcctggggcagagccgattgcgacgtgaagctggtggaaaagagcttcgagacagacaccaacctgaacttccagaacctgagcgtgatcggcttcagaatcctgctgctgaaagtggccggctttaacctgctgatgaccctgcggctgtggtccagcagggccaagcgatctggatctggagcaacaaacttctcactactcaaacaagcaggtgacgtggaggagaatcccgggcctactagtgccaccatggactggatttggcgcatccttttccttgtcggcgctgctaccggcgcccattccgggcccgaagtgcagctggttgaatctggcggaggactggttcaggctggcggatctctgagactgtcttgtgccgccagcggcagaacctttagcatgggctggtttagacaggcccctggcaaagagagagagttcgtcgccgccatcacatactctggcggcagcccttactacgccgactctgtgaagggcagattcaccatcagccgggacaacgccaagaacaccgtgtacctccagatgaacagcctgaagcctgaggacaccgccgtgtactactgcgccgccaatccaacatacggcagcgactggaacgccgagaattggggccagggaacccaagtgacagtgtctagcggatccggcggcggaggatctggcggaggcggatctgggggcggaggctctttcgaacaagttcagctggttcagagcggagccgaagtgaagaaacctggggcctctgtgaaggtgtcctgcaaagccagcggctacacctttaccagctactggatcaactgggtccgacaggcccctggacaaggactggaatggatgggacagatccttccaggcggaggggacaccaactacaacggcaagttcaagggcagagtgaccatcaccgccgacaccagcacaagcaccgcctacatggaactgagcagcctgagaagcgaggacaccgccgtgtattattgcaccagacgggtgcccatccggctggattattggggacagggaaccctggtcaccgtgtctagtacgcgtatccagaaccctgatcctgccgtgtaccagctgcgggatagcaagagcagcgacaagagcgtgtgtctgttcaccgacttcgacagccagaccaacgtgtcccagagcaaggactccgacgtgtacatcaccgataagtgcgtgctggacatgcggagcatggacttcaagagcaactccgccgtggcctggtccaacaagtccgatttcgcctgcgccaacgccttcaacaacagcattatccccgaggacacattcttcccaagccccgagagcagctgcggctttaccagcgagagctaccagcagggcgtgctgagcgccaccatcctgtacgagatcctgctgggcaaggccaccctgtacgccgtgctggtgtctgccctggtgctgatggctatggtcaagcggaaggacagccggggacgcgccaagagaagcggatctggcgtgaagcagaccctgaatttcgacctgctgaagctggctggcgacgtggaatccaacccaggcccttctagaggccatatgaccgagtacaagcccacggtgcgcctcgccacccgcgacgacgtccccagggccgtacgcaccctcgccgccgcgttcgccgactaccccgccacgcgccacaccgtcgatccggaccgccacatcgagcgggtcaccgagctgcaagaactcttcctcacgcgcgtcgggctcgacatcggcaaggtgtgggtcgcggacgacggcgccgcggtggcggtctggaccacgccggagagcgtcgaagcgggggcggtgttcgccgagatcggcccgcgcatggccgagttgagcggttcccggctggccgcgcagcaacagatggaaggcctcctggcgccgcaccggcccaaggagcccgcgtggttcctggccaccgtcggcgtctcgcccgaccaccagggcaagggtctgggcagcgccgtcgtgctccccggagtggaggcggccgagcgcgccggggtgcccgccttcctggagacctccgcgccccgcaacctccccttctacgagcggctcggcttcaccgtcaccgccgacgtcgaggtgcccgaaggaccgcgcacctggtgcatgacccgcaagcccggtgcctga

SEQ ID NO: 38179 - DNA, 2847 bp, synthetic construct
  source 1..2847: mol_type = other DNA
atggccttaccagtgaccgccttgctcctgccgctggccttgctgctccacgccgccaggccggacatcgtgatgacacagagccctgatagcctggccgtgtctctgggagagagagccaccattaactgcaaggccagccagagcgtggactacgacggcgacagcttcctgaactggtatcagcagaagcccggccagcctcctaagctgctgatctacgccgccagcaatctggaaagcggcgtgccaagcagattttccggctctggcagcggcaccgatttcaccctgacaatatccagcctccagcctgaggacgtggccgtgtactactgccagcagagcaacgacgaccctctgacctttggacagggcaccaaggtggaaatcaaactcgaggacctgaagaacgtgttcccacctgaggtggccgtgttcgagcctagcgaggccgagatcagccacacccagaaagccaccctcgtgtgcctggctaccggcttctaccccgaccatgtggaactgtcttggtgggtcaacggcaaagaggtgcacagcggcgtgtgtaccgacccccagccactgaaagaacagcccgccctgaacgacagccggtactgcctgagcagcagactgagagtgtccgccaccttctggcagaacccccggaaccacttcagatgccaggtgcagttctacggcctgagcgagaacgacgagtggacccaggacagagccaagcccgtgacccagatcgtgtctgccgaagcctggggcagagccgattgcgacgtgaagctggtggaaaagagcttcgagacagacaccaacctgaacttccagaacctgagcgtgatcggcttcagaatcctgctgctgaaagtggccggctttaacctgctgatgaccctgcggctgtggtccagcagggccaagcgatctggatctggagcaacaaacttctcactactcaaacaagcaggtgacgtggaggagaatcccgggcctactagtgccaccatggactggatttggcgcatccttttccttgtcggcgctgctaccggcgcccattccgggcccatgggaagctggcttgagttctaccacagactcaacgccattgacagcaggctgtgggcacttggcggaagcgaagctgaactcgccgcttttgaaaaagaaattgccgctttcgagtccgagcttcaggcttacaaaggcaaagggaatcctgaggtcgagagcctgagagatcacgctgcccacattagagagtggttgcaggcataccggcacaatggatccggcggcggaggatctggcggaggcggatctgggggcggaggctctttcgaacaagttcagctggttcagagcggagccgaagtgaagaaacctggggcctctgtgaaggtgtcctgcaaagccagcggctacacctttaccagctactggatcaactgggtccgacaggcccctggacaaggactggaatggatgggacagatccttccaggcggaggggacaccaactacaacggcaagttcaagggcagagtgaccatcaccgccgacaccagcacaagcaccgcctacatggaactgagcagcctgagaagcgaggacaccgccgtgtattattgcaccagacgggtgcccatccggctggattattggggacagggaaccctggtcaccgtgtctagtacgcgtatccagaaccctgatcctgccgtgtaccagctgcgggatagcaagagcagcgacaagagcgtgtgtctgttcaccgacttcgacagccagaccaacgtgtcccagagcaaggactccgacgtgtacatcaccgataagtgcgtgctggacatgcggagcatggacttcaagagcaactccgccgtggcctggtccaacaagtccgatttcgcctgcgccaacgccttcaacaacagcattatccccgaggacacattcttcccaagccccgagagcagctgcggctttaccagcgagagctaccagcagggcgtgctgagcgccaccatcctgtacgagatcctgctgggcaaggccaccctgtacgccgtgctggtgtctgccctggtgctgatggctatggtcaagcggaaggacagccggggacgcgccaagagaagcggatctggcgtgaagcagaccctgaatttcgacctgctgaagctggctggcgacgtggaatccaacccaggcccttctagaggccatatgaccgagtacaagcccacggtgcgcctcgccacccgcgacgacgtccccagggccgtacgcaccctcgccgccgcgttcgccgactaccccgccacgcgccacaccgtcgatccggaccgccacatcgagcgggtcaccgagctgcaagaactcttcctcacgcgcgtcgggctcgacatcggcaaggtgtgggtcgcggacgacggcgccgcggtggcggtctggaccacgccggagagcgtcgaagcgggggcggtgttcgccgagatcggcccgcgcatggccgagttgagcggttcccggctggccgcgcagcaacagatggaaggcctcctggcgccgcaccggcccaaggagcccgcgtggttcctggccaccgtcggcgtctcgcccgaccaccagggcaagggtctgggcagcgccgtcgtgctccccggagtggaggcggccgagcgcgccggggtgcccgccttcctggagacctccgcgccccgcaacctccccttctacgagcggctcggcttcaccgtcaccgccgacgtcgaggtgcccgaaggaccgcgcacctggtgcatgacccgcaagcccggtgcctga

SEQ ID NO: 38180 - DNA, 2847 bp, synthetic construct
  source 1..2847: mol_type = other DNA
atggccttaccagtgaccgccttgctcctgccgctggccttgctgctccacgccgccaggccggcatgcatgggcagttggttcgagttctacgaccggctgaatgccatcgacgccagactgtgggctctcggaggatctgaagctgagctggccgccttcgagaaagagatcgccgcctttgagagcgagctgcaagcctacaaaggcaagggcaaccccgaggtggaaaacctgagagtgcacgccgctgccatcagagaatggctccaggcttacagacacaacggtaccggcggaggcggatctggcggcggaggtagcggtggcggaggatctgaattcgacatcgtgatgacacagagccctgatagcctggccgtgtctctgggagagagagccaccattaactgcaaggccagccagagcgtggactacgacggcgacagcttcctgaactggtatcagcagaagcccggccagcctcctaagctgctgatctacgccgccagcaatctggaaagcggcgtgccaagcagattttccggctctggcagcggcaccgatttcaccctgacaatatccagcctccagcctgaggacgtggccgtgtactactgccagcagagcaacgacgaccctctgacctttggacagggcaccaaggtggaaatcaaactcgaggacctgaagaacgtgttcccacctgaggtggccgtgttcgagcctagcgaggccgagatcagccacacccagaaagccaccctcgtgtgcctggctaccggcttctaccccgaccatgtggaactgtcttggtgggtcaacggcaaagaggtgcacagcggcgtgtgtaccgacccccagccactgaaagaacagcccgccctgaacgacagccggtactgcctgagcagcagactgagagtgtccgccaccttctggcagaacccccggaaccacttcagatgccaggtgcagttctacggcctgagcgagaacgacgagtggacccaggacagagccaagcccgtgacccagatcgtgtctgccgaagcctggggcagagccgattgcgacgtgaagctggtggaaaagagcttcgagacagacaccaacctgaacttccagaacctgagcgtgatcggcttcagaatcctgctgctgaaagtggccggctttaacctgctgatgaccctgcggctgtggtccagcagggccaagcgatctggatctggagcaacaaacttctcactactcaaacaagcaggtgacgtggaggagaatcccgggcctactagtatggactggatttggcgcatccttttccttgtcggcgctgctaccggcgcgcattccttcgaacaagttcagctggttcagagcggagccgaagtgaagaaacctggggcctctgtgaaggtgtcctgcaaagccagcggctacacctttaccagctactggatcaactgggtccgacaggcccctggacaaggactggaatggatgggacagatccttccaggcggaggggacaccaactacaacggcaagttcaagggcagagtgaccatcaccgccgacaccagcacaagcaccgcctacatggaactgagcagcctgagaagcgaggacaccgccgtgtattattgcaccagacgggtgcccatccggctggattattggggacagggaaccctggtcaccgtgtctagtacgcgtatccagaaccctgatcctgccgtgtaccagctgcgggatagcaagagcagcgacaagagcgtgtgtctgttcaccgacttcgacagccagaccaacgtgtcccagagcaaggactccgacgtgtacatcaccgataagtgcgtgctggacatgcggagcatggacttcaagagcaactccgccgtggcctggtccaacaagtccgatttcgcctgcgccaacgccttcaacaacagcattatccccgaggacacattcttcccaagccccgagagcagctgcggctttaccagcgagagctaccagcagggcgtgctgagcgccaccatcctgtacgagatcctgctgggcaaggccaccctgtacgccgtgctggtgtctgccctggtgctgatggctatggtcaagcggaaggacagccggggacgcgccaagagaagcggatctggcgtgaagcagaccctgaatttcgacctgctgaagctggctggcgacgtggaatccaacccaggcccttctagaggccatatgaccgagtacaagcccacggtgcgcctcgccacccgcgacgacgtccccagggccgtacgcaccctcgccgccgcgttcgccgactaccccgccacgcgccacaccgtcgatccggaccgccacatcgagcgggtcaccgagctgcaagaactcttcctcacgcgcgtcgggctcgacatcggcaaggtgtgggtcgcggacgacggcgccgcggtggcggtctggaccacgccggagagcgtcgaagcgggggcggtgttcgccgagatcggcccgcgcatggccgagttgagcggttcccggctggccgcgcagcaacagatggaaggcctcctggcgccgcaccggcccaaggagcccgcgtggttcctggccaccgtcggcgtctcgcccgaccaccagggcaagggtctgggcagcgccgtcgtgctccccggagtggaggcggccgagcgcgccggggtgcccgccttcctggagacctccgcgccccgcaacctccccttctacgagcggctcggcttcaccgtcaccgccgacgtcgaggtgcccgaaggaccgcgcacctggtgcatgacccgcaagcccggtgcctga

SEQ ID NO: 38181 - DNA, 3198 bp, synthetic construct
  source 1..3198: mol_type = other DNA
atggccttaccagtgaccgccttgctcctgccgctggccttgctgctccacgccgccaggccggcatgcatggaccccgacctggaaatcagagccgccttcctgcggcagagaaacacagccctgagaacagaggtggccgagctggaacaagaggtgcagcggctggaaaacgaggtgtcccagtacgagacaagatacggccctctcggaggcggaaaaggtaccggcggaggcggatctggcggcggaggtagcggtggcggaggatctgaattcgacatcgtgatgacacagagccctgatagcctggccgtgtctctgggagagagagccaccattaactgcaaggccagccagagcgtggactacgacggcgacagcttcctgaactggtatcagcagaagcccggccagcctcctaagctgctgatctacgccgccagcaatctggaaagcggcgtgccaagcagattttccggctctggcagcggcaccgatttcaccctgacaatatccagcctccagcctgaggacgtggccgtgtactactgccagcagagcaacgacgaccctctgacctttggacagggcaccaaggtggaaatcaaactcgaggacctgaagaacgtgttcccacctgaggtggccgtgttcgagcctagcgaggccgagatcagccacacccagaaagccaccctcgtgtgcctggctaccggcttctaccccgaccatgtggaactgtcttggtgggtcaacggcaaagaggtgcacagcggcgtgtgtaccgacccccagccactgaaagaacagcccgccctgaacgacagccggtactgcctgagcagcagactgagagtgtccgccaccttctggcagaacccccggaaccacttcagatgccaggtgcagttctacggcctgagcgagaacgacgagtggacccaggacagagccaagcccgtgacccagatcgtgtctgccgaagcctggggcagagccgattgcgacgtgaagctggtggaaaagagcttcgagacagacaccaacctgaacttccagaacctgagcgtgatcggcttcagaatcctgctgctgaaagtggccggctttaacctgctgatgaccctgcggctgtggtccagcagggccaagcgatctggatctggagcaacaaacttctcactactcaaacaagcaggtgacgtggaggagaatcccgggcctactagtgccaccatggactggatttggcgcatccttttccttgtcggcgctgctaccggcgcccattccgggcccgaagtgcagctggttgaatctggcggaggactggttcaggctggcggatctctgagactgtcttgtgccgccagcggcagaacctttagcatgggctggtttagacaggcccctggcaaagagagagagttcgtcgccgccatcacatactctggcggcagcccttactacgccgactctgtgaagggcagattcaccatcagccgggacaacgccaagaacaccgtgtacctccagatgaacagcctgaagcctgaggacaccgccgtgtactactgcgccgccaatccaacatacggcagcgactggaacgccgagaattggggccagggaacccaagtgacagtgtctagcggatccggcggcggaggatctggcggaggcggatctgggggcggaggctctttcgaacaagttcagctggttcagagcggagccgaagtgaagaaacctggggcctctgtgaaggtgtcctgcaaagccagcggctacacctttaccagctactggatcaactgggtccgacaggcccctggacaaggactggaatggatgggacagatccttccaggcggaggggacaccaactacaacggcaagttcaagggcagagtgaccatcaccgccgacaccagcacaagcaccgcctacatggaactgagcagcctgagaagcgaggacaccgccgtgtattattgcaccagacgggtgcccatccggctggattattggggacagggaaccctggtcaccgtgtctagtacgcgtatccagaaccctgatcctgccgtgtaccagctgcgggatagcaagagcagcgacaagagcgtgtgtctgttcaccgacttcgacagccagaccaacgtgtcccagagcaaggactccgacgtgtacatcaccgataagtgcgtgctggacatgcggagcatggacttcaagagcaactccgccgtggcctggtccaacaagtccgatttcgcctgcgccaacgccttcaacaacagcattatccccgaggacacattcttcccaagccccgagagcagctgcggctttaccagcgagagctaccagcagggcgtgctgagcgccaccatcctgtacgagatcctgctgggcaaggccaccctgtacgccgtgctggtgtctgccctggtgctgatggctatggtcaagcggaaggacagccggggacgcgccaagagaagcggatctggcgtgaagcagaccctgaatttcgacctgctgaagctggctggcgacgtggaatccaacccaggcccttctagaggccatatgaccgagtacaagcccacggtgcgcctcgccacccgcgacgacgtccccagggccgtacgcaccctcgccgccgcgttcgccgactaccccgccacgcgccacaccgtcgatccggaccgccacatcgagcgggtcaccgagctgcaagaactcttcctcacgcgcgtcgggctcgacatcggcaaggtgtgggtcgcggacgacggcgccgcggtggcggtctggaccacgccggagagcgtcgaagcgggggcggtgttcgccgagatcggcccgcgcatggccgagttgagcggttcccggctggccgcgcagcaacagatggaaggcctcctggcgccgcaccggcccaaggagcccgcgtggttcctggccaccgtcggcgtctcgcccgaccaccagggcaagggtctgggcagcgccgtcgtgctccccggagtggaggcggccgagcgcgccggggtgcccgccttcctggagacctccgcgccccgcaacctccccttctacgagcggctcggcttcaccgtcaccgccgacgtcgaggtgcccgaaggaccgcgcacctggtgcatgacccgcaagcccggtgcctga

SEQ ID NO: 38182 - DNA, 2847 bp, synthetic construct
  source 1..2847: mol_type = other DNA
atggccttaccagtgaccgccttgctcctgccgctggccttgctgctccacgccgccaggccggacatcgtgatgacacagagccctgatagcctggccgtgtctctgggagagagagccaccattaactgcaaggccagccagagcgtggactacgacggcgacagcttcctgaactggtatcagcagaagcccggccagcctcctaagctgctgatctacgccgccagcaatctggaaagcggcgtgccaagcagattttccggctctggcagcggcaccgatttcaccctgacaatatccagcctccagcctgaggacgtggccgtgtactactgccagcagagcaacgacgaccctctgacctttggacagggcaccaaggtggaaatcaaactcgaggacctgaagaacgtgttcccacctgaggtggccgtgttcgagcctagcgaggccgagatcagccacacccagaaagccaccctcgtgtgcctggctaccggcttctaccccgaccatgtggaactgtcttggtgggtcaacggcaaagaggtgcacagcggcgtgtgtaccgacccccagccactgaaagaacagcccgccctgaacgacagccggtactgcctgagcagcagactgagagtgtccgccaccttctggcagaacccccggaaccacttcagatgccaggtgcagttctacggcctgagcgagaacgacgagtggacccaggacagagccaagcccgtgacccagatcgtgtctgccgaagcctggggcagagccgattgcgacgtgaagctggtggaaaagagcttcgagacagacaccaacctgaacttccagaacctgagcgtgatcggcttcagaatcctgctgctgaaagtggccggctttaacctgctgatgaccctgcggctgtggtccagcagggccaagcgatctggatctggagcaacaaacttctcactactcaaacaagcaggtgacgtggaggagaatcccgggcctactagtgccaccatggactggatttggcgcatccttttccttgtcggcgctgctaccggcgcccattccgggcccatgggatcttggagcgagttttacgatcggctgcacgccattcaccaccggctgtatgctctcggaggaagcgaagctgagctggccgcttttgaaaaagaaattgccgctttcgagtccgagcttcaggcttacaaaggcaaagggaatcctgaggtcgaggccctgagagataccgccgccttcatcagaacccggttgcaggcataccggcacaacggatccggcggcggaggatctggcggaggcggatctgggggcggaggctctttcgaacaagttcagctggttcagagcggagccgaagtgaagaaacctggggcctctgtgaaggtgtcctgcaaagccagcggctacacctttaccagctactggatcaactgggtccgacaggcccctggacaaggactggaatggatgggacagatccttccaggcggaggggacaccaactacaacggcaagttcaagggcagagtgaccatcaccgccgacaccagcacaagcaccgcctacatggaactgagcagcctgagaagcgaggacaccgccgtgtattattgcaccagacgggtgcccatccggctggattattggggacagggaaccctggtcaccgtgtctagtacgcgtatccagaaccctgatcctgccgtgtaccagctgcgggatagcaagagcagcgacaagagcgtgtgtctgttcaccgacttcgacagccagaccaacgtgtcccagagcaaggactccgacgtgtacatcaccgataagtgcgtgctggacatgcggagcatggacttcaagagcaactccgccgtggcctggtccaacaagtccgatttcgcctgcgccaacgccttcaacaacagcattatccccgaggacacattcttcccaagccccgagagcagctgcggctttaccagcgagagctaccagcagggcgtgctgagcgccaccatcctgtacgagatcctgctgggcaaggccaccctgtacgccgtgctggtgtctgccctggtgctgatggctatggtcaagcggaaggacagccggggacgcgccaagagaagcggatctggcgtgaagcagaccctgaatttcgacctgctgaagctggctggcgacgtggaatccaacccaggcccttctagaggccatatgaccgagtacaagcccacggtgcgcctcgccacccgcgacgacgtccccagggccgtacgcaccctcgccgccgcgttcgccgactaccccgccacgcgccacaccgtcgatccggaccgccacatcgagcgggtcaccgagctgcaagaactcttcctcacgcgcgtcgggctcgacatcggcaaggtgtgggtcgcggacgacggcgccgcggtggcggtctggaccacgccggagagcgtcgaagcgggggcggtgttcgccgagatcggcccgcgcatggccgagttgagcggttcccggctggccgcgcagcaacagatggaaggcctcctggcgccgcaccggcccaaggagcccgcgtggttcctggccaccgtcggcgtctcgcccgaccaccagggcaagggtctgggcagcgccgtcgtgctccccggagtggaggcggccgagcgcgccggggtgcccgccttcctggagacctccgcgccccgcaacctccccttctacgagcggctcggcttcaccgtcaccgccgacgtcgaggtgcccgaaggaccgcgcacctggtgcatgacccgcaagcccggtgcctga

SEQ ID NO: 38183 - DNA, 3477 bp, synthetic construct
  source 1..3477: mol_type = other DNA
atggccttaccagtgaccgccttgctcctgccgctggccttgctgctccacgccgccaggccggacatcgtgatgacacagagccctgatagcctggccgtgtctctgggagagagagccaccattaactgcaaggccagccagagcgtggactacgacggcgacagcttcctgaactggtatcagcagaagcccggccagcctcctaagctgctgatctacgccgccagcaatctggaaagcggcgtgccaagcagattttccggctctggcagcggcaccgatttcaccctgacaatatccagcctccagcctgaggacgtggccgtgtactactgccagcagagcaacgacgaccctctgacctttggacagggcaccaaggtggaaatcaaactcgaggacctgaagaacgtgttcccacctgaggtggccgtgttcgagcctagcgaggccgagatcagccacacccagaaagccaccctcgtgtgcctggctaccggcttctaccccgaccatgtggaactgtcttggtgggtcaacggcaaagaggtgcacagcggcgtgtgtaccgacccccagccactgaaagaacagcccgccctgaacgacagccggtactgcctgagcagcagactgagagtgtccgccaccttctggcagaacccccggaaccacttcagatgccaggtgcagttctacggcctgagcgagaacgacgagtggacccaggacagagccaagcccgtgacccagatcgtgtctgccgaagcctggggcagagccgattgcgacgtgaagctggtggaaaagagcttcgagacagacaccaacctgaacttccagaacctgagcgtgatcggcttcagaatcctgctgctgaaagtggccggctttaacctgctgatgaccctgcggctgtggtccagcagggccaagcgatctggatctggagcaacaaacttctcactactcaaacaagcaggtgacgtggaggagaatcccgggcctactagtaccatggactggatttggcgcatccttttccttgtcggcgctgctaccggcgcccattccctgttcaatcaagaggtgcagatccctctgaccgagagctactgtggcccctgtcctaagaactggatctgctacaagaacaactgctaccagttcttcgacgagagcaagaattggtacgagagccaggccagctgcatgagccagaatgccagcctgctgaaggtgtacagcaaagaggaccaggacctgctgaaactggtcaagagcgcccactggatgggccttgtgcacatccccaccaatggctcttggcagtgggaggacggcagcattctgagccctaacctgctgaccatcatcgagatgcagaagggcgactgcgccctgtacgccagcagctttaagggctacatcgagaattgcagcaccccgaacacctacatctgtatgcagagaaccgtttctggcggaggcggctctggaggaggcggaagtggcggcggaggcgacctctttaatcaagaagtccagattccactcaccgaatcctactgcggaccttgtccaaaaaattggatttgttataagaacaactgttatcaattctttgatgagtctaaaaattggtatgagtcccaggcttcctgcatgtctcagaacgcttctctgctgaaagtctactctaaagaagatcaggatctcctgaagctcgtcaagtctgcccattggatggggctcgtccacattcctaccaacggaagctggcaatgggaagatggctccatcctgtctccaaatctgctcacgattattgaaatgcagaaaggggattgtgctctctacgccagctccttcaagggatatattgagaactgtagcacgcccaatacttatatctgtatgcaacggaccgtgggatccggcggcggaggatctggcggaggcggatctgggggcggaggctctttcgaacaagttcagctggttcagagcggagccgaagtgaagaaacctggggcctctgtgaaggtgtcctgcaaagccagcggctacacctttaccagctactggatcaactgggtccgacaggcccctggacaaggactggaatggatgggacagatccttccaggcggaggggacaccaactacaacggcaagttcaagggcagagtgaccatcaccgccgacaccagcacaagcaccgcctacatggaactgagcagcctgagaagcgaggacaccgccgtgtattattgcaccagacgggtgcccatccggctggattattggggacagggaaccctggtcaccgtgtctagtacgcgtatccagaaccctgatcctgccgtgtaccagctgcgggatagcaagagcagcgacaagagcgtgtgtctgttcaccgacttcgacagccagaccaacgtgtcccagagcaaggactccgacgtgtacatcaccgataagtgcgtgctggacatgcggagcatggacttcaagagcaactccgccgtggcctggtccaacaagtccgatttcgcctgcgccaacgccttcaacaacagcattatccccgaggacacattcttcccaagccccgagagcagctgcggctttaccagcgagagctaccagcagggcgtgctgagcgccaccatcctgtacgagatcctgctgggcaaggccaccctgtacgccgtgctggtgtctgccctggtgctgatggctatggtcaagcggaaggacagccggggacgcgccaagagaagcggatctggcgtgaagcagaccctgaatttcgacctgctgaagctggctggcgacgtggaatccaacccaggcccttctagaggccatatgaccgagtacaagcccacggtgcgcctcgccacccgcgacgacgtccccagggccgtacgcaccctcgccgccgcgttcgccgactaccccgccacgcgccacaccgtcgatccggaccgccacatcgagcgggtcaccgagctgcaagaactcttcctcacgcgcgtcgggctcgacatcggcaaggtgtgggtcgcggacgacggcgccgcggtggcggtctggaccacgccggagagcgtcgaagcgggggcggtgttcgccgagatcggcccgcgcatggccgagttgagcggttcccggctggccgcgcagcaacagatggaaggcctcctggcgccgcaccggcccaaggagcccgcgtggttcctggccaccgtcggcgtctcgcccgaccaccagggcaagggtctgggcagcgccgtcgtgctccccggagtggaggcggccgagcgcgccggggtgcccgccttcctggagacctccgcgccccgcaacctccccttctacgagcggctcggcttcaccgtcaccgccgacgtcgaggtgcccgaaggaccgcgcacctggtgcatgacccgcaagcccggtgcctga

SEQ ID NO: 38184 - DNA, 1863 bp, synthetic construct
  source 1..1863: mol_type = other DNA
atggccttaccagtgaccgccttgctcctgccgctggccttgctgctccacgccgccaggccggacatcgtgatgacacagagccctgatagcctggccgtgtctctgggagagagagccaccattaactgcaaggccagccagagcgtggactacgacggcgacagcttcctgaactggtatcagcagaagcccggccagcctcctaagctgctgatctacgccgccagcaatctggaaagcggcgtgccaagcagattttccggctctggcagcggcaccgatttcaccctgacaatatccagcctccagcctgaggacgtggccgtgtactactgccagcagagcaacgacgaccctctgacctttggacagggcaccaaggtggaaatcaaactcgaggacctgaagaacgtgttcccacctgaggtggccgtgttcgagcctagcgaggccgagatcagccacacccagaaagccaccctcgtgtgcctggctaccggcttctaccccgaccatgtggaactgtcttggtgggtcaacggcaaagaggtgcacagcggcgtgtgtaccgacccccagccactgaaagaacagcccgccctgaacgacagccggtactgcctgagcagcagactgagagtgtccgccaccttctggcagaacccccggaaccacttcagatgccaggtgcagttctacggcctgagcgagaacgacgagtggacccaggacagagccaagcccgtgacccagatcgtgtctgccgaagcctggggcagagccgattgcggctttaccagcgagagctaccagcagggcgtgctgagcgccaccaacctgagcgtgatcggcttcagaatcctgctgctgaaagtggccggctttaacctgctgatgaccctgcggctgtggtccagcagggccaagcgatctggatctggagcaacaaacttctcactactcaaacaagcaggtgacgtggaggagaatcccgggcctactagtatggactggatttggcgcatccttttccttgtcggcgctgctaccggcgcgcattccttcgaacaagttcagctggttcagagcggagccgaagtgaagaaacctggggcctctgtgaaggtgtcctgcaaagccagcggctacacctttaccagctactggatcaactgggtccgacaggcccctggacaaggactggaatggatgggacagatccttccaggcggaggggacaccaactacaacggcaagttcaagggcagagtgaccatcaccgccgacaccagcacaagcaccgcctacatggaactgagcagcctgagaagcgaggacaccgccgtgtattattgcaccagacgggtgcccatccggctggattattggggacagggaaccctggtcaccgtgtctagtacgcgtatccagaaccctgatcctgccgtgtaccagctgcgggatagcaagagcagcgacaagagcgtgtgtctgttcaccgacttcgacagccagaccaacgtgtcccagagcaaggactccgacgtgtacatcaccgataagtgcgtgctggacatgcggagcatggacttcaagagcaactccgccgtggcctggtccaacaagtccgatttcgcctgcgccaacgccttcaacaacagcattatccccgaggacacattcttcccaagccccgagagcagctgcgacgtgaagctggtggaaaagagcttcgagacagacaccaacctgaacttccagatcctgtacgagatcctgctgggcaaggccaccctgtacgccgtgctggtgtctgccctggtgctgatggctatggtcaagcggaaggacagccgggga

SEQ ID NO: 38185 - DNA, 1875 bp, synthetic construct
  source 1..1875: mol_type = other DNA
atggccttaccagtgaccgccttgctcctgccgctggccttgctgctccacgccgccaggccggacatcgtgatgacacagagccctgatagcctggccgtgtctctgggagagagagccaccattaactgcaaggccagccagagcgtggactacgacggcgacagcttcctgaactggtatcagcagaagcccggccagcctcctaagctgctgatctacgccgccagcaatctggaaagcggcgtgccaagcagattttccggctctggcagcggcaccgatttcaccctgacaatatccagcctccagcctgaggacgtggccgtgtactactgccagcagagcaacgacgaccctctgacctttggacagggcaccaaggtggaaatcaaactcgagatccagaaccctgatcctgccgtgtaccagctgcgggatagcaagagcagcgacaagagcgtgtgtctgttcaccgacttcgacagccagaccaacgtgtcccagagcaaggactccgacgtgtacatcaccgataagtgcgtgctggacatgcggagcatggacttcaagagcaactccgccgtggcctggtccaacaagtccgatttcgcctgcgccaacgccttcaacaacagcattatccccgaggacacattcttcccaagccccgagagcagctgcgacgtgaagctggtggaaaagagcttcgagacagacaccaacctgaacttccagatcctgtacgagatcctgctgggcaaggccaccctgtacgccgtgctggtgtctgccctggtgctgatggctatggtcaagcggaaggacagccggggacgcgccaagagaagcggatctggcgtgaagcagaccctgaatttcgacctgctgaagctggctggcgacgtggaatccaacccaggccctactagtatggactggatttggcgcatccttttccttgtcggcgctgctaccggcgcgcattccttcgaacaagttcagctggttcagagcggagccgaagtgaagaaacctggggcctctgtgaaggtgtcctgcaaagccagcggctacacctttaccagctactggatcaactgggtccgacaggcccctggacaaggactggaatggatgggacagatccttccaggcggaggggacaccaactacaacggcaagttcaagggcagagtgaccatcaccgccgacaccagcacaagcaccgcctacatggaactgagcagcctgagaagcgaggacaccgccgtgtattattgcaccagacgggtgcccatccggctggattattggggacagggaaccctggtcaccgtgtctagtacgcgtgaggacctgaagaacgtgttcccacctgaggtggccgtgttcgagcctagcgaggccgagatcagccacacccagaaagccaccctcgtgtgcctggctaccggcttctaccccgaccatgtggaactgtcttggtgggtcaacggcaaagaggtgcacagcggcgtgtgtaccgacccccagccactgaaagaacagcccgccctgaacgacagccggtactgcctgagcagcagactgagagtgtccgccaccttctggcagaacccccggaaccacttcagatgccaggtgcagttctacggcctgagcgagaacgacgagtggacccaggacagagccaagcccgtgacccagatcgtgtctgccgaagcctggggcagagccgattgcggctttaccagcgagagctaccagcagggcgtgctgagcgccaccaacctgagcgtgatcggcttcagaatcctgctgctgaaagtggccggctttaacctgctgatgaccctgcggctgtggtccagc

SEQ ID NO: 38186 - DNA, 2268 bp, synthetic construct
  source 1..2268: mol_type = other DNA
atggccttaccagtgaccgccttgctcctgccgctggccttgctgctccacgccgccaggccggaagtgcagctggttgaatctggcggaggactggttcagcctggcggatctctgagactgtcttgtgccgccagcggcttcagcttcagcgacttttggatgagctgggtccgacaggcccctggcaaaggacttgaatgggtcgccacaatcagccaggccggcagcgagaaggactacgtggactctgtgaagggcagattcaccatcagccgggacaacgccaagaagtccctgtacctccagatgaacagcctgagagccgaggacaccgccgtgtactattgtgcctctggcgtgtacagcttcgactacagaggccagggcaccctggtcacagtctcttctggtaccggcggaggcggatctggcggcggaggtagcggtggcggaggatctgaattcgacatcgtgatgacacagagccctgatagcctggccgtgtctctgggagagagagccaccattaactgcaaggccagccagagcgtggactacgacggcgacagcttcctgaactggtatcagcagaagcccggccagcctcctaagctgctgatctacgccgccagcaatctggaaagcggcgtgccaagcagattttccggctctggcagcggcaccgatttcaccctgacaatatccagcctccagcctgaggacgtggccgtgtactactgccagcagagcaacgacgaccctctgacctttggacagggcaccaaggtggaaatcaaactcgaggacctgaagaacgtgttcccacctgaggtggccgtgttcgagcctagcgaggccgagatcagccacacccagaaagccaccctcgtgtgcctggctaccggcttctaccccgaccatgtggaactgtcttggtgggtcaacggcaaagaggtgcacagcggcgtgtgtaccgacccccagccactgaaagaacagcccgccctgaacgacagccggtactgcctgagcagcagactgagagtgtccgccaccttctggcagaacccccggaaccacttcagatgccaggtgcagttctacggcctgagcgagaacgacgagtggacccaggacagagccaagcccgtgacccagatcgtgtctgccgaagcctggggcagagccgattgcggctttaccagcgagagctaccagcagggcgtgctgagcgccaccaacctgagcgtgatcggcttcagaatcctgctgctgaaagtggccggctttaacctgctgatgaccctgcggctgtggtccagcagggccaagcgatctggatctggagcaacaaacttctcactactcaaacaagcaggtgacgtggaggagaatcccgggcctactagtatggactggatttggcgcatccttttccttgtcggcgctgctaccggcgcgcattccttcgaacaagttcagctggttcagagcggagccgaagtgaagaaacctggggcctctgtgaaggtgtcctgcaaagccagcggctacacctttaccagctactggatcaactgggtccgacaggcccctggacaaggactggaatggatgggacagatccttccaggcggaggggacaccaactacaacggcaagttcaagggcagagtgaccatcaccgccgacaccagcacaagcaccgcctacatggaactgagcagcctgagaagcgaggacaccgccgtgtattattgcaccagacgggtgcccatccggctggattattggggacagggaaccctggtcaccgtgtctagtacgcgtatccagaaccctgatcctgccgtgtaccagctgcgggatagcaagagcagcgacaagagcgtgtgtctgttcaccgacttcgacagccagaccaacgtgtcccagagcaaggactccgacgtgtacatcaccgataagtgcgtgctggacatgcggagcatggacttcaagagcaactccgccgtggcctggtccaacaagtccgatttcgcctgcgccaacgccttcaacaacagcattatccccgaggacacattcttcccaagccccgagagcagctgcgacgtgaagctggtggaaaagagcttcgagacagacaccaacctgaacttccagatcctgtacgagatcctgctgggcaaggccaccctgtacgccgtgctggtgtctgccctggtgctgatggctatggtcaagcggaaggacagccgggga

SEQ ID NO: 38187 - DNA, 2280 bp, synthetic construct
  source 1..2280: mol_type = other DNA
atggccttaccagtgaccgccttgctcctgccgctggccttgctgctccacgccgccaggccggaagtgcagctggttgaatctggcggaggactggttcagcctggcggatctctgagactgtcttgtgccgccagcggcttcagcttcagcgacttttggatgagctgggtccgacaggcccctggcaaaggacttgaatgggtcgccacaatcagccaggccggcagcgagaaggactacgtggactctgtgaagggcagattcaccatcagccgggacaacgccaagaagtccctgtacctccagatgaacagcctgagagccgaggacaccgccgtgtactattgtgcctctggcgtgtacagcttcgactacagaggccagggcaccctggtcacagtctcttctggtaccggcggaggcggatctggcggcggaggtagcggtggcggaggatctgaattcgacatcgtgatgacacagagccctgatagcctggccgtgtctctgggagagagagccaccattaactgcaaggccagccagagcgtggactacgacggcgacagcttcctgaactggtatcagcagaagcccggccagcctcctaagctgctgatctacgccgccagcaatctggaaagcggcgtgccaagcagattttccggctctggcagcggcaccgatttcaccctgacaatatccagcctccagcctgaggacgtggccgtgtactactgccagcagagcaacgacgaccctctgacctttggacagggcaccaaggtggaaatcaaactcgagatccagaaccctgatcctgccgtgtaccagctgcgggatagcaagagcagcgacaagagcgtgtgtctgttcaccgacttcgacagccagaccaacgtgtcccagagcaaggactccgacgtgtacatcaccgataagtgcgtgctggacatgcggagcatggacttcaagagcaactccgccgtggcctggtccaacaagtccgatttcgcctgcgccaacgccttcaacaacagcattatccccgaggacacattcttcccaagccccgagagcagctgcgacgtgaagctggtggaaaagagcttcgagacagacaccaacctgaacttccagatcctgtacgagatcctgctgggcaaggccaccctgtacgccgtgctggtgtctgccctggtgctgatggctatggtcaagcggaaggacagccggggacgcgccaagagaagcggatctggcgtgaagcagaccctgaatttcgacctgctgaagctggctggcgacgtggaatccaacccaggccctactagtatggactggatttggcgcatccttttccttgtcggcgctgctaccggcgcgcattccttcgaacaagttcagctggttcagagcggagccgaagtgaagaaacctggggcctctgtgaaggtgtcctgcaaagccagcggctacacctttaccagctactggatcaactgggtccgacaggcccctggacaaggactggaatggatgggacagatccttccaggcggaggggacaccaactacaacggcaagttcaagggcagagtgaccatcaccgccgacaccagcacaagcaccgcctacatggaactgagcagcctgagaagcgaggacaccgccgtgtattattgcaccagacgggtgcccatccggctggattattggggacagggaaccctggtcaccgtgtctagtacgcgtgaggacctgaagaacgtgttcccacctgaggtggccgtgttcgagcctagcgaggccgagatcagccacacccagaaagccaccctcgtgtgcctggctaccggcttctaccccgaccatgtggaactgtcttggtgggtcaacggcaaagaggtgcacagcggcgtgtgtaccgacccccagccactgaaagaacagcccgccctgaacgacagccggtactgcctgagcagcagactgagagtgtccgccaccttctggcagaacccccggaaccacttcagatgccaggtgcagttctacggcctgagcgagaacgacgagtggacccaggacagagccaagcccgtgacccagatcgtgtctgccgaagcctggggcagagccgattgcggctttaccagcgagagctaccagcagggcgtgctgagcgccaccaacctgagcgtgatcggcttcagaatcctgctgctgaaagtggccggctttaacctgctgatgaccctgcggctgtggtccagc

SEQ ID NO: 38188 - DNA, 2679 bp, synthetic construct
  source 1..2679: mol_type = other DNA
atggccttaccagtgaccgccttgctcctgccgctggccttgctgctccacgccgccaggccggaagtgcagctggttgaatctggcggaggactggttcagcctggcggatctctgagactgtcttgtgccgccagcggcttcagcttcagcgacttttggatgagctgggtccgacaggcccctggcaaaggacttgaatgggtcgccacaatcagccaggccggcagcgagaaggactacgtggactctgtgaagggcagattcaccatcagccgggacaacgccaagaagtccctgtacctccagatgaacagcctgagagccgaggacaccgccgtgtactattgtgcctctggcgtgtacagcttcgactacagaggccagggcaccctggtcacagtctcttctggtaccggcggaggcggatctggcggcggaggtagcggtggcggaggatctgaattcgacatcgtgatgacacagagccctgatagcctggccgtgtctctgggagagagagccaccattaactgcaaggccagccagagcgtggactacgacggcgacagcttcctgaactggtatcagcagaagcccggccagcctcctaagctgctgatctacgccgccagcaatctggaaagcggcgtgccaagcagattttccggctctggcagcggcaccgatttcaccctgacaatatccagcctccagcctgaggacgtggccgtgtactactgccagcagagcaacgacgaccctctgacctttggacagggcaccaaggtggaaatcaaactcgaggacctgaagaacgtgttcccacctgaggtggccgtgttcgagcctagcgaggccgagatcagccacacccagaaagccaccctcgtgtgcctggctaccggcttctaccccgaccatgtggaactgtcttggtgggtcaacggcaaagaggtgcacagcggcgtgtgtaccgacccccagccactgaaagaacagcccgccctgaacgacagccggtactgcctgagcagcagactgagagtgtccgccaccttctggcagaacccccggaaccacttcagatgccaggtgcagttctacggcctgagcgagaacgacgagtggacccaggacagagccaagcccgtgacccagatcgtgtctgccgaagcctggggcagagccgattgcggctttaccagcgagagctaccagcagggcgtgctgagcgccaccaacctgagcgtgatcggcttcagaatcctgctgctgaaagtggccggctttaacctgctgatgaccctgcggctgtggtccagcagggccaagcgatctggatctggagcaacaaacttctcactactcaaacaagcaggtgacgtggaggagaatcccgggcctactagtatggactggatttggcgcatccttttccttgtcggcgctgctaccggcgcgcattccgggccccagctccagctgcaagagtctggacctggcctggtcaagcctagcgagacactgagcctgacctgtaccgtgtccggcgatagcatcagcagcggcgattactactggggctggatcagacagcctcctggcaaaggactggaatggatcggccacatctactacagcggcgtgacctactacaaccccagcctgaagtccagagtgaccatcagcgtggacaccagccggaaccagttctccctgaagctgtctagcgtgacagccgccgataccgccgtgtactactgcaccagagaggacagcagcaactggcggagtagaggccagggaacactggtcacagttagctctggatccggcggaggcggaagtggaggcggaggatctggcggcggaggctctttcgaacaagttcagctggttcagagcggagccgaagtgaagaaacctggggcctctgtgaaggtgtcctgcaaagccagcggctacacctttaccagctactggatcaactgggtccgacaggcccctggacaaggactggaatggatgggacagatccttccaggcggaggggacaccaactacaacggcaagttcaagggcagagtgaccatcaccgccgacaccagcacaagcaccgcctacatggaactgagcagcctgagaagcgaggacaccgccgtgtattattgcaccagacgggtgcccatccggctggattattggggacagggaaccctggtcaccgtgtctagtacgcgtatccagaaccctgatcctgccgtgtaccagctgcgggatagcaagagcagcgacaagagcgtgtgtctgttcaccgacttcgacagccagaccaacgtgtcccagagcaaggactccgacgtgtacatcaccgataagtgcgtgctggacatgcggagcatggacttcaagagcaactccgccgtggcctggtccaacaagtccgatttcgcctgcgccaacgccttcaacaacagcattatccccgaggacacattcttcccaagccccgagagcagctgcgacgtgaagctggtggaaaagagcttcgagacagacaccaacctgaacttccagatcctgtacgagatcctgctgggcaaggccaccctgtacgccgtgctggtgtctgccctggtgctgatggctatggtcaagcggaaggacagccgggga

SEQ ID NO: 38189 - DNA, 2691 bp, synthetic construct
  source 1..2691: mol_type = other DNA
atggccttaccagtgaccgccttgctcctgccgctggccttgctgctccacgccgccaggccggaagtgcagctggttgaatctggcggaggactggttcagcctggcggatctctgagactgtcttgtgccgccagcggcttcagcttcagcgacttttggatgagctgggtccgacaggcccctggcaaaggacttgaatgggtcgccacaatcagccaggccggcagcgagaaggactacgtggactctgtgaagggcagattcaccatcagccgggacaacgccaagaagtccctgtacctccagatgaacagcctgagagccgaggacaccgccgtgtactattgtgcctctggcgtgtacagcttcgactacagaggccagggcaccctggtcacagtctcttctggtaccggcggaggcggatctggcggcggaggtagcggtggcggaggatctgaattcgacatcgtgatgacacagagccctgatagcctggccgtgtctctgggagagagagccaccattaactgcaaggccagccagagcgtggactacgacggcgacagcttcctgaactggtatcagcagaagcccggccagcctcctaagctgctgatctacgccgccagcaatctggaaagcggcgtgccaagcagattttccggctctggcagcggcaccgatttcaccctgacaatatccagcctccagcctgaggacgtggccgtgtactactgccagcagagcaacgacgaccctctgacctttggacagggcaccaaggtggaaatcaaactcgagatccagaaccctgatcctgccgtgtaccagctgcgggatagcaagagcagcgacaagagcgtgtgtctgttcaccgacttcgacagccagaccaacgtgtcccagagcaaggactccgacgtgtacatcaccgataagtgcgtgctggacatgcggagcatggacttcaagagcaactccgccgtggcctggtccaacaagtccgatttcgcctgcgccaacgccttcaacaacagcattatccccgaggacacattcttcccaagccccgagagcagctgcgacgtgaagctggtggaaaagagcttcgagacagacaccaacctgaacttccagatcctgtacgagatcctgctgggcaaggccaccctgtacgccgtgctggtgtctgccctggtgctgatggctatggtcaagcggaaggacagccggggacgcgccaagagaagcggatctggcgtgaagcagaccctgaatttcgacctgctgaagctggctggcgacgtggaatccaacccaggccctactagtatggactggatttggcgcatccttttccttgtcggcgctgctaccggcgcgcattccgggccccagctccagctgcaagagtctggacctggcctggtcaagcctagcgagacactgagcctgacctgtaccgtgtccggcgatagcatcagcagcggcgattactactggggctggatcagacagcctcctggcaaaggactggaatggatcggccacatctactacagcggcgtgacctactacaaccccagcctgaagtccagagtgaccatcagcgtggacaccagccggaaccagttctccctgaagctgtctagcgtgacagccgccgataccgccgtgtactactgcaccagagaggacagcagcaactggcggagtagaggccagggaacactggtcacagttagctctggatccggcggaggcggaagtggaggcggaggatctggcggcggaggctctttcgaacaagttcagctggttcagagcggagccgaagtgaagaaacctggggcctctgtgaaggtgtcctgcaaagccagcggctacacctttaccagctactggatcaactgggtccgacaggcccctggacaaggactggaatggatgggacagatccttccaggcggaggggacaccaactacaacggcaagttcaagggcagagtgaccatcaccgccgacaccagcacaagcaccgcctacatggaactgagcagcctgagaagcgaggacaccgccgtgtattattgcaccagacgggtgcccatccggctggattattggggacagggaaccctggtcaccgtgtctagtacgcgtgaggacctgaagaacgtgttcccacctgaggtggccgtgttcgagcctagcgaggccgagatcagccacacccagaaagccaccctcgtgtgcctggctaccggcttctaccccgaccatgtggaactgtcttggtgggtcaacggcaaagaggtgcacagcggcgtgtgtaccgacccccagccactgaaagaacagcccgccctgaacgacagccggtactgcctgagcagcagactgagagtgtccgccaccttctggcagaacccccggaaccacttcagatgccaggtgcagttctacggcctgagcgagaacgacgagtggacccaggacagagccaagcccgtgacccagatcgtgtctgccgaagcctggggcagagccgattgcggctttaccagcgagagctaccagcagggcgtgctgagcgccaccaacctgagcgtgatcggcttcagaatcctgctgctgaaagtggccggctttaacctgctgatgaccctgcggctgtggtccagc

SEQ ID NO: 38190 - DNA, 2175 bp, synthetic construct
  source 1..2175: mol_type = other DNA
atggccttaccagtgaccgccttgctcctgccgctggccttgctgctccacgccgccaggccggacatcgtgatgacacagagccctgatagcctggccgtgtctctgggagagagagccaccattaactgcaaggccagccagagcgtggactacgacggcgacagcttcctgaactggtatcagcagaagcccggccagcctcctaagctgctgatctacgccgccagcaatctggaaagcggcgtgccaagcagattttccggctctggcagcggcaccgatttcaccctgacaatatccagcctccagcctgaggacgtggccgtgtactactgccagcagagcaacgacgaccctctgacctttggacagggcaccaaggtggaaatcaaactcgaggacctgaagaacgtgttcccacctgaggtggccgtgttcgagcctagcgaggccgagatcagccacacccagaaagccaccctcgtgtgcctggctaccggcttctaccccgaccatgtggaactgtcttggtgggtcaacggcaaagaggtgcacagcggcgtgtgtaccgacccccagccactgaaagaacagcccgccctgaacgacagccggtactgcctgagcagcagactgagagtgtccgccaccttctggcagaacccccggaaccacttcagatgccaggtgcagttctacggcctgagcgagaacgacgagtggacccaggacagagccaagcccgtgacccagatcgtgtctgccgaagcctggggcagagccgatgatgtgattaagatccactggcaggaaaagaagtccaacaccatcctgggcagccaggaaggcaacaccatgaagaccaacgacacctacatgaagttcagctggctgaccgtgcccgagaagtccctggacaaagaacacagatgcatcgtgcggcacgaaaacaacaagaacggcgtggaccaggaaatcatcttcccacccatcaagaccgatgtgattacaatggaccccaaggacaactgctccaaggacgccaacgataccctgctgctccagctgaccaacaccagcgcctactacatgtacttgttgctgctgctgaagtccgtggtgtacttcgccatcatcacatgctgcctgctgatggctatggtcaagcggaaggacagccggggaagggccaagcgatctggatctggagcaacaaacttctcactactcaaacaagcaggtgacgtggaggagaatcccgggcctactagtatggactggatttggcgcatccttttccttgtcggcgctgctaccggcgcgcattccttcgaacaagttcagctggttcagagcggagccgaagtgaagaaacctggggcctctgtgaaggtgtcctgcaaagccagcggctacacctttaccagctactggatcaactgggtccgacaggcccctggacaaggactggaatggatgggacagatccttccaggcggaggggacaccaactacaacggcaagttcaagggcagagtgaccatcaccgccgacaccagcacaagcaccgcctacatggaactgagcagcctgagaagcgaggacaccgccgtgtattattgcaccagacgggtgcccatccggctggattattggggacagggaaccctggtcaccgtgtctagtacgcgtatccagaaccctgatcctgccgtgtaccagctgcgggatagcaagagcagcgacaagagcgtgtgtctgttcaccgacttcgacagccagaccaacgtgtcccagagcaaggactccgacgtgtacatcaccgataagtgcgtgctggacatgcggagcatggacttcaagagcaactccgccgtggcctggtccaacaagtccgatttcgcctgcgccaacgccttcaacaacagcattatccccgaggacacattcttcccaagccccgagagcagcgactccaccgaccacgtgaagcccaaagagacagagaacaccaagcagcccagcaagagctgccacaagcccaaggccatcgtgcacaccgagaaagtgaacatgatgagcctgaccgtgctgggcctgcggatgctgttcgccaaaaccgtggccgtgaacttcctgctgaccgccaagctgttcttcctcctcaccgcc

SEQ ID NO: 38191 - DNA, 2187 bp, synthetic construct
  source 1..2187: mol_type = other DNA
atggccttaccagtgaccgccttgctcctgccgctggccttgctgctccacgccgccaggccggacatcgtgatgacacagagccctgatagcctggccgtgtctctgggagagagagccaccattaactgcaaggccagccagagcgtggactacgacggcgacagcttcctgaactggtatcagcagaagcccggccagcctcctaagctgctgatctacgccgccagcaatctggaaagcggcgtgccaagcagattttccggctctggcagcggcaccgatttcaccctgacaatatccagcctccagcctgaggacgtggccgtgtactactgccagcagagcaacgacgaccctctgacctttggacagggcaccaaggtggaaatcaaactcgagatccagaaccctgatcctgccgtgtaccagctgcgggatagcaagagcagcgacaagagcgtgtgtctgttcaccgacttcgacagccagaccaacgtgtcccagagcaaggactccgacgtgtacatcaccgataagtgcgtgctggacatgcggagcatggacttcaagagcaactccgccgtggcctggtccaacaagtccgatttcgcctgcgccaacgccttcaacaacagcattatccccgaggacacattcttcccaagccccgagagcagcgactccaccgaccacgtgaagcccaaagagacagagaacaccaagcagcccagcaagagctgccacaagcccaaggccatcgtgcacaccgagaaagtgaacatgatgagcctgaccgtgctgggcctgcggatgctgttcgccaaaaccgtggccgtgaacttcctgctgaccgccaagctgttcttcctcctcaccgcccgcgccaagagaagcggatctggcgtgaagcagaccctgaatttcgacctgctgaagctggctggcgacgtggaatccaacccaggccctactagtatggactggatttggcgcatccttttccttgtcggcgctgctaccggcgcgcattccttcgaacaagttcagctggttcagagcggagccgaagtgaagaaacctggggcctctgtgaaggtgtcctgcaaagccagcggctacacctttaccagctactggatcaactgggtccgacaggcccctggacaaggactggaatggatgggacagatccttccaggcggaggggacaccaactacaacggcaagttcaagggcagagtgaccatcaccgccgacaccagcacaagcaccgcctacatggaactgagcagcctgagaagcgaggacaccgccgtgtattattgcaccagacgggtgcccatccggctggattattggggacagggaaccctggtcaccgtgtctagtacgcgtgaggacctgaagaacgtgttcccacctgaggtggccgtgttcgagcctagcgaggccgagatcagccacacccagaaagccaccctcgtgtgcctggctaccggcttctaccccgaccatgtggaactgtcttggtgggtcaacggcaaagaggtgcacagcggcgtgtgtaccgacccccagccactgaaagaacagcccgccctgaacgacagccggtactgcctgagcagcagactgagagtgtccgccaccttctggcagaacccccggaaccacttcagatgccaggtgcagttctacggcctgagcgagaacgacgagtggacccaggacagagccaagcccgtgacccagatcgtgtctgccgaagcctggggcagagccgatgatgtgattaagatccactggcaggaaaagaagtccaacaccatcctgggcagccaggaaggcaacaccatgaagaccaacgacacctacatgaagttcagctggctgaccgtgcccgagaagtccctggacaaagaacacagatgcatcgtgcggcacgaaaacaacaagaacggcgtggaccaggaaatcatcttcccacccatcaagaccgatgtgattacaatggaccccaaggacaactgctccaaggacgccaacgataccctgctgctccagctgaccaacaccagcgcctactacatgtacttgttgctgctgctgaagtccgtggtgtacttcgccatcatcacatgctgcctgctgatggctatggtcaagcggaaggacagccgggga

SEQ ID NO: 38192 - DNA, 2580 bp, synthetic construct
  source 1..2580: mol_type = other DNA
atggccttaccagtgaccgccttgctcctgccgctggccttgctgctccacgccgccaggccggaagtgcagctggttgaatctggcggaggactggttcagcctggcggatctctgagactgtcttgtgccgccagcggcttcagcttcagcgacttttggatgagctgggtccgacaggcccctggcaaaggacttgaatgggtcgccacaatcagccaggccggcagcgagaaggactacgtggactctgtgaagggcagattcaccatcagccgggacaacgccaagaagtccctgtacctccagatgaacagcctgagagccgaggacaccgccgtgtactattgtgcctctggcgtgtacagcttcgactacagaggccagggcaccctggtcacagtctcttctggtaccggcggaggcggatctggcggcggaggtagcggtggcggaggatctgaattcgacatcgtgatgacacagagccctgatagcctggccgtgtctctgggagagagagccaccattaactgcaaggccagccagagcgtggactacgacggcgacagcttcctgaactggtatcagcagaagcccggccagcctcctaagctgctgatctacgccgccagcaatctggaaagcggcgtgccaagcagattttccggctctggcagcggcaccgatttcaccctgacaatatccagcctccagcctgaggacgtggccgtgtactactgccagcagagcaacgacgaccctctgacctttggacagggcaccaaggtggaaatcaaactcgaggacctgaagaacgtgttcccacctgaggtggccgtgttcgagcctagcgaggccgagatcagccacacccagaaagccaccctcgtgtgcctggctaccggcttctaccccgaccatgtggaactgtcttggtgggtcaacggcaaagaggtgcacagcggcgtgtgtaccgacccccagccactgaaagaacagcccgccctgaacgacagccggtactgcctgagcagcagactgagagtgtccgccaccttctggcagaacccccggaaccacttcagatgccaggtgcagttctacggcctgagcgagaacgacgagtggacccaggacagagccaagcccgtgacccagatcgtgtctgccgaagcctggggcagagccgatgatgtgattaagatccactggcaggaaaagaagtccaacaccatcctgggcagccaggaaggcaacaccatgaagaccaacgacacctacatgaagttcagctggctgaccgtgcccgagaagtccctggacaaagaacacagatgcatcgtgcggcacgaaaacaacaagaacggcgtggaccaggaaatcatcttcccacccatcaagaccgatgtgattacaatggaccccaaggacaactgctccaaggacgccaacgataccctgctgctccagctgaccaacaccagcgcctactacatgtacttgttgctgctgctgaagtccgtggtgtacttcgccatcatcacatgctgcctgctgatggctatggtcaagcggaaggacagccggggaagggccaagcgatctggatctggagcaacaaacttctcactactcaaacaagcaggtgacgtggaggagaatcccgggcctactagtatggactggatttggcgcatccttttccttgtcggcgctgctaccggcgcgcattccttcgaacaagttcagctggttcagagcggagccgaagtgaagaaacctggggcctctgtgaaggtgtcctgcaaagccagcggctacacctttaccagctactggatcaactgggtccgacaggcccctggacaaggactggaatggatgggacagatccttccaggcggaggggacaccaactacaacggcaagttcaagggcagagtgaccatcaccgccgacaccagcacaagcaccgcctacatggaactgagcagcctgagaagcgaggacaccgccgtgtattattgcaccagacgggtgcccatccggctggattattggggacagggaaccctggtcaccgtgtctagtacgcgtatccagaaccctgatcctgccgtgtaccagctgcgggatagcaagagcagcgacaagagcgtgtgtctgttcaccgacttcgacagccagaccaacgtgtcccagagcaaggactccgacgtgtacatcaccgataagtgcgtgctggacatgcggagcatggacttcaagagcaactccgccgtggcctggtccaacaagtccgatttcgcctgcgccaacgccttcaacaacagcattatccccgaggacacattcttcccaagccccgagagcagcgactccaccgaccacgtgaagcccaaagagacagagaacaccaagcagcccagcaagagctgccacaagcccaaggccatcgtgcacaccgagaaagtgaacatgatgagcctgaccgtgctgggcctgcggatgctgttcgccaaaaccgtggccgtgaacttcctgctgaccgccaagctgttcttcctcctcaccgcc

SEQ ID NO: 38193 - DNA, 2592 bp, synthetic construct
  source 1..2592: mol_type = other DNA
atggccttaccagtgaccgccttgctcctgccgctggccttgctgctccacgccgccaggccggaagtgcagctggttgaatctggcggaggactggttcagcctggcggatctctgagactgtcttgtgccgccagcggcttcagcttcagcgacttttggatgagctgggtccgacaggcccctggcaaaggacttgaatgggtcgccacaatcagccaggccggcagcgagaaggactacgtggactctgtgaagggcagattcaccatcagccgggacaacgccaagaagtccctgtacctccagatgaacagcctgagagccgaggacaccgccgtgtactattgtgcctctggcgtgtacagcttcgactacagaggccagggcaccctggtcacagtctcttctggtaccggcggaggcggatctggcggcggaggtagcggtggcggaggatctgaattcgacatcgtgatgacacagagccctgatagcctggccgtgtctctgggagagagagccaccattaactgcaaggccagccagagcgtggactacgacggcgacagcttcctgaactggtatcagcagaagcccggccagcctcctaagctgctgatctacgccgccagcaatctggaaagcggcgtgccaagcagattttccggctctggcagcggcaccgatttcaccctgacaatatccagcctccagcctgaggacgtggccgtgtactactgccagcagagcaacgacgaccctctgacctttggacagggcaccaaggtggaaatcaaactcgagatccagaaccctgatcctgccgtgtaccagctgcgggatagcaagagcagcgacaagagcgtgtgtctgttcaccgacttcgacagccagaccaacgtgtcccagagcaaggactccgacgtgtacatcaccgataagtgcgtgctggacatgcggagcatggacttcaagagcaactccgccgtggcctggtccaacaagtccgatttcgcctgcgccaacgccttcaacaacagcattatccccgaggacacattcttcccaagccccgagagcagcgactccaccgaccacgtgaagcccaaagagacagagaacaccaagcagcccagcaagagctgccacaagcccaaggccatcgtgcacaccgagaaagtgaacatgatgagcctgaccgtgctgggcctgcggatgctgttcgccaaaaccgtggccgtgaacttcctgctgaccgccaagctgttcttcctcctcaccgcccgcgccaagagaagcggatctggcgtgaagcagaccctgaatttcgacctgctgaagctggctggcgacgtggaatccaacccaggccctactagtatggactggatttggcgcatccttttccttgtcggcgctgctaccggcgcgcattccttcgaacaagttcagctggttcagagcggagccgaagtgaagaaacctggggcctctgtgaaggtgtcctgcaaagccagcggctacacctttaccagctactggatcaactgggtccgacaggcccctggacaaggactggaatggatgggacagatccttccaggcggaggggacaccaactacaacggcaagttcaagggcagagtgaccatcaccgccgacaccagcacaagcaccgcctacatggaactgagcagcctgagaagcgaggacaccgccgtgtattattgcaccagacgggtgcccatccggctggattattggggacagggaaccctggtcaccgtgtctagtacgcgtgaggacctgaagaacgtgttcccacctgaggtggccgtgttcgagcctagcgaggccgagatcagccacacccagaaagccaccctcgtgtgcctggctaccggcttctaccccgaccatgtggaactgtcttggtgggtcaacggcaaagaggtgcacagcggcgtgtgtaccgacccccagccactgaaagaacagcccgccctgaacgacagccggtactgcctgagcagcagactgagagtgtccgccaccttctggcagaacccccggaaccacttcagatgccaggtgcagttctacggcctgagcgagaacgacgagtggacccaggacagagccaagcccgtgacccagatcgtgtctgccgaagcctggggcagagccgatgatgtgattaagatccactggcaggaaaagaagtccaacaccatcctgggcagccaggaaggcaacaccatgaagaccaacgacacctacatgaagttcagctggctgaccgtgcccgagaagtccctggacaaagaacacagatgcatcgtgcggcacgaaaacaacaagaacggcgtggaccaggaaatcatcttcccacccatcaagaccgatgtgattacaatggaccccaaggacaactgctccaaggacgccaacgataccctgctgctccagctgaccaacaccagcgcctactacatgtacttgttgctgctgctgaagtccgtggtgtacttcgccatcatcacatgctgcctgctgatggctatggtcaagcggaaggacagccgggga

SEQ ID NO: 38194 - DNA, 2991 bp, synthetic construct
  source 1..2991: mol_type = other DNA
atggccttaccagtgaccgccttgctcctgccgctggccttgctgctccacgccgccaggccggaagtgcagctggttgaatctggcggaggactggttcagcctggcggatctctgagactgtcttgtgccgccagcggcttcagcttcagcgacttttggatgagctgggtccgacaggcccctggcaaaggacttgaatgggtcgccacaatcagccaggccggcagcgagaaggactacgtggactctgtgaagggcagattcaccatcagccgggacaacgccaagaagtccctgtacctccagatgaacagcctgagagccgaggacaccgccgtgtactattgtgcctctggcgtgtacagcttcgactacagaggccagggcaccctggtcacagtctcttctggtaccggcggaggcggatctggcggcggaggtagcggtggcggaggatctgaattcgacatcgtgatgacacagagccctgatagcctggccgtgtctctgggagagagagccaccattaactgcaaggccagccagagcgtggactacgacggcgacagcttcctgaactggtatcagcagaagcccggccagcctcctaagctgctgatctacgccgccagcaatctggaaagcggcgtgccaagcagattttccggctctggcagcggcaccgatttcaccctgacaatatccagcctccagcctgaggacgtggccgtgtactactgccagcagagcaacgacgaccctctgacctttggacagggcaccaaggtggaaatcaaactcgaggacctgaagaacgtgttcccacctgaggtggccgtgttcgagcctagcgaggccgagatcagccacacccagaaagccaccctcgtgtgcctggctaccggcttctaccccgaccatgtggaactgtcttggtgggtcaacggcaaagaggtgcacagcggcgtgtgtaccgacccccagccactgaaagaacagcccgccctgaacgacagccggtactgcctgagcagcagactgagagtgtccgccaccttctggcagaacccccggaaccacttcagatgccaggtgcagttctacggcctgagcgagaacgacgagtggacccaggacagagccaagcccgtgacccagatcgtgtctgccgaagcctggggcagagccgatgatgtgattaagatccactggcaggaaaagaagtccaacaccatcctgggcagccaggaaggcaacaccatgaagaccaacgacacctacatgaagttcagctggctgaccgtgcccgagaagtccctggacaaagaacacagatgcatcgtgcggcacgaaaacaacaagaacggcgtggaccaggaaatcatcttcccacccatcaagaccgatgtgattacaatggaccccaaggacaactgctccaaggacgccaacgataccctgctgctccagctgaccaacaccagcgcctactacatgtacttgttgctgctgctgaagtccgtggtgtacttcgccatcatcacatgctgcctgctgatggctatggtcaagcggaaggacagccggggaagggccaagcgatctggatctggagcaacaaacttctcactactcaaacaagcaggtgacgtggaggagaatcccgggcctactagtatggactggatttggcgcatccttttccttgtcggcgctgctaccggcgcgcattccgggccccagctccagctgcaagagtctggacctggcctggtcaagcctagcgagacactgagcctgacctgtaccgtgtccggcgatagcatcagcagcggcgattactactggggctggatcagacagcctcctggcaaaggactggaatggatcggccacatctactacagcggcgtgacctactacaaccccagcctgaagtccagagtgaccatcagcgtggacaccagccggaaccagttctccctgaagctgtctagcgtgacagccgccgataccgccgtgtactactgcaccagagaggacagcagcaactggcggagtagaggccagggaacactggtcacagttagctctggatccggcggaggcggaagtggaggcggaggatctggcggcggaggctctttcgaacaagttcagctggttcagagcggagccgaagtgaagaaacctggggcctctgtgaaggtgtcctgcaaagccagcggctacacctttaccagctactggatcaactgggtccgacaggcccctggacaaggactggaatggatgggacagatccttccaggcggaggggacaccaactacaacggcaagttcaagggcagagtgaccatcaccgccgacaccagcacaagcaccgcctacatggaactgagcagcctgagaagcgaggacaccgccgtgtattattgcaccagacgggtgcccatccggctggattattggggacagggaaccctggtcaccgtgtctagtacgcgtatccagaaccctgatcctgccgtgtaccagctgcgggatagcaagagcagcgacaagagcgtgtgtctgttcaccgacttcgacagccagaccaacgtgtcccagagcaaggactccgacgtgtacatcaccgataagtgcgtgctggacatgcggagcatggacttcaagagcaactccgccgtggcctggtccaacaagtccgatttcgcctgcgccaacgccttcaacaacagcattatccccgaggacacattcttcccaagccccgagagcagcgactccaccgaccacgtgaagcccaaagagacagagaacaccaagcagcccagcaagagctgccacaagcccaaggccatcgtgcacaccgagaaagtgaacatgatgagcctgaccgtgctgggcctgcggatgctgttcgccaaaaccgtggccgtgaacttcctgctgaccgccaagctgttcttcctcctcaccgcc

SEQ ID NO: 38195 - DNA, 3003 bp, synthetic construct
  source 1..3003: mol_type = other DNA
atggccttaccagtgaccgccttgctcctgccgctggccttgctgctccacgccgccaggccggaagtgcagctggttgaatctggcggaggactggttcagcctggcggatctctgagactgtcttgtgccgccagcggcttcagcttcagcgacttttggatgagctgggtccgacaggcccctggcaaaggacttgaatgggtcgccacaatcagccaggccggcagcgagaaggactacgtggactctgtgaagggcagattcaccatcagccgggacaacgccaagaagtccctgtacctccagatgaacagcctgagagccgaggacaccgccgtgtactattgtgcctctggcgtgtacagcttcgactacagaggccagggcaccctggtcacagtctcttctggtaccggcggaggcggatctggcggcggaggtagcggtggcggaggatctgaattcgacatcgtgatgacacagagccctgatagcctggccgtgtctctgggagagagagccaccattaactgcaaggccagccagagcgtggactacgacggcgacagcttcctgaactggtatcagcagaagcccggccagcctcctaagctgctgatctacgccgccagcaatctggaaagcggcgtgccaagcagattttccggctctggcagcggcaccgatttcaccctgacaatatccagcctccagcctgaggacgtggccgtgtactactgccagcagagcaacgacgaccctctgacctttggacagggcaccaaggtggaaatcaaactcgagatccagaaccctgatcctgccgtgtaccagctgcgggatagcaagagcagcgacaagagcgtgtgtctgttcaccgacttcgacagccagaccaacgtgtcccagagcaaggactccgacgtgtacatcaccgataagtgcgtgctggacatgcggagcatggacttcaagagcaactccgccgtggcctggtccaacaagtccgatttcgcctgcgccaacgccttcaacaacagcattatccccgaggacacattcttcccaagccccgagagcagcgactccaccgaccacgtgaagcccaaagagacagagaacaccaagcagcccagcaagagctgccacaagcccaaggccatcgtgcacaccgagaaagtgaacatgatgagcctgaccgtgctgggcctgcggatgctgttcgccaaaaccgtggccgtgaacttcctgctgaccgccaagctgttcttcctcctcaccgcccgcgccaagagaagcggatctggcgtgaagcagaccctgaatttcgacctgctgaagctggctggcgacgtggaatccaacccaggccctactagtatggactggatttggcgcatccttttccttgtcggcgctgctaccggcgcgcattccgggccccagctccagctgcaagagtctggacctggcctggtcaagcctagcgagacactgagcctgacctgtaccgtgtccggcgatagcatcagcagcggcgattactactggggctggatcagacagcctcctggcaaaggactggaatggatcggccacatctactacagcggcgtgacctactacaaccccagcctgaagtccagagtgaccatcagcgtggacaccagccggaaccagttctccctgaagctgtctagcgtgacagccgccgataccgccgtgtactactgcaccagagaggacagcagcaactggcggagtagaggccagggaacactggtcacagttagctctggatccggcggaggcggaagtggaggcggaggatctggcggcggaggctctttcgaacaagttcagctggttcagagcggagccgaagtgaagaaacctggggcctctgtgaaggtgtcctgcaaagccagcggctacacctttaccagctactggatcaactgggtccgacaggcccctggacaaggactggaatggatgggacagatccttccaggcggaggggacaccaactacaacggcaagttcaagggcagagtgaccatcaccgccgacaccagcacaagcaccgcctacatggaactgagcagcctgagaagcgaggacaccgccgtgtattattgcaccagacgggtgcccatccggctggattattggggacagggaaccctggtcaccgtgtctagtacgcgtgaggacctgaagaacgtgttcccacctgaggtggccgtgttcgagcctagcgaggccgagatcagccacacccagaaagccaccctcgtgtgcctggctaccggcttctaccccgaccatgtggaactgtcttggtgggtcaacggcaaagaggtgcacagcggcgtgtgtaccgacccccagccactgaaagaacagcccgccctgaacgacagccggtactgcctgagcagcagactgagagtgtccgccaccttctggcagaacccccggaaccacttcagatgccaggtgcagttctacggcctgagcgagaacgacgagtggacccaggacagagccaagcccgtgacccagatcgtgtctgccgaagcctggggcagagccgatgatgtgattaagatccactggcaggaaaagaagtccaacaccatcctgggcagccaggaaggcaacaccatgaagaccaacgacacctacatgaagttcagctggctgaccgtgcccgagaagtccctggacaaagaacacagatgcatcgtgcggcacgaaaacaacaagaacggcgtggaccaggaaatcatcttcccacccatcaagaccgatgtgattacaatggaccccaaggacaactgctccaaggacgccaacgataccctgctgctccagctgaccaacaccagcgcctactacatgtacttgttgctgctgctgaagtccgtggtgtacttcgccatcatcacatgctgcctgctgatggctatggtcaagcggaaggacagccgggga

SEQ ID NO: 38196 - DNA, 2169 bp, synthetic construct
  source 1..2169: mol_type = other DNA
atggccttaccagtgaccgccttgctcctgccgctggccttgctgctccacgccgccaggccggacatcgtgatgacacagagccctgatagcctggccgtgtctctgggagagagagccaccattaactgcaaggccagccagagcgtggactacgacggcgacagcttcctgaactggtatcagcagaagcccggccagcctcctaagctgctgatctacgccgccagcaatctggaaagcggcgtgccaagcagattttccggctctggcagcggcaccgatttcaccctgacaatatccagcctccagcctgaggacgtggccgtgtactactgccagcagagcaacgacgaccctctgacctttggacagggcaccaaggtggaaatcaaactcgaggacctgaagaacgtgttcccacctgaggtggccgtgttcgagcctagcgaggccgagatcagccacacccagaaagccaccctcgtgtgcctggctaccggcttctaccccgaccatgtggaactgtcttggtgggtcaacggcaaagaggtgcacagcggcgtgtgtaccgacccccagccactgaaagaacagcccgccctgaacgacagccggtactgcctgagcagcagactgagagtgtccgccaccttctggcagaacccccggaaccacttcagatgccaggtgcagttctacggcctgagcgagaacgacgagtggacccaggacagagccaagcccgtgacccagatcgtgtctgccgaagcctggggcagagccgatgatgtgattaagatccactggcaggaaaagaagtccaacaccatcctgggcagccaggaaggcaacaccatgaagaccaacgacacctacatgaagttcagctggctgaccgtgcccgagaagtccctggacaaagaacacagatgcatcgtgcggcacgaaaacaacaagaacggcgtggaccaggaaatcatcttcccacccatcaagaccgatgtgattacaatggaccccaaggacaactgctccaaggacgccaacgataccctgctgctccagctgaccaacaccagcgcctactacatgtacttgttgctgctgctgaagtccgtggtgtacttcgccatcatcacatgctgcctgctgcggagaaccgccttctgctgcaacggcgagaagtctagggccaagcgatctggatctggagcaacaaacttctcactactcaaacaagcaggtgacgtggaggagaatcccgggcctactagtatggactggatttggcgcatccttttccttgtcggcgctgctaccggcgcgcattccttcgaacaagttcagctggttcagagcggagccgaagtgaagaaacctggggcctctgtgaaggtgtcctgcaaagccagcggctacacctttaccagctactggatcaactgggtccgacaggcccctggacaaggactggaatggatgggacagatccttccaggcggaggggacaccaactacaacggcaagttcaagggcagagtgaccatcaccgccgacaccagcacaagcaccgcctacatggaactgagcagcctgagaagcgaggacaccgccgtgtattattgcaccagacgggtgcccatccggctggattattggggacagggaaccctggtcaccgtgtctagtacgcgtatccagaaccctgatcctgccgtgtaccagctgcgggatagcaagagcagcgacaagagcgtgtgtctgttcaccgacttcgacagccagaccaacgtgtcccagagcaaggactccgacgtgtacatcaccgataagtgcgtgctggacatgcggagcatggacttcaagagcaactccgccgtggcctggtccaacaagtccgatttcgcctgcgccaacgccttcaacaacagcattatccccgaggacacattcttcccaagccccgagagcagcgactccaccgaccacgtgaagcccaaagagacagagaacaccaagcagcccagcaagagctgccacaagcccaaggccatcgtgcacaccgagaaagtgaacatgatgagcctgaccgtgctgggcctgcggatgctgttcgccaaaaccgtggccgtgaacttcctgctgaccgccaagctgttcttcctc

SEQ ID NO: 38197 - DNA, 2181 bp, synthetic construct
  source 1..2181: mol_type = other DNA
atggccttaccagtgaccgccttgctcctgccgctggccttgctgctccacgccgccaggccggacatcgtgatgacacagagccctgatagcctggccgtgtctctgggagagagagccaccattaactgcaaggccagccagagcgtggactacgacggcgacagcttcctgaactggtatcagcagaagcccggccagcctcctaagctgctgatctacgccgccagcaatctggaaagcggcgtgccaagcagattttccggctctggcagcggcaccgatttcaccctgacaatatccagcctccagcctgaggacgtggccgtgtactactgccagcagagcaacgacgaccctctgacctttggacagggcaccaaggtggaaatcaaactcgagatccagaaccctgatcctgccgtgtaccagctgcgggatagcaagagcagcgacaagagcgtgtgtctgttcaccgacttcgacagccagaccaacgtgtcccagagcaaggactccgacgtgtacatcaccgataagtgcgtgctggacatgcggagcatggacttcaagagcaactccgccgtggcctggtccaacaagtccgatttcgcctgcgccaacgccttcaacaacagcattatccccgaggacacattcttcccaagccccgagagcagcgactccaccgaccacgtgaagcccaaagagacagagaacaccaagcagcccagcaagagctgccacaagcccaaggccatcgtgcacaccgagaaagtgaacatgatgagcctgaccgtgctgggcctgcggatgctgttcgccaaaaccgtggccgtgaacttcctgctgaccgccaagctgttcttcctccgcgccaagagaagcggatctggcgtgaagcagaccctgaatttcgacctgctgaagctggctggcgacgtggaatccaacccaggccctactagtatggactggatttggcgcatccttttccttgtcggcgctgctaccggcgcgcattccttcgaacaagttcagctggttcagagcggagccgaagtgaagaaacctggggcctctgtgaaggtgtcctgcaaagccagcggctacacctttaccagctactggatcaactgggtccgacaggcccctggacaaggactggaatggatgggacagatccttccaggcggaggggacaccaactacaacggcaagttcaagggcagagtgaccatcaccgccgacaccagcacaagcaccgcctacatggaactgagcagcctgagaagcgaggacaccgccgtgtattattgcaccagacgggtgcccatccggctggattattggggacagggaaccctggtcaccgtgtctagtacgcgtgaggacctgaagaacgtgttcccacctgaggtggccgtgttcgagcctagcgaggccgagatcagccacacccagaaagccaccctcgtgtgcctggctaccggcttctaccccgaccatgtggaactgtcttggtgggtcaacggcaaagaggtgcacagcggcgtgtgtaccgacccccagccactgaaagaacagcccgccctgaacgacagccggtactgcctgagcagcagactgagagtgtccgccaccttctggcagaacccccggaaccacttcagatgccaggtgcagttctacggcctgagcgagaacgacgagtggacccaggacagagccaagcccgtgacccagatcgtgtctgccgaagcctggggcagagccgatgatgtgattaagatccactggcaggaaaagaagtccaacaccatcctgggcagccaggaaggcaacaccatgaagaccaacgacacctacatgaagttcagctggctgaccgtgcccgagaagtccctggacaaagaacacagatgcatcgtgcggcacgaaaacaacaagaacggcgtggaccaggaaatcatcttcccacccatcaagaccgatgtgattacaatggaccccaaggacaactgctccaaggacgccaacgataccctgctgctccagctgaccaacaccagcgcctactacatgtacttgttgctgctgctgaagtccgtggtgtacttcgccatcatcacatgctgcctgctgcggagaaccgccttctgctgcaacggcgagaagtct

SEQ ID NO: 38198 - DNA, 2574 bp, synthetic construct
  source 1..2574: mol_type = other DNA
atggccttaccagtgaccgccttgctcctgccgctggccttgctgctccacgccgccaggccggaagtgcagctggttgaatctggcggaggactggttcagcctggcggatctctgagactgtcttgtgccgccagcggcttcagcttcagcgacttttggatgagctgggtccgacaggcccctggcaaaggacttgaatgggtcgccacaatcagccaggccggcagcgagaaggactacgtggactctgtgaagggcagattcaccatcagccgggacaacgccaagaagtccctgtacctccagatgaacagcctgagagccgaggacaccgccgtgtactattgtgcctctggcgtgtacagcttcgactacagaggccagggcaccctggtcacagtctcttctggtaccggcggaggcggatctggcggcggaggtagcggtggcggaggatctgaattcgacatcgtgatgacacagagccctgatagcctggccgtgtctctgggagagagagccaccattaactgcaaggccagccagagcgtggactacgacggcgacagcttcctgaactggtatcagcagaagcccggccagcctcctaagctgctgatctacgccgccagcaatctggaaagcggcgtgccaagcagattttccggctctggcagcggcaccgatttcaccctgacaatatccagcctccagcctgaggacgtggccgtgtactactgccagcagagcaacgacgaccctctgacctttggacagggcaccaaggtggaaatcaaactcgaggacctgaagaacgtgttcccacctgaggtggccgtgttcgagcctagcgaggccgagatcagccacacccagaaagccaccctcgtgtgcctggctaccggcttctaccccgaccatgtggaactgtcttggtgggtcaacggcaaagaggtgcacagcggcgtgtgtaccgacccccagccactgaaagaacagcccgccctgaacgacagccggtactgcctgagcagcagactgagagtgtccgccaccttctggcagaacccccggaaccacttcagatgccaggtgcagttctacggcctgagcgagaacgacgagtggacccaggacagagccaagcccgtgacccagatcgtgtctgccgaagcctggggcagagccgatgatgtgattaagatccactggcaggaaaagaagtccaacaccatcctgggcagccaggaaggcaacaccatgaagaccaacgacacctacatgaagttcagctggctgaccgtgcccgagaagtccctggacaaagaacacagatgcatcgtgcggcacgaaaacaacaagaacggcgtggaccaggaaatcatcttcccacccatcaagaccgatgtgattacaatggaccccaaggacaactgctccaaggacgccaacgataccctgctgctccagctgaccaacaccagcgcctactacatgtacttgttgctgctgctgaagtccgtggtgtacttcgccatcatcacatgctgcctgctgcggagaaccgccttctgctgcaacggcgagaagtctagggccaagcgatctggatctggagcaacaaacttctcactactcaaacaagcaggtgacgtggaggagaatcccgggcctactagtatggactggatttggcgcatccttttccttgtcggcgctgctaccggcgcgcattccttcgaacaagttcagctggttcagagcggagccgaagtgaagaaacctggggcctctgtgaaggtgtcctgcaaagccagcggctacacctttaccagctactggatcaactgggtccgacaggcccctggacaaggactggaatggatgggacagatccttccaggcggaggggacaccaactacaacggcaagttcaagggcagagtgaccatcaccgccgacaccagcacaagcaccgcctacatggaactgagcagcctgagaagcgaggacaccgccgtgtattattgcaccagacgggtgcccatccggctggattattggggacagggaaccctggtcaccgtgtctagtacgcgtatccagaaccctgatcctgccgtgtaccagctgcgggatagcaagagcagcgacaagagcgtgtgtctgttcaccgacttcgacagccagaccaacgtgtcccagagcaaggactccgacgtgtacatcaccgataagtgcgtgctggacatgcggagcatggacttcaagagcaactccgccgtggcctggtccaacaagtccgatttcgcctgcgccaacgccttcaacaacagcattatccccgaggacacattcttcccaagccccgagagcagcgactccaccgaccacgtgaagcccaaagagacagagaacaccaagcagcccagcaagagctgccacaagcccaaggccatcgtgcacaccgagaaagtgaacatgatgagcctgaccgtgctgggcctgcggatgctgttcgccaaaaccgtggccgtgaacttcctgctgaccgccaagctgttcttcctc

SEQ ID NO: 38199 - DNA, 2985 bp, synthetic construct
  source 1..2985: mol_type = other DNA
atggccttaccagtgaccgccttgctcctgccgctggccttgctgctccacgccgccaggccggaagtgcagctggttgaatctggcggaggactggttcagcctggcggatctctgagactgtcttgtgccgccagcggcttcagcttcagcgacttttggatgagctgggtccgacaggcccctggcaaaggacttgaatgggtcgccacaatcagccaggccggcagcgagaaggactacgtggactctgtgaagggcagattcaccatcagccgggacaacgccaagaagtccctgtacctccagatgaacagcctgagagccgaggacaccgccgtgtactattgtgcctctggcgtgtacagcttcgactacagaggccagggcaccctggtcacagtctcttctggtaccggcggaggcggatctggcggcggaggtagcggtggcggaggatctgaattcgacatcgtgatgacacagagccctgatagcctggccgtgtctctgggagagagagccaccattaactgcaaggccagccagagcgtggactacgacggcgacagcttcctgaactggtatcagcagaagcccggccagcctcctaagctgctgatctacgccgccagcaatctggaaagcggcgtgccaagcagattttccggctctggcagcggcaccgatttcaccctgacaatatccagcctccagcctgaggacgtggccgtgtactactgccagcagagcaacgacgaccctctgacctttggacagggcaccaaggtggaaatcaaactcgaggacctgaagaacgtgttcccacctgaggtggccgtgttcgagcctagcgaggccgagatcagccacacccagaaagccaccctcgtgtgcctggctaccggcttctaccccgaccatgtggaactgtcttggtgggtcaacggcaaagaggtgcacagcggcgtgtgtaccgacccccagccactgaaagaacagcccgccctgaacgacagccggtactgcctgagcagcagactgagagtgtccgccaccttctggcagaacccccggaaccacttcagatgccaggtgcagttctacggcctgagcgagaacgacgagtggacccaggacagagccaagcccgtgacccagatcgtgtctgccgaagcctggggcagagccgatgatgtgattaagatccactggcaggaaaagaagtccaacaccatcctgggcagccaggaaggcaacaccatgaagaccaacgacacctacatgaagttcagctggctgaccgtgcccgagaagtccctggacaaagaacacagatgcatcgtgcggcacgaaaacaacaagaacggcgtggaccaggaaatcatcttcccacccatcaagaccgatgtgattacaatggaccccaaggacaactgctccaaggacgccaacgataccctgctgctccagctgaccaacaccagcgcctactacatgtacttgttgctgctgctgaagtccgtggtgtacttcgccatcatcacatgctgcctgctgcggagaaccgccttctgctgcaacggcgagaagtctagggccaagcgatctggatctggagcaacaaacttctcactactcaaacaagcaggtgacgtggaggagaatcccgggcctactagtatggactggatttggcgcatccttttccttgtcggcgctgctaccggcgcgcattccgggccccagctccagctgcaagagtctggacctggcctggtcaagcctagcgagacactgagcctgacctgtaccgtgtccggcgatagcatcagcagcggcgattactactggggctggatcagacagcctcctggcaaaggactggaatggatcggccacatctactacagcggcgtgacctactacaaccccagcctgaagtccagagtgaccatcagcgtggacaccagccggaaccagttctccctgaagctgtctagcgtgacagccgccgataccgccgtgtactactgcaccagagaggacagcagcaactggcggagtagaggccagggaacactggtcacagttagctctggatccggcggaggcggaagtggaggcggaggatctggcggcggaggctctttcgaacaagttcagctggttcagagcggagccgaagtgaagaaacctggggcctctgtgaaggtgtcctgcaaagccagcggctacacctttaccagctactggatcaactgggtccgacaggcccctggacaaggactggaatggatgggacagatccttccaggcggaggggacaccaactacaacggcaagttcaagggcagagtgaccatcaccgccgacaccagcacaagcaccgcctacatggaactgagcagcctgagaagcgaggacaccgccgtgtattattgcaccagacgggtgcccatccggctggattattggggacagggaaccctggtcaccgtgtctagtacgcgtatccagaaccctgatcctgccgtgtaccagctgcgggatagcaagagcagcgacaagagcgtgtgtctgttcaccgacttcgacagccagaccaacgtgtcccagagcaaggactccgacgtgtacatcaccgataagtgcgtgctggacatgcggagcatggacttcaagagcaactccgccgtggcctggtccaacaagtccgatttcgcctgcgccaacgccttcaacaacagcattatccccgaggacacattcttcccaagccccgagagcagcgactccaccgaccacgtgaagcccaaagagacagagaacaccaagcagcccagcaagagctgccacaagcccaaggccatcgtgcacaccgagaaagtgaacatgatgagcctgaccgtgctgggcctgcggatgctgttcgccaaaaccgtggccgtgaacttcctgctgaccgccaagctgttcttcctc

SEQ ID NO: 38200 - DNA, 1863 bp, synthetic construct
  source 1..1863: mol_type = other DNA
atggccttaccagtgaccgccttgctcctgccgctggccttgctgctccacgccgccaggccggacatcgtgatgacacagagccctgatagcctggccgtgtctctgggagagagagccaccattaactgcaaggccagccagagcgtggactacgacggcgacagcttcctgaactggtatcagcagaagcccggccagcctcctaagctgctgatctacgccgccagcaatctggaaagcggcgtgccaagcagattttccggctctggcagcggcaccgatttcaccctgacaatatccagcctccagcctgaggacgtggccgtgtactactgccagcagagcaacgacgaccctctgacctttggacagggcaccaaggtggaaatcaaactcgaggacctgaagaacgtgttcccacctgaggtggccgtgttcgagcctagcgaggccgagatcagccacacccagaaagccaccctcgtgtgcctggctaccggcttctaccccgaccatgtggaactgtcttggtgggtcaacggcaaagaggtgcacagcggcgtgtctaccgacccccagccactgaaagaacagcccgccctgaacgacagccggtactgcctgagcagcagactgagagtgtccgccaccttctggcagaacccccggaaccacttcagatgccaggtgcagttctacggcctgagcgagaacgacgagtggacccaggacagagccaagcccgtgacccagatcgtgtctgccgaagcctggggcagagccgattgcgacgtgaagctggtggaaaagagcttcgagacagacaccaacctgaacttccagaacctgagcgtgatcggcttcagaatcctgctgctgaaagtggccggctttaacctgctgatgaccctgcggctgtggtccagcagggccaagcgatctggatctggagcaacaaacttctcactactcaaacaagcaggtgacgtggaggagaatcccgggcctactagtatggactggatttggcgcatccttttccttgtcggcgctgctaccggcgcgcattccttcgaacaagttcagctggttcagagcggagccgaagtgaagaaacctggggcctctgtgaaggtgtcctgcaaagccagcggctacacctttaccagctactggatcaactgggtccgacaggcccctggacaaggactggaatggatgggacagatccttccaggcggaggggacaccaactacaacggcaagttcaagggcagagtgaccatcaccgccgacaccagcacaagcaccgcctacatggaactgagcagcctgagaagcgaggacaccgccgtgtattattgcaccagacgggtgcccatccggctggattattggggacagggaaccctggtcaccgtgtctagtacgcgtatccagaaccctgatcctgccgtgtaccagctgcgggatagcaagagcagcgacaagagcgtgtgtctgttcaccgacttcgacagccagaccaacgtgtcccagagcaaggactccgacgtgtacatcaccgataagaccgtgctggacatgcggagcatggacttcaagagcaactccgccgtggcctggtccaacaagtccgatttcgcctgcgccaacgccttcaacaacagcattatccccgaggacacattcttcccaagccccgagagcagctgcggctttaccagcgagagctaccagcagggcgtgctgagcgccaccatcctgtacgagatcctgctgggcaaggccaccctgtacgccgtgctggtgtctgccctggtgctgatggctatggtcaagcggaaggacagccgggga

SEQ ID NO: 38201 - DNA, 1863 bp, synthetic construct
  source 1..1863: mol_type = other DNA
atggccttaccagtgaccgccttgctcctgccgctggccttgctgctccacgccgccaggccggacatcgtgatgacacagagccctgatagcctggccgtgtctctgggagagagagccaccattaactgcaaggccagccagagcgtggactacgacggcgacagcttcctgaactggtatcagcagaagcccggccagcctcctaagctgctgatctacgccgccagcaatctggaaagcggcgtgccaagcagattttccggctctggcagcggcaccgatttcaccctgacaatatccagcctccagcctgaggacgtggccgtgtactactgccagcagagcaacgacgaccctctgacctttggacagggcaccaaggtggaaatcaaactcgaggacctgaagaacgtgttcccacctgaggtggccgtgttcgagcctagcgaggccgagatcagccacacccagaaagccaccctcgtgtgcctggctaccggcttctaccccgaccatgtggaactgtcttggtgggtcaacggcaaagaggtgcacagcggcgtgtctaccgacccccagccactgaaagaacagcccgccctgaacgacagccggtactgcctgagcagcagactgagagtgtccgccaccttctggcagaacccccggaaccacttcagatgccaggtgcagttctacggcctgagcgagaacgacgagtggacccaggacagagccaagcccgtgacccagatcgtgtctgccgaagcctggggcagagccgattgcggctttaccagcgagagctaccagcagggcgtgctgagcgccaccaacctgagcgtgatcggcttcagaatcctgctgctgaaagtggccggctttaacctgctgatgaccctgcggctgtggtccagcagggccaagcgatctggatctggagcaacaaacttctcactactcaaacaagcaggtgacgtggaggagaatcccgggcctactagtatggactggatttggcgcatccttttccttgtcggcgctgctaccggcgcgcattccttcgaacaagttcagctggttcagagcggagccgaagtgaagaaacctggggcctctgtgaaggtgtcctgcaaagccagcggctacacctttaccagctactggatcaactgggtccgacaggcccctggacaaggactggaatggatgggacagatccttccaggcggaggggacaccaactacaacggcaagttcaagggcagagtgaccatcaccgccgacaccagcacaagcaccgcctacatggaactgagcagcctgagaagcgaggacaccgccgtgtattattgcaccagacgggtgcccatccggctggattattggggacagggaaccctggtcaccgtgtctagtacgcgtatccagaaccctgatcctgccgtgtaccagctgcgggatagcaagagcagcgacaagagcgtgtgtctgttcaccgacttcgacagccagaccaacgtgtcccagagcaaggactccgacgtgtacatcaccgataagaccgtgctggacatgcggagcatggacttcaagagcaactccgccgtggcctggtccaacaagtccgatttcgcctgcgccaacgccttcaacaacagcattatccccgaggacacattcttcccaagccccgagagcagctgcgacgtgaagctggtggaaaagagcttcgagacagacaccaacctgaacttccagatcctgtacgagatcctgctgggcaaggccaccctgtacgccgtgctggtgtctgccctggtgctgatggctatggtcaagcggaaggacagccgggga

SEQ ID NO: 38202 - DNA, 2175 bp, synthetic construct
  source 1..2175: mol_type = other DNA
atggccttaccagtgaccgccttgctcctgccgctggccttgctgctccacgccgccaggccggacatcgtgatgacacagagccctgatagcctggccgtgtctctgggagagagagccaccattaactgcaaggccagccagagcgtggactacgacggcgacagcttcctgaactggtatcagcagaagcccggccagcctcctaagctgctgatctacgccgccagcaatctggaaagcggcgtgccaagcagattttccggctctggcagcggcaccgatttcaccctgacaatatccagcctccagcctgaggacgtggccgtgtactactgccagcagagcaacgacgaccctctgacctttggacagggcaccaaggtggaaatcaaactcgaggacctgaagaacgtgttcccacctgaggtggccgtgttcgagcctagcgaggccgagatcagccacacccagaaagccaccctcgtgtgcctggctaccggcttctaccccgaccatgtggaactgtcttggtgggtcaacggcaaagaggtgcacagcggcgtgtctaccgacccccagccactgaaagaacagcccgccctgaacgacagccggtactgcctgagcagcagactgagagtgtccgccaccttctggcagaacccccggaaccacttcagatgccaggtgcagttctacggcctgagcgagaacgacgagtggacccaggacagagccaagcccgtgacccagatcgtgtctgccgaagcctggggcagagccgatgatgtgattaagatccactggcaggaaaagaagtccaacaccatcctgggcagccaggaaggcaacaccatgaagaccaacgacacctacatgaagttcagctggctgaccgtgcccgagaagtccctggacaaagaacacagatgcatcgtgcggcacgaaaacaacaagaacggcgtggaccaggaaatcatcttcccacccatcaagaccgatgtgattacaatggaccccaaggacaactgctccaaggacgccaacgataccctgctgctccagctgaccaacaccagcgcctactacatgtacttgttgctgctgctgaagtccgtggtgtacttcgccatcatcacatgctgcctgctgatggctatggtcaagcggaaggacagccggggaagggccaagcgatctggatctggagcaacaaacttctcactactcaaacaagcaggtgacgtggaggagaatcccgggcctactagtatggactggatttggcgcatccttttccttgtcggcgctgctaccggcgcgcattccttcgaacaagttcagctggttcagagcggagccgaagtgaagaaacctggggcctctgtgaaggtgtcctgcaaagccagcggctacacctttaccagctactggatcaactgggtccgacaggcccctggacaaggactggaatggatgggacagatccttccaggcggaggggacaccaactacaacggcaagttcaagggcagagtgaccatcaccgccgacaccagcacaagcaccgcctacatggaactgagcagcctgagaagcgaggacaccgccgtgtattattgcaccagacgggtgcccatccggctggattattggggacagggaaccctggtcaccgtgtctagtacgcgtatccagaaccctgatcctgccgtgtaccagctgcgggatagcaagagcagcgacaagagcgtgtgtctgttcaccgacttcgacagccagaccaacgtgtcccagagcaaggactccgacgtgtacatcaccgataagaccgtgctggacatgcggagcatggacttcaagagcaactccgccgtggcctggtccaacaagtccgatttcgcctgcgccaacgccttcaacaacagcattatccccgaggacacattcttcccaagccccgagagcagcgactccaccgaccacgtgaagcccaaagagacagagaacaccaagcagcccagcaagagctgccacaagcccaaggccatcgtgcacaccgagaaagtgaacatgatgagcctgaccgtgctgggcctgcggatgctgttcgccaaaaccgtggccgtgaacttcctgctgaccgccaagctgttcttcctcctcaccgcc

SEQ ID NO: 38203 - DNA, 2169 bp, synthetic construct
  source 1..2169: mol_type = other DNA
atggccttaccagtgaccgccttgctcctgccgctggccttgctgctccacgccgccaggccggacatcgtgatgacacagagccctgatagcctggccgtgtctctgggagagagagccaccattaactgcaaggccagccagagcgtggactacgacggcgacagcttcctgaactggtatcagcagaagcccggccagcctcctaagctgctgatctacgccgccagcaatctggaaagcggcgtgccaagcagattttccggctctggcagcggcaccgatttcaccctgacaatatccagcctccagcctgaggacgtggccgtgtactactgccagcagagcaacgacgaccctctgacctttggacagggcaccaaggtggaaatcaaactcgaggacctgaagaacgtgttcccacctgaggtggccgtgttcgagcctagcgaggccgagatcagccacacccagaaagccaccctcgtgtgcctggctaccggcttctaccccgaccatgtggaactgtcttggtgggtcaacggcaaagaggtgcacagcggcgtgtctaccgacccccagccactgaaagaacagcccgccctgaacgacagccggtactgcctgagcagcagactgagagtgtccgccaccttctggcagaacccccggaaccacttcagatgccaggtgcagttctacggcctgagcgagaacgacgagtggacccaggacagagccaagcccgtgacccagatcgtgtctgccgaagcctggggcagagccgatgatgtgattaagatccactggcaggaaaagaagtccaacaccatcctgggcagccaggaaggcaacaccatgaagaccaacgacacctacatgaagttcagctggctgaccgtgcccgagaagtccctggacaaagaacacagatgcatcgtgcggcacgaaaacaacaagaacggcgtggaccaggaaatcatcttcccacccatcaagaccgatgtgattacaatggaccccaaggacaactgctccaaggacgccaacgataccctgctgctccagctgaccaacaccagcgcctactacatgtacttgttgctgctgctgaagtccgtggtgtacttcgccatcatcacatgctgcctgctgcggagaaccgccttctgctgcaacggcgagaagtctagggccaagcgatctggatctggagcaacaaacttctcactactcaaacaagcaggtgacgtggaggagaatcccgggcctactagtatggactggatttggcgcatccttttccttgtcggcgctgctaccggcgcgcattccttcgaacaagttcagctggttcagagcggagccgaagtgaagaaacctggggcctctgtgaaggtgtcctgcaaagccagcggctacacctttaccagctactggatcaactgggtccgacaggcccctggacaaggactggaatggatgggacagatccttccaggcggaggggacaccaactacaacggcaagttcaagggcagagtgaccatcaccgccgacaccagcacaagcaccgcctacatggaactgagcagcctgagaagcgaggacaccgccgtgtattattgcaccagacgggtgcccatccggctggattattggggacagggaaccctggtcaccgtgtctagtacgcgtatccagaaccctgatcctgccgtgtaccagctgcgggatagcaagagcagcgacaagagcgtgtgtctgttcaccgacttcgacagccagaccaacgtgtcccagagcaaggactccgacgtgtacatcaccgataagaccgtgctggacatgcggagcatggacttcaagagcaactccgccgtggcctggtccaacaagtccgatttcgcctgcgccaacgccttcaacaacagcattatccccgaggacacattcttcccaagccccgagagcagcgactccaccgaccacgtgaagcccaaagagacagagaacaccaagcagcccagcaagagctgccacaagcccaaggccatcgtgcacaccgagaaagtgaacatgatgagcctgaccgtgctgggcctgcggatgctgttcgccaaaaccgtggccgtgaacttcctgctgaccgccaagctgttcttcctc

SEQ ID NO: 38204 - DNA, 2601 bp, synthetic construct
  source 1..2601: mol_type = other DNA
atggccttaccagtgaccgccttgctcctgccgctggccttgctgctccacgccgccaggccgctcgaggaggacctgaagaacgtgttcccacctgaggtggccgtgttcgagcctagcgaggccgagatcagccacacccagaaagccaccctcgtgtgcctggctaccggcttctaccccgaccatgtggaactgtcttggtgggtcaacggcaaagaggtgcacagcggcgtgtgtaccgacccccagccactgaaagaacagcccgccctgaacgacagccggtactgcctgagcagcagactgagagtgtccgccaccttctggcagaacccccggaaccacttcagatgccaggtgcagttctacggcctgagcgagaacgacgagtggacccaggacagagccaagcccgtgacccagatcgtgtctgccgaagcctggggcagagccgattgcggctttaccagcgagagctaccagcagggcgtgctgagcgccaccaacctgagcgtgatcggcttcagaatcctgctgctgaaagtggccggctttaacctgctgatgaccctgcggctgtggtccagcagggccaagcgatctggatctggagcaacaaacttctcactactcaaacaagcaggtgacgtggaggagaatcccgggcctactagcatggccttaccagtgaccgccttgctcctgccgctggccttgctgctccacgccgccaggccggacatcgtgatgacacagagccctgatagcctggccgtgtctctgggagagagagccaccattaactgcaaggccagccagagcgtggactacgacggcgacagcttcctgaactggtatcagcagaagcccggccagcctcctaagctgctgatctacgccgccagcaatctggaaagcggcgtgccaagcagattttccggctctggcagcggcaccgatttcaccctgacaatatccagcctccagcctgaggacgtggccgtgtactactgccagcagagcaacgacgaccctctgacctttggacagggcaccaaggtggaaatcaaaggcggaggcggaagtggaggcggaggatctggcggcggaggctctcaagttcagctggttcagagcggagccgaagtgaagaaacctggggcctctgtgaaggtgtcctgcaaagccagcggctacacctttaccagctactggatcaactgggtccgacaggcccctggacaaggactggaatggatgggacagatccttccaggcggaggggacaccaactacaacggcaagttcaagggcagagtgaccatcaccgccgacaccagcacaagcaccgcctacatggaactgagcagcctgagaagcgaggacaccgccgtgtattattgcaccagacgggtgcccatccggctggattattggggacagggaaccctggtcaccgtgtctagtacgcgtatccagaaccctgatcctgccgtgtaccagctgcgggatagcaagagcagcgacaagagcgtgtgtctgttcaccgacttcgacagccagaccaacgtgtcccagagcaaggactccgacgtgtacatcaccgataagtgcgtgctggacatgcggagcatggacttcaagagcaactccgccgtggcctggtccaacaagtccgatttcgcctgcgccaacgccttcaacaacagcattatccccgaggacacattcttcccaagccccgagagcagctgcgacgtgaagctggtggaaaagagcttcgagacagacaccaacctgaacttccagatcctgtacgaggtgatcggcttcagaatcctgctgctgaaagtggccggctttaacctgctgatgaccctgcggctgtggtccagccgcgccaagagaagcggatctggcgtgaagcagaccctgaatttcgacctgctgaagctggctggcgacgtggaatccaacccaggcccttctagaggccatatgaccgagtacaagcccacggtgcgcctcgccacccgcgacgacgtccccagggccgtacgcaccctcgccgccgcgttcgccgactaccccgccacgcgccacaccgtcgatccggaccgccacatcgagcgggtcaccgagctgcaagaactcttcctcacgcgcgtcgggctcgacatcggcaaggtgtgggtcgcggacgacggcgccgcggtggcggtctggaccacgccggagagcgtcgaagcgggggcggtgttcgccgagatcggcccgcgcatggccgagttgagcggttcccggctggccgcgcagcaacagatggaaggcctcctggcgccgcaccggcccaaggagcccgcgtggttcctggccaccgtcggcgtctcgcccgaccaccagggcaagggtctgggcagcgccgtcgtgctccccggagtggaggcggccgagcgcgccggggtgcccgccttcctggagacctccgcgccccgcaacctccccttctacgagcggctcggcttcaccgtcaccgccgacgtcgaggtgcccgaaggaccgcgcacctggtgcatgacccgcaagcccggtgcctga

SEQ ID NO: 38205 - DNA, 2601 bp, synthetic construct
  source 1..2601: mol_type = other DNA
atggccttaccagtgaccgccttgctcctgccgctggccttgctgctccacgccgccaggccgctcgagatccagaaccctgatcctgccgtgtaccagctgcgggatagcaagagcagcgacaagagcgtgtgtctgttcaccgacttcgacagccagaccaacgtgtcccagagcaaggactccgacgtgtacatcaccgataagtgcgtgctggacatgcggagcatggacttcaagagcaactccgccgtggcctggtccaacaagtccgatttcgcctgcgccaacgccttcaacaacagcattatccccgaggacacattcttcccaagccccgagagcagctgcgacgtgaagctggtggaaaagagcttcgagacagacaccaacctgaacttccagatcctgtacgaggtgatcggcttcagaatcctgctgctgaaagtggccggctttaacctgctgatgaccctgcggctgtggtccagcagggccaagcgatctggatctggagcaacaaacttctcactactcaaacaagcaggtgacgtggaggagaatcccgggcctactagcatggccttaccagtgaccgccttgctcctgccgctggccttgctgctccacgccgccaggccggacatcgtgatgacacagagccctgatagcctggccgtgtctctgggagagagagccaccattaactgcaaggccagccagagcgtggactacgacggcgacagcttcctgaactggtatcagcagaagcccggccagcctcctaagctgctgatctacgccgccagcaatctggaaagcggcgtgccaagcagattttccggctctggcagcggcaccgatttcaccctgacaatatccagcctccagcctgaggacgtggccgtgtactactgccagcagagcaacgacgaccctctgacctttggacagggcaccaaggtggaaatcaaaggcggaggcggaagtggaggcggaggatctggcggcggaggctctcaagttcagctggttcagagcggagccgaagtgaagaaacctggggcctctgtgaaggtgtcctgcaaagccagcggctacacctttaccagctactggatcaactgggtccgacaggcccctggacaaggactggaatggatgggacagatccttccaggcggaggggacaccaactacaacggcaagttcaagggcagagtgaccatcaccgccgacaccagcacaagcaccgcctacatggaactgagcagcctgagaagcgaggacaccgccgtgtattattgcaccagacgggtgcccatccggctggattattggggacagggaaccctggtcaccgtgtctagtacgcgtgaggacctgaagaacgtgttcccacctgaggtggccgtgttcgagcctagcgaggccgagatcagccacacccagaaagccaccctcgtgtgcctggctaccggcttctaccccgaccatgtggaactgtcttggtgggtcaacggcaaagaggtgcacagcggcgtgtgtaccgacccccagccactgaaagaacagcccgccctgaacgacagccggtactgcctgagcagcagactgagagtgtccgccaccttctggcagaacccccggaaccacttcagatgccaggtgcagttctacggcctgagcgagaacgacgagtggacccaggacagagccaagcccgtgacccagatcgtgtctgccgaagcctggggcagagccgattgcggctttaccagcgagagctaccagcagggcgtgctgagcgccaccaacctgagcgtgatcggcttcagaatcctgctgctgaaagtggccggctttaacctgctgatgaccctgcggctgtggtccagccgcgccaagagaagcggatctggcgtgaagcagaccctgaatttcgacctgctgaagctggctggcgacgtggaatccaacccaggcccttctagaggccatatgaccgagtacaagcccacggtgcgcctcgccacccgcgacgacgtccccagggccgtacgcaccctcgccgccgcgttcgccgactaccccgccacgcgccacaccgtcgatccggaccgccacatcgagcgggtcaccgagctgcaagaactcttcctcacgcgcgtcgggctcgacatcggcaaggtgtgggtcgcggacgacggcgccgcggtggcggtctggaccacgccggagagcgtcgaagcgggggcggtgttcgccgagatcggcccgcgcatggccgagttgagcggttcccggctggccgcgcagcaacagatggaaggcctcctggcgccgcaccggcccaaggagcccgcgtggttcctggccaccgtcggcgtctcgcccgaccaccagggcaagggtctgggcagcgccgtcgtgctccccggagtggaggcggccgagcgcgccggggtgcccgccttcctggagacctccgcgccccgcaacctccccttctacgagcggctcggcttcaccgtcaccgccgacgtcgaggtgcccgaaggaccgcgcacctggtgcatgacccgcaagcccggtgcctga

SEQ ID NO: 38206 - DNA, 2601 bp, synthetic construct; identical to SEQ ID NO: 38204
  source 1..2601: mol_type = other DNA

SEQ ID NO: 38207 - DNA, 2925 bp, synthetic construct
  source 1..2925: mol_type = other DNA
atggccttaccagtgaccgccttgctcctgccgctggccttgctgctccacgccgccaggccgctcgaggaggacctgaagaacgtgttcccacctgaggtggccgtgttcgagcctagcgaggccgagatcagccacacccagaaagccaccctcgtgtgcctggctaccggcttctaccccgaccatgtggaactgtcttggtgggtcaacggcaaagaggtgcacagcggcgtgtctaccgacccccagccactgaaagaacagcccgccctgaacgacagccggtactgcctgagcagcagactgagagtgtccgccaccttctggcagaacccccggaaccacttcagatgccaggtgcagttctacggcctgagcgagaacgacgagtggacccaggacagagccaagcccgtgacccagatcgtgtctgccgaagcctggggcagagccgatgatgtgattaagatccactggcaggaaaagaagtccaacaccatcctgggcagccaggaaggcaacaccatgaagaccaacgacacctacatgaagttcagctggctgaccgtgcccgagaagtccctggacaaagaacacagatgcatcgtgcggcacgaaaacaacaagaacggcgtggaccaggaaatcatcttcccacccatcaagaccgatgtgattacaatggaccccaaggacaactgctccaaggacgccaacgataccctgctgctccagctgaccaacaccagcgcctactacatgtacttgttgctgctgctgaagtccgtggtgtacttcgccatcatcacatgctgcctgctgatggctatggtcaagcggaaggacagccggggaagggccaagcgatctggatctggagcaacaaacttctcactactcaaacaagcaggtgacgtggaggagaatcccgggcctactagcatggccttaccagtgaccgccttgctcctgccgctggccttgctgctccacgccgccaggccggacatcgtgatgacacagagccctgatagcctggccgtgtctctgggagagagagccaccattaactgcaaggccagccagagcgtggactacgacggcgacagcttcctgaactggtatcagcagaagcccggccagcctcctaagctgctgatctacgccgccagcaatctggaaagcggcgtgccaagcagattttccggctctggcagcggcaccgatttcaccctgacaatatccagcctccagcctgaggacgtggccgtgtactactgccagcagagcaacgacgaccctctgacctttggacagggcaccaaggtggaaatcaaaggcggaggcggaagtggaggcggaggatctggcggcggaggctctcaagttcagctggttcagagcggagccgaagtgaagaaacctggggcctctgtgaaggtgtcctgcaaagccagcggctacacctttaccagctactggatcaactgggtccgacaggcccctggacaaggactggaatggatgggacagatccttccaggcggaggggacaccaactacaacggcaagttcaagggcagagtgaccatcaccgccgacaccagcacaagcaccgcctacatggaactgagcagcctgagaagcgaggacaccgccgtgtattattgcaccagacgggtgcccatccggctggattattggggacagggaaccctggtcaccgtgtctagtacgcgtatccagaaccctgatcctgccgtgtaccagctgcgggatagcaagagcagcgacaagagcgtgtgtctgttcaccgacttcgacagccagaccaacgtgtcccagagcaaggactccgacgtgtacatcaccgataagaccgtgctggacatgcggagcatggacttcaagagcaactccgccgtggcctggtccaacaagtccgatttcgcctgcgccaacgccttcaacaacagcattatccccgaggacacattcttcccaagccccgagagcagcgactccaccgaccacgtgaagcccaaagagacagagaacaccaagcagcccagcaagagctgccacaagcccaaggccatcgtgcacaccgagaaagtgaacatgatgagcctgaccgtgctgggcctgcggatgctgttcgccaaaaccgtggccgtgaacttcctgctgaccgccaagctgttcttcctcctcaccgcccgcgccaagagaagcggatctggcgtgaagcagaccctgaatttcgacctgctgaagctggctggcgacgtggaatccaacccaggcccttctagaggccatatgaccgagtacaagcccacggtgcgcctcgccacccgcgacgacgtccccagggccgtacgcaccctcgccgccgcgttcgccgactaccccgccacgcgccacaccgtcgatccggaccgccacatcgagcgggtcaccgagctgcaagaactcttcctcacgcgcgtcgggctcgacatcggcaaggtgtgggtcgcggacgacggcgccgcggtggcggtctggaccacgccggagagcgtcgaagcgggggcggtgttcgccgagatcggcccgcgcatggccgagttgagcggttcccggctggccgcgcagcaacagatggaaggcctcctggcgccgcaccggcccaaggagcccgcgtggttcctggccaccgtcggcgtctcgcccgaccaccagggcaagggtctgggcagcgccgtcgtgctccccggagtggaggcggccgagcgcgccggggtgcccgccttcctggagacctccgcgccccgcaacctccccttctacgagcggctcggcttcaccgtcaccgccgacgtcgaggtgcccgaaggaccgcgcacctggtgcatgacccgcaagcccggtgcctga

SEQ ID NO: 38208 - DNA, 2925 bp, synthetic construct
  source 1..2925: mol_type = other DNA
atggccttaccagtgaccgccttgctcctgccgctggccttgctgctccacgccgccaggccgctcgagatccagaaccctgatcctgccgtgtaccagctgcgggatagcaagagcagcgacaagagcgtgtgtctgttcaccgacttcgacagccagaccaacgtgtcccagagcaaggactccgacgtgtacatcaccgataagaccgtgctggacatgcggagcatggacttcaagagcaactccgccgtggcctggtccaacaagtccgatttcgcctgcgccaacgccttcaacaacagcattatccccgaggacacattcttcccaagccccgagagcagcgactccaccgaccacgtgaagcccaaagagacagagaacaccaagcagcccagcaagagctgccacaagcccaaggccatcgtgcacaccgagaaagtgaacatgatgagcctgaccgtgctgggcctgcggatgctgttcgccaaaaccgtggccgtgaacttcctgctgaccgccaagctgttcttcctcctcaccgccagggccaagcgatctggatctggagcaacaaacttctcactactcaaacaagcaggtgacgtggaggagaatcccgggcctactagcatggccttaccagtgaccgccttgctcctgccgctggccttgctgctccacgccgccaggccggacatcgtgatgacacagagccctgatagcctggccgtgtctctgggagagagagccaccattaactgcaaggccagccagagcgtggactacgacggcgacagcttcctgaactggtatcagcagaagcccggccagcctcctaagctgctgatctacgccgccagcaatctggaaagcggcgtgccaagcagattttccggctctggcagcggcaccgatttcaccctgacaatatccagcctccagcctgaggacgtggccgtgtactactgccagcagagcaacgacgaccctctgacctttggacagggcaccaaggtggaaatcaaaggcggaggcggaagtggaggcggaggatctggcggcggaggctctcaagttcagctggttcagagcggagccgaagtgaagaaacctggggcctctgtgaaggtgtcctgcaaagccagcggctacacctttaccagctactggatcaactgggtccgacaggcccctggacaaggactggaatggatgggacagatccttccaggcggaggggacaccaactacaacggcaagttcaagggcagagtgaccatcaccgccgacaccagcacaagcaccgcctacatggaactgagcagcctgagaagcgaggacaccgccgtgtattattgcaccagacgggtgcccatccggctggattattggggacagggaaccctggtcaccgtgtctagtacgcgtgaggacctgaagaacgtgttcccacctgaggtggccgtgttcgagcctagcgaggccgagatcagccacacccagaaagccaccctcgtgtgcctggctaccggcttctaccccgaccatgtggaactgtcttggtgggtcaacggcaaagaggtgcacagcggcgtgtctaccgacccccagccactgaaagaacagcccgccctgaacgacagccggtactgcctgagcagcagactgagagtgtccgccaccttctggcagaacccccggaaccacttcagatgccaggtgcagttctacggcctgagcgagaacgacgagtggacccaggacagagccaagcccgtgacccagatcgtgtctgccgaagcctggggcagagccgatgatgtgattaagatccactggcaggaaaagaagtccaacaccatcctgggcagccaggaaggcaacaccatgaagaccaacgacacctacatgaagttcagctggctgaccgtgcccgagaagtccctggacaaagaacacagatgcatcgtgcggcacgaaaacaacaagaacggcgtggaccaggaaatcatcttcccacccatcaagaccgatgtgattacaatggaccccaaggacaactgctccaaggacgccaacgataccctgctgctccagctgaccaacaccagcgcctactacatgtacttgttgctgctgctgaagtccgtggtgtacttcgccatcatcacatgctgcctgctgatggctatggtcaagcggaaggacagccggggacgcgccaagagaagcggatctggcgtgaagcagaccctgaatttcgacctgctgaagctggctggcgacgtggaatccaacccaggcccttctagaggccatatgaccgagtacaagcccacggtgcgcctcgccacccgcgacgacgtccccagggccgtacgcaccctcgccgccgcgttcgccgactaccccgccacgcgccacaccgtcgatccggaccgccacatcgagcgggtcaccgagctgcaagaactcttcctcacgcgcgtcgggctcgacatcggcaaggtgtgggtcgcggacgacggcgccgcggtggcggtctggaccacgccggagagcgtcgaagcgggggcggtgttcgccgagatcggcccgcgcatggccgagttgagcggttcccggctggccgcgcagcaacagatggaaggcctcctggcgccgcaccggcccaaggagcccgcgtggttcctggccaccgtcggcgtctcgcccgaccaccagggcaagggtctgggcagcgccgtcgtgctccccggagtggaggcggccgagcgcgccggggtgcccgccttcctggagacctccgcgccccgcaacctccccttctacgagcggctcggcttcaccgtcaccgccgacgtcgaggtgcccgaaggaccgcgcacctggtgcatgacccgcaagcccggtgcctga

SEQ ID NO: 38209 - DNA, 2919 bp, synthetic construct
  source 1..2919: mol_type = other DNA
atggccttaccagtgaccgccttgctcctgccgctggccttgctgctccacgccgccaggccgctcgaggaggacctgaagaacgtgttcccacctgaggtggccgtgttcgagcctagcgaggccgagatcagccacacccagaaagccaccctcgtgtgcctggctaccggcttctaccccgaccatgtggaactgtcttggtgggtcaacggcaaagaggtgcacagcggcgtgtgtaccgacccccagccactgaaagaacagcccgccctgaacgacagccggtactgcctgagcagcagactgagagtgtccgccaccttctggcagaacccccggaaccacttcagatgccaggtgcagttctacggcctgagcgagaacgacgagtggacccaggacagagccaagcccgtgacccagatcgtgtctgccgaagcctggggcagagccgatgatgtgattaagatccactggcaggaaaagaagtccaacaccatcctgggcagccaggaaggcaacaccatgaagaccaacgacacctacatgaagttcagctggctgaccgtgcccgagaagtccctggacaaagaacacagatgcatcgtgcggcacgaaaacaacaagaacggcgtggaccaggaaatcatcttcccacccatcaagaccgatgtgattacaatggaccccaaggacaactgctccaaggacgccaacgataccctgctgctccagctgaccaacaccagcgcctactacatgtacttgttgctgctgctgaagtccgtggtgtacttcgccatcatcacatgctgcctgctgcggagaaccgccttctgctgcaacggcgagaagtctagggccaagcgatctggatctggagcaacaaacttctcactactcaaacaagcaggtgacgtggaggagaatcccgggcctactagcatggccttaccagtgaccgccttgctcctgccgctggccttgctgctccacgccgccaggccggacatcgtgatgacacagagccctgatagcctggccgtgtctctgggagagagagccaccattaactgcaaggccagccagagcgtggactacgacggcgacagcttcctgaactggtatcagcagaagcccggccagcctcctaagctgctgatctacgccgccagcaatctggaaagcggcgtgccaagcagattttccggctctggcagcggcaccgatttcaccctgacaatatccagcctccagcctgaggacgtggccgtgtactactgccagcagagcaacgacgaccctctgacctttggacagggcaccaaggtggaaatcaaaggcggaggcggaagtggaggcggaggatctggcggcggaggctctcaagttcagctggttcagagcggagccgaagtgaagaaacctggggcctctgtgaaggtgtcctgcaaagccagcggctacacctttaccagctactggatcaactgggtccgacaggcccctggacaaggactggaatggatgggacagatccttccaggcggaggggacaccaactacaacggcaagttcaagggcagagtgaccatcaccgccgacaccagcacaagcaccgcctacatggaactgagcagcctgagaagcgaggacaccgccgtgtattattgcaccagacgggtgcccatccggctggattattggggacagggaaccctggtcaccgtgtctagtacgcgtatccagaaccctgatcctgccgtgtaccagctgcgggatagcaagagcagcgacaagagcgtgtgtctgttcaccgacttcgacagccagaccaacgtgtcccagagcaaggactccgacgtgtacatcaccgataagtgcgtgctggacatgcggagcatggacttcaagagcaactccgccgtggcctggtccaacaagtccgatttcgcctgcgccaacgccttcaacaacagcattatccccgaggacacattcttcccaagccccgagagcagcgactccaccgaccacgtgaagcccaaagagacagagaacaccaagcagcccagcaagagctgccacaagcccaaggccatcgtgcacaccgagaaagtgaacatgatgagcctgaccgtgctgggcctgcggatgctgttcgccaaaaccgtggccgtgaacttcctgctgaccgccaagctgttcttcctccgcgccaagagaagcggatctggcgtgaagcagaccctgaatttcgacctgctgaagctggctggcgacgtggaatccaacccaggcccttctagaggccatatgaccgagtacaagcccacggtgcgcctcgccacccgcgacgacgtccccagggccgtacgcaccctcgccgccgcgttcgccgactaccccgccacgcgccacaccgtcgatccggaccgccacatcgagcgggtcaccgagctgcaagaactcttcctcacgcgcgtcgggctcgacatcggcaaggtgtgggtcgcggacgacggcgccgcggtggcggtctggaccacgccggagagcgtcgaagcgggggcggtgttcgccgagatcggcccgcgcatggccgagttgagcggttcccggctggccgcgcagcaacagatggaaggcctcctggcgccgcaccggcccaaggagcccgcgtggttcctggccaccgtcggcgtctcgcccgaccaccagggcaagggtctgggcagcgccgtcgtgctccccggagtggaggcggccgagcgcgccggggtgcccgccttcctggagacctccgcgccccgcaacctccccttctacgagcggctcggcttcaccgtcaccgccgacgtcgaggtgcccgaaggaccgcgcacctggtgcatgacccgcaagcccggtgcctga

SEQ ID NO: 38210 - DNA, 2919 bp, synthetic construct
  source 1..2919: mol_type = other DNA
atggccttaccagtgaccgccttgctcctgccgctggccttgctgctccacgccgccaggccgctcgagatccagaaccctgatcctgccgtgtaccagctgcgggatagcaagagcagcgacaagagcgtgtgtctgttcaccgacttcgacagccagaccaacgtgtcccagagcaaggactccgacgtgtacatcaccgataagtgcgtgctggacatgcggagcatggacttcaagagcaactccgccgtggcctggtccaacaagtccgatttcgcctgcgccaacgccttcaacaacagcattatccccgaggacacattcttcccaagccccgagagcagcgactccaccgaccacgtgaagcccaaagagacagagaacaccaagcagcccagcaagagctgccacaagcccaaggccatcgtgcacaccgagaaagtgaacatgatgagcctgaccgtgctgggcctgcggatgctgttcgccaaaaccgtggccgtgaacttcctgctgaccgccaagctgttcttcctcagggccaagcgatctggatctggagcaacaaacttctcactactcaaacaagcaggtgacgtggaggagaatcccgggcctactagcatggccttaccagtgaccgccttgctcctgccgctggccttgctgctccacgccgccaggccggacatcgtgatgacacagagccctgatagcctggccgtgtctctgggagagagagccaccattaactgcaaggccagccagagcgtggactacgacggcgacagcttcctgaactggtatcagcagaagcccggccagcctcctaagctgctgatctacgccgccagcaatctggaaagcggcgtgccaagcagattttccggctctggcagcggcaccgatttcaccctgacaatatccagcctccagcctgaggacgtggccgtgtactactgccagcagagcaacgacgaccctctgacctttggacagggcaccaaggtggaaatcaaaggcggaggcggaagtggaggcggaggatctggcggcggaggctctcaagttcagctggttcagagcggagccgaagtgaagaaacctggggcctctgtgaaggtgtcctgcaaagccagcggctacacctttaccagctactggatcaactgggtccgacaggcccctggacaaggactggaatggatgggacagatccttccaggcggaggggacaccaactacaacggcaagttcaagggcagagtgaccatcaccgccgacaccagcacaagcaccgcctacatggaactgagcagcctgagaagcgaggacaccgccgtgtattattgcaccagacgggtgcccatccggctggattattggggacagggaaccctggtcaccgtgtctagtacgcgtgaggacctgaagaacgtgttcccacctgaggtggccgtgttcgagcctagcgaggccgagatcagccacacccagaaagccaccctcgtgtgcctggctaccggcttctaccccgaccatgtggaactgtcttggtgggtcaacggcaaagaggtgcacagcggcgtgtgtaccgacccccagccactgaaagaacagcccgccctgaacgacagccggtactgcctgagcagcagactgagagtgtccgccaccttctggcagaacccccggaaccacttcagatgccaggtgcagttctacggcctgagcgagaacgacgagtggacccaggacagagccaagcccgtgacccagatcgtgtctgccgaagcctggggcagagccgatgatgtgattaagatccactggcaggaaaagaagtccaacaccatcctgggcagccaggaaggcaacaccatgaagaccaacgacacctacatgaagttcagctggctgaccgtgcccgagaagtccctggacaaagaacacagatgcatcgtgcggcacgaaaacaacaagaacggcgtggaccaggaaatcatcttcccacccatcaagaccgatgtgattacaatggaccccaaggacaactgctccaaggacgccaacgataccctgctgctccagctgaccaacaccagcgcctactacatgtacttgttgctgctgctgaagtccgtggtgtacttcgccatcatcacatgctgcctgctgcggagaaccgccttctgctgcaacggcgagaagtctcgcgccaagagaagcggatctggcgtgaagcagaccctgaatttcgacctgctgaagctggctggcgacgtggaatccaacccaggcccttctagaggccatatgaccgagtacaagcccacggtgcgcctcgccacccgcgacgacgtccccagggccgtacgcaccctcgccgccgcgttcgccgactaccccgccacgcgccacaccgtcgatccggaccgccacatcgagcgggtcaccgagctgcaagaactcttcctcacgcgcgtcgggctcgacatcggcaaggtgtgggtcgcggacgacggcgccgcggtggcggtctggaccacgccggagagcgtcgaagcgggggcggtgttcgccgagatcggcccgcgcatggccgagttgagcggttcccggctggccgcgcagcaacagatggaaggcctcctggcgccgcaccggcccaaggagcccgcgtggttcctggccaccgtcggcgtctcgcccgaccaccagggcaagggtctgggcagcgccgtcgtgctccccggagtggaggcggccgagcgcgccggggtgcccgccttcctggagacctccgcgccccgcaacctccccttctacgagcggctcggcttcaccgtcaccgccgacgtcgaggtgcccgaaggaccgcgcacctggtgcatgacccgcaagcccggtgcctga

SEQ ID NO: 38211 - DNA, 2919 bp, synthetic construct
  source 1..2919: mol_type = other DNA
atggccttaccagtgaccgccttgctcctgccgctggccttgctgctccacgccgccaggccgctcgaggaggacctgaagaacgtgttcccacctgaggtggccgtgttcgagcctagcgaggccgagatcagccacacccagaaagccaccctcgtgtgcctggctaccggcttctaccccgaccatgtggaactgtcttggtgggtcaacggcaaagaggtgcacagcggcgtgtctaccgacccccagccactgaaagaacagcccgccctgaacgacagccggtactgcctgagcagcagactgagagtgtccgccaccttctggcagaacccccggaaccacttcagatgccaggtgcagttctacggcctgagcgagaacgacgagtggacccaggacagagccaagcccgtgacccagatcgtgtctgccgaagcctggggcagagccgatgatgtgattaagatccactggcaggaaaagaagtccaacaccatcctgggcagccaggaaggcaacaccatgaagaccaacgacacctacatgaagttcagctggctgaccgtgcccgagaagtccctggacaaagaacacagatgcatcgtgcggcacgaaaacaacaagaacggcgtggaccaggaaatcatcttcccacccatcaagaccgatgtgattacaatggaccccaaggacaactgctccaaggacgccaacgataccctgctgctccagctgaccaacaccagcgcctactacatgtacttgttgctgctgctgaagtccgtggtgtacttcgccatcatcacatgctgcctgctgcggagaaccgccttctgctgcaacggcgagaagtctagggccaagcgatctggatctggagcaacaaacttctcactactcaaacaagcaggtgacgtggaggagaatcccgggcctactagcatggccttaccagtgaccgccttgctcctgccgctggccttgctgctccacgccgccaggccggacatcgtgatgacacagagccctgatagcctggccgtgtctctgggagagagagccaccattaactgcaaggccagccagagcgtggactacgacggcgacagcttcctgaactggtatcagcagaagcccggccagcctcctaagctgctgatctacgccgccagcaatctggaaagcggcgtgccaagcagattttccggctctggcagcggcaccgatttcaccctgacaatatccagcctccagcctgaggacgtggccgtgtactactgccagcagagcaacgacgaccctctgacctttggacagggcaccaaggtggaaatcaaaggcggaggcggaagtggaggcggaggatctggcggcggaggctctcaagttcagctggttcagagcggagccgaagtgaagaaacctggggcctctgtgaaggtgtcctgcaaagccagcggctacacctttaccagctactggatcaactgggtccgacaggcccctggacaaggactggaatggatgggacagatccttccaggcggaggggacaccaactacaacggcaagttcaagggcagagtgaccatcaccgccgacaccagcacaagcaccgcctacatggaactgagcagcctgagaagcgaggacaccgccgtgtattattgcaccagacgggtgcccatccggctggattattggggacagggaaccctggtcaccgtgtctagtacgcgtatccagaaccctgatcctgccgtgtaccagctgcgggatagcaagagcagcgacaagagcgtgtgtctgttcaccgacttcgacagccagaccaacgtgtcccagagcaaggactccgacgtgtacatcaccgataagaccgtgctggacatgcggagcatggacttcaagagcaactccgccgtggcctggtccaacaagtccgatttcgcctgcgccaacgccttcaacaacagcattatccccgaggacacattcttcccaagccccgagagcagcgactccaccgaccacgtgaagcccaaagagacagagaacaccaagcagcccagcaagagctgccacaagcccaaggccatcgtgcacaccgagaaagtgaacatgatgagcctgaccgtgctgggcctgcggatgctgttcgccaaaaccgtggccgtgaacttcctgctgaccgccaagctgttcttcctccgcgccaagagaagcggatctggcgtgaagcagaccctgaatttcgacctgctgaagctggctggcgacgtggaatccaacccaggcccttctagaggccatatgaccgagtacaagcccacggtgcgcctcgccacccgcgacgacgtccccagggccgtacgcaccctcgccgccgcgttcgccgactaccccgccacgcgccacaccgtcgatccggaccgccacatcgagcgggtcaccgagctgcaagaactcttcctcacgcgcgtcgggctcgacatcggcaaggtgtgggtcgcggacgacggcgccgcggtggcggtctggaccacgccggagagcgtcgaagcgggggcggtgttcgccgagatcggcccgcgcatggccgagttgagcggttcccggctggccgcgcagcaacagatggaaggcctcctggcgccgcaccggcccaaggagcccgcgtggttcctggccaccgtcggcgtctcgcccgaccaccagggcaagggtctgggcagcgccgtcgtgctccccggagtggaggcggccgagcgcgccggggtgcccgccttcctggagacctccgcgccccgcaacctccccttctacgagcggctcggcttcaccgtcaccgccgacgtcgaggtgcccgaaggaccgcgcacctggtgcatgacccgcaagcccggtgcctga

SEQ ID NO: 38212 - DNA, 2919 bp, synthetic construct
  source 1..2919: mol_type = other DNA
atggccttaccagtgaccgccttgctcctgccgctggccttgctgctccacgccgccaggccgctcgagatccagaaccctgatcctgccgtgtaccagctgcgggatagcaagagcagcgacaagagcgtgtgtctgttcaccgacttcgacagccagaccaacgtgtcccagagcaaggactccgacgtgtacatcaccgataagaccgtgctggacatgcggagcatggacttcaagagcaactccgccgtggcctggtccaacaagtccgatttcgcctgcgccaacgccttcaacaacagcattatccccgaggacacattcttcccaagccccgagagcagcgactccaccgaccacgtgaagcccaaagagacagagaacaccaagcagcccagcaagagctgccacaagcccaaggccatcgtgcacaccgagaaagtgaacatgatgagcctgaccgtgctgggcctgcggatgctgttcgccaaaaccgtggccgtgaacttcctgctgaccgccaagctgttcttcctcagggccaagcgatctggatctggagcaacaaacttctcactactcaaacaagcaggtgacgtggaggagaatcccgggcctactagcatggccttaccagtgaccgccttgctcctgccgctggccttgctgctccacgccgccaggccggacatcgtgatgacacagagccctgatagcctggccgtgtctctgggagagagagccaccattaactgcaaggccagccagagcgtggactacgacggcgacagcttcctgaactggtatcagcagaagcccggccagcctcctaagctgctgatctacgccgccagcaatctggaaagcggcgtgccaagcagattttccggctctggcagcggcaccgatttcaccctgacaatatccagcctccagcctgaggacgtggccgtgtactactgccagcagagcaacgacgaccctctgacctttggacagggcaccaaggtggaaatcaaaggcggaggcggaagtggaggcggaggatctggcggcggaggctctcaagttcagctggttcagagcggagccgaagtgaagaaacctggggcctctgtgaaggtgtcctgcaaagccagcggctacacctttaccagctactggatcaactgggtccgacaggcccctggacaaggactggaatggatgggacagatccttccaggcggaggggacaccaactacaacggcaagttcaagggcagagtgaccatcaccgccgacaccagcacaagcaccgcctacatggaactgagcagcctgagaagcgaggacaccgccgtgtattattgcaccagacgggtgcccatccggctggattattggggacagggaaccctggtcaccgtgtctagtacgcgtgaggacctgaagaacgtgttcccacctgaggtggccgtgttcgagcctagcgaggccgagatcagccacacccagaaagccaccctcgtgtgcctggctaccggcttctaccccgaccatgtggaactgtcttggtgggtcaacggcaaagaggtgcacagcggcgtgtctaccgacccccagccactgaaagaacagcccgccctgaacgacagccggtactgcctgagcagcagactgagagtgtccgccaccttctggcagaacccccggaaccacttcagatgccaggtgcagttctacggcctgagcgagaacgacgagtggacccaggacagagccaagcccgtgacccagatcgtgtctgccgaagcctggggcagagccgatgatgtgattaagatccactggcaggaaaagaagtccaacaccatcctgggcagccaggaaggcaacaccatgaagaccaacgacacctacatgaagttcagctggctgaccgtgcccgagaagtccctggacaaagaacacagatgcatcgtgcggcacgaaaacaacaagaacggcgtggaccaggaaatcatcttcccacccatcaagaccgatgtgattacaatggaccccaaggacaactgctccaaggacgccaacgataccctgctgctccagctgaccaacaccagcgcctactacatgtacttgttgctgctgctgaagtccgtggtgtacttcgccatcatcacatgctgcctgctgcggagaaccgccttctgctgcaacggcgagaagtctcgcgccaagagaagcggatctggcgtgaagcagaccctgaatttcgacctgctgaagctggctggcgacgtggaatccaacccaggcccttctagaggccatatgaccgagtacaagcccacggtgcgcctcgccacccgcgacgacgtccccagggccgtacgcaccctcgccgccgcgttcgccgactaccccgccacgcgccacaccgtcgatccggaccgccacatcgagcgggtcaccgagctgcaagaactcttcctcacgcgcgtcgggctcgacatcggcaaggtgtgggtcgcggacgacggcgccgcggtggcggtctggaccacgccggagagcgtcgaagcgggggcggtgttcgccgagatcggcccgcgcatggccgagttgagcggttcccggctggccgcgcagcaacagatggaaggcctcctggcgccgcaccggcccaaggagcccgcgtggttcctggccaccgtcggcgtctcgcccgaccaccagggcaagggtctgggcagcgccgtcgtgctccccggagtggaggcggccgagcgcgccggggtgcccgccttcctggagacctccgcgccccgcaacctccccttctacgagcggctcggcttcaccgtcaccgccgacgtcgaggtgcccgaaggaccgcgcacctggtgcatgacccgcaagcccggtgcctga

SEQ ID NO: 38213 - DNA, 2613 bp, synthetic construct
  source 1..2613: mol_type = other DNA
atggccttaccagtgaccgccttgctcctgccgctggccttgctgctccacgccgccaggccgctcgaggaggacctgaagaacgtgttcccacctgaggtggccgtgttcgagcctagcaaggccgagatcgcccacacccagaaagccaccctcgtgtgcctggctaccggcttctaccccgaccatgtggaactgtcttggtgggtcaacggcaaagaggtgcacagcggcgtgtgtaccgacccccagccactgaaagaacagcccgccctgaacgacagccggtactgcctgagcagcagactgagagtgtccgccaccttctggcagaacccccggaaccacttcagatgccaggtgcagttctacggcctgagcgagaacgacgagtggacccaggacagagccaagcccgtgacccagatcgtgtctgccgaagcctggggcagagccgattgcggcatcaccagcgccagctaccaccagggcgtgctgagcgccaccatcctgtacgagatcctgctgggcaaggccaccctgtacgccgtgctggtgtctgccctggtgctgatggctatggtcaagcggaaggacagccggggaagggccaagcgatctggatctggagcaacaaacttctcactactcaaacaagcaggtgacgtggaggagaatcccgggcctactagcatggccttaccagtgaccgccttgctcctgccgctggccttgctgctccacgccgccaggccggacatcgtgatgacacagagccctgatagcctggccgtgtctctgggagagagagccaccattaactgcaaggccagccagagcgtggactacgacggcgacagcttcctgaactggtatcagcagaagcccggccagcctcctaagctgctgatctacgccgccagcaatctggaaagcggcgtgccaagcagattttccggctctggcagcggcaccgatttcaccctgacaatatccagcctccagcctgaggacgtggccgtgtactactgccagcagagcaacgacgaccctctgacctttggacagggcaccaaggtggaaatcaaaggcggaggcggaagtggaggcggaggatctggcggcggaggctctcaagttcagctggttcagagcggagccgaagtgaagaaacctggggcctctgtgaaggtgtcctgcaaagccagcggctacacctttaccagctactggatcaactgggtccgacaggcccctggacaaggactggaatggatgggacagatccttccaggcggaggggacaccaactacaacggcaagttcaagggcagagtgaccatcaccgccgacaccagcacaagcaccgcctacatggaactgagcagcctgagaagcgaggacaccgccgtgtattattgcaccagacgggtgcccatccggctggattattggggacagggaaccctggtcaccgtgtctagtacgcgtatccagaaccctgatcctgccgtgtaccagctgcgggatagcaagagcagcgacaagagcgtgtgtctgttcaccgacttcgacagccagaccaacgtgtcccagagcaaggactccgacgtgtacatcaccgataagtgcgtgctggacatgcggagcatggacttcaagagcaactccgccgtggcctggtccaacaagtccgatttcgcctgcgccaacgccttcaacaacagcattatccccgaggacacattcttcccaagcagcgacgtgccctgcgacgtgaagctggtggaaaagagcttcgagacagacaccaacctgaacttccagaacctgagcgtgatcggcttcagaatcctgctgctgaaagtggccggctttaacctgctgatgaccctgcggctgtggtccagccgcgccaagagaagcggatctggcgtgaagcagaccctgaatttcgacctgctgaagctggctggcgacgtggaatccaacccaggcccttctagaggccatatgaccgagtacaagcccacggtgcgcctcgccacccgcgacgacgtccccagggccgtacgcaccctcgccgccgcgttcgccgactaccccgccacgcgccacaccgtcgatccggaccgccacatcgagcgggtcaccgagctgcaagaactcttcctcacgcgcgtcgggctcgacatcggcaaggtgtgggtcgcggacgacggcgccgcggtggcggtctggaccacgccggagagcgtcgaagcgggggcggtgttcgccgagatcggcccgcgcatggccgagttgagcggttcccggctggccgcgcagcaacagatggaaggcctcctggcgccgcaccggcccaaggagcccgcgtggttcctggccaccgtcggcgtctcgcccgaccaccagggcaagggtctgggcagcgccgtcgtgctccccggagtggaggcggccgagcgcgccggggtgcccgccttcctggagacctccgcgccccgcaacctccccttctacgagcggctcggcttcaccgtcaccgccgacgtcgaggtgcccgaaggaccgcgcacctggtgcatgacccgcaagcccggtgcctga

SEQ ID NO: 38214 - DNA, 2613 bp, synthetic construct
  source 1..2613: mol_type = other DNA
atggccttaccagtgaccgccttgctcctgccgctggccttgctgctccacgccgccaggccgctcgagatccagaaccctgatcctgccgtgtaccagctgcgggatagcaagagcagcgacaagagcgtgtgtctgttcaccgacttcgacagccagaccaacgtgtcccagagcaaggactccgacgtgtacatcaccgataagtgcgtgctggacatgcggagcatggacttcaagagcaactccgccgtggcctggtccaacaagtccgatttcgcctgcgccaacgccttcaacaacagcattatccccgaggacacattcttcccaagcagcgacgtgccctgcgacgtgaagctggtggaaaagagcttcgagacagacaccaacctgaacttccagaacctgagcgtgatcggcttcagaatcctgctgctgaaagtggccggctttaacctgctgatgaccctgcggctgtggtccagcagggccaagcgatctggatctggagcaacaaacttctcactactcaaacaagcaggtgacgtggaggagaatcccgggcctactagcatggccttaccagtgaccgccttgctcctgccgctggccttgctgctccacgccgccaggccggacatcgtgatgacacagagccctgatagcctggccgtgtctctgggagagagagccaccattaactgcaaggccagccagagcgtggactacgacggcgacagcttcctgaactggtatcagcagaagcccggccagcctcctaagctgctgatctacgccgccagcaatctggaaagcggcgtgccaagcagattttccggctctggcagcggcaccgatttcaccctgacaatatccagcctccagcctgaggacgtggccgtgtactactgccagcagagcaacgacgaccctctgacctttggacagggcaccaaggtggaaatcaaaggcggaggcggaagtggaggcggaggatctggcggcggaggctctcaagttcagctggttcagagcggagccgaagtgaagaaacctggggcctctgtgaaggtgtcctgcaaagccagcggctacacctttaccagctactggatcaactgggtccgacaggcccctggacaaggactggaatggatgggacagatccttccaggcggaggggacaccaactacaacggcaagttcaagggcagagtgaccatcaccgccgacaccagcacaagcaccgcctacatggaactgagcagcctgagaagcgaggacaccgccgtgtattattgcaccagacgggtgcccatccggctggattattggggacagggaaccctggtcaccgtgtctagtacgcgtgaggacctgaagaacgtgttcccacctgaggtggccgtgttcgagcctagcaaggccgagatcgcccacacccagaaagccaccctcgtgtgcctggctaccggcttctaccccgaccatgtggaactgtcttggtgggtcaacggcaaagaggtgcacagcggcgtgtgtaccgacccccagccactgaaagaacagcccgccctgaacgacagccggtactgcctgagcagcagactgagagtgtccgccaccttctggcagaacccccggaaccacttcagatgccaggtgcagttctacggcctgagcgagaacgacgagtggacccaggacagagccaagcccgtgacccagatcgtgtctgccgaagcctggggcagagccgattgcggcatcaccagcgccagctaccaccagggcgtgctgagcgccaccatcctgtacgagatcctgctgggcaaggccaccctgtacgccgtgctggtgtctgccctggtgctgatggctatggtcaagcggaaggacagccggggacgcgccaagagaagcggatctggcgtgaagcagaccctgaatttcgacctgctgaagctggctggcgacgtggaatccaacccaggcccttctagaggccatatgaccgagtacaagcccacggtgcgcctcgccacccgcgacgacgtccccagggccgtacgcaccctcgccgccgcgttcgccgactaccccgccacgcgccacaccgtcgatccggaccgccacatcgagcgggtcaccgagctgcaagaactcttcctcacgcgcgtcgggctcgacatcggcaaggtgtgggtcgcggacgacggcgccgcggtggcggtctggaccacgccggagagcgtcgaagcgggggcggtgttcgccgagatcggcccgcgcatggccgagttgagcggttcccggctggccgcgcagcaacagatggaaggcctcctggcgccgcaccggcccaaggagcccgcgtggttcctggccaccgtcggcgtctcgcccgaccaccagggcaagggtctgggcagcgccgtcgtgctccccggagtggaggcggccgagcgcgccggggtgcccgccttcctggagacctccgcgccccgcaacctccccttctacgagcggctcggcttcaccgtcaccgccgacgtcgaggtgcccgaaggaccgcgcacctggtgcatgacccgcaagcccggtgcctga

SEQ ID NO: 38215 - DNA, 2292 bp, synthetic construct
  source 1..2292: mol_type = other DNA
atggccttaccagtgaccgccttgctcctgccgctggccttgctgctccacgccgccaggccgctcgagcagagttttgggttgttggaccctaaattgtgctatctgttggacggaatcctgttcatttacggagtgatcctgaccgcattgttcctgcgggttaagttttccagatccgcagacgcacccgcttaccaacaagggcagaaccaactctacaatgaacttaatttggggcggagggaagagtacgacgttctggacaaaaggaggggacgagatcccgagatgggcggaaagcctcagcgaaggaagaatccgcaagaggggctttataacgaactccagaaagataaaatggcagaagcctatagtgagattgggatgaagggagaaaggaggaggggtaaaggtcacgatgggttgtaccaaggattgagcacagccactaaagatacctatgatgcgctccacatgcaggccctgccgccaagaagggccaagcgatctggatctggagcaacaaacttctcactactcaaacaagcaggtgacgtggaggagaatcccgggcctactagcatggccttaccagtgaccgccttgctcctgccgctggccttgctgctccacgccgccaggccggacatcgtgatgacacagagccctgatagcctggccgtgtctctgggagagagagccaccattaactgcaaggccagccagagcgtggactacgacggcgacagcttcctgaactggtatcagcagaagcccggccagcctcctaagctgctgatctacgccgccagcaatctggaaagcggcgtgccaagcagattttccggctctggcagcggcaccgatttcaccctgacaatatccagcctccagcctgaggacgtggccgtgtactactgccagcagagcaacgacgaccctctgacctttggacagggcaccaaggtggaaatcaaaggcggaggcggaagtggaggcggaggatctggcggcggaggctctcaagttcagctggttcagagcggagccgaagtgaagaaacctggggcctctgtgaaggtgtcctgcaaagccagcggctacacctttaccagctactggatcaactgggtccgacaggcccctggacaaggactggaatggatgggacagatccttccaggcggaggggacaccaactacaacggcaagttcaagggcagagtgaccatcaccgccgacaccagcacaagcaccgcctacatggaactgagcagcctgagaagcgaggacaccgccgtgtattattgcaccagacgggtgcccatccggctggattattggggacagggaaccctggtcaccgtgtctagtacgcgtgagctgggagagcctcagctgtgctatatcctggacgccatcctgtttctgtacggcatcgtgctgaccctgctgtactgccggctgaagatccaagtgcggaaggccgccatcaccagctacgagaaatccgacggcgtgtacaccggcctgagcaccagaaatcaagagacatacgagacactgaagcacgaaaagcctccacaacgcgccaagagaagcggatctggcgtgaagcagaccctgaatttcgacctgctgaagctggctggcgacgtggaatccaacccaggcccttctagaggccatatgaccgagtacaagcccacggtgcgcctcgccacccgcgacgacgtccccagggccgtacgcaccctcgccgccgcgttcgccgactaccccgccacgcgccacaccgtcgatccggaccgccacatcgagcgggtcaccgagctgcaagaactcttcctcacgcgcgtcgggctcgacatcggcaaggtgtgggtcgcggacgacggcgccgcggtggcggtctggaccacgccggagagcgtcgaagcgggggcggtgttcgccgagatcggcccgcgcatggccgagttgagcggttcccggctggccgcgcagcaacagatggaaggcctcctggcgccgcaccggcccaaggagcccgcgtggttcctggccaccgtcggcgtctcgcccgaccaccagggcaagggtctgggcagcgccgtcgtgctccccggagtggaggcggccgagcgcgccggggtgcccgccttcctggagacctccgcgccccgcaacctccccttctacgagcggctcggcttcaccgtcaccgccgacgtcgaggtgcccgaaggaccgcgcacctggtgcatgacccgcaagcccggtgcctga

SEQ ID NO: 38216 - DNA, 2925 bp, synthetic construct; identical to SEQ ID NO: 38207
  source 1..2925: mol_type = other DNA

SEQ ID NO: 38217 - DNA, 2925 bp, synthetic construct; identical to SEQ ID NO: 38208
  source 1..2925: mol_type = other DNA

SEQ ID NO: 38218 - DNA, 2922 bp, synthetic construct
  source 1..2922: mol_type = other DNA
atggccttaccagtgaccgccttgctcctgccgctggccttgctgctccacgccgccaggccgctcgaggaggaggacctgaagaacgtgttcccacctgaggtggccgtgttcgagcctagcgaggccgagatcagccacacccagaaagccaccctcgtgtgcctggctaccggcttctaccccgaccatgtggaactgtcttggtgggtcaacggcaaagaggtgcacagcggcgtgtgtaccgacccccagccactgaaagaacagcccgccctgaacgacagccggtactgcctgagcagcagactgagagtgtccgccaccttctggcagaacccccggaaccacttcagatgccaggtgcagttctacggcctgagcgagaacgacgagtggacccaggacagagccaagcccgtgacccagatcgtgtctgccgaagcctggggcagagccgatgatgtgattaagatccactggcaggaaaagaagtccaacaccatcctgggcagccaggaaggcaacaccatgaagaccaacgacacctacatgaagttcagctggctgaccgtgcccgagaagtccctggacaaagaacacagatgcatcgtgcggcacgaaaacaacaagaacggcgtggaccaggaaatcatcttcccacccatcaagaccgatgtgattacaatggaccccaaggacaactgctccaaggacgccaacgataccctgctgctccagctgaccaacaccagcgcctactacatgtacttgttgctgctgctgaagtccgtggtgtacttcgccatcatcacatgctgcctgctgcggagaaccgccttctgctgcaacggcgagaagtctagggccaagcgatctggatctggagcaacaaacttctcactactcaaacaagcaggtgacgtggaggagaatcccgggcctactagcatggccttaccagtgaccgccttgctcctgccgctggccttgctgctccacgccgccaggccggacatcgtgatgacacagagccctgatagcctggccgtgtctctgggagagagagccaccattaactgcaaggccagccagagcgtggactacgacggcgacagcttcctgaactggtatcagcagaagcccggccagcctcctaagctgctgatctacgccgccagcaatctggaaagcggcgtgccaagcagattttccggctctggcagcggcaccgatttcaccctgacaatatccagcctccagcctgaggacgtggccgtgtactactgccagcagagcaacgacgaccctctgacctttggacagggcaccaaggtggaaatcaaaggcggaggcggaagtggaggcggaggatctggcggcggaggctctcaagttcagctggttcagagcggagccgaagtgaagaaacctggggcctctgtgaaggtgtcctgcaaagccagcggctacacctttaccagctactggatcaactgggtccgacaggcccctggacaaggactggaatggatgggacagatccttccaggcggaggggacaccaactacaacggcaagttcaagggcagagtgaccatcaccgccgacaccagcacaagcaccgcctacatggaactgagcagcctgagaagcgaggacaccgccgtgtattattgcaccagacgggtgcccatccggctggattattggggacagggaaccctggtcaccgtgtctagtacgcgtatccagaaccctgatcctgccgtgtaccagctgcgggatagcaagagcagcgacaagagcgtgtgtctgttcaccgacttcgacagccagaccaacgtgtcccagagcaaggactccgacgtgtacatcaccgataagtgcgtgctggacatgcggagcatggacttcaagagcaactccgccgtggcctggtccaacaagtccgatttcgcctgcgccaacgccttcaacaacagcattatccccgaggacacattcttcccaagccccgagagcagcgactccaccgaccacgtgaagcccaaagagacagagaacaccaagcagcccagcaagagctgccacaagcccaaggccatcgtgcacaccgagaaagtgaacatgatgagcctgaccgtgctgggcctgcggatgctgttcgccaaaaccgtggccgtgaacttcctgctgaccgccaagctgttcttcctccgcgccaagagaagcggatctggcgtgaagcagaccctgaatttcgacctgctgaagctggctggcgacgtggaatccaacccaggcccttctagaggccatatgaccgagtacaagcccacggtgcgcctcgccacccgcgacgacgtccccagggccgtacgcaccctcgccgccgcgttcgccgactaccccgccacgcgccacaccgtcgatccggaccgccacatcgagcgggtcaccgagctgcaagaactcttcctcacgcgcgtcgggctcgacatcggcaaggtgtgggtcgcggacgacggcgccgcggtggcggtctggaccacgccggagagcgtcgaagcgggggcggtgttcgccgagatcggcccgcgcatggccgagttgagcggttcccggctggccgcgcagcaacagatggaaggcctcctggcgccgcaccggcccaaggagcccgcgtggttcctggccaccgtcggcgtctcgcccgaccaccagggcaagggtctgggcagcgccgtcgtgctccccggagtggaggcggccgagcgcgccggggtgcccgccttcctggagacctccgcgccccgcaacctccccttctacgagcggctcggcttcaccgtcaccgccgacgtcgaggtgcccgaaggaccgcgcacctggtgcatgacccgcaagcccggtgcctga

SEQ ID NO: 38219 - DNA, 2922 bp, synthetic construct
  source 1..2922: mol_type = other DNA
atggccttaccagtgaccgccttgctcctgccgctggccttgctgctccacgccgccaggccgctcgagatccagaaccctgatcctgccgtgtaccagctgcgggatagcaagagcagcgacaagagcgtgtgtctgttcaccgacttcgacagccagaccaacgtgtcccagagcaaggactccgacgtgtacatcaccgataagtgcgtgctggacatgcggagcatggacttcaagagcaactccgccgtggcctggtccaacaagtccgatttcgcctgcgccaacgccttcaacaacagcattatccccgaggacacattcttcccaagccccgagagcagcgactccaccgaccacgtgaagcccaaagagacagagaacaccaagcagcccagcaagagctgccacaagcccaaggccatcgtgcacaccgagaaagtgaacatgatgagcctgaccgtgctgggcctgcggatgctgttcgccaaaaccgtggccgtgaacttcctgctgaccgccaagctgttcttcctcagggccaagcgatctggatctggagcaacaaacttctcactactcaaacaagcaggtgacgtggaggagaatcccgggcctactagcatggccttaccagtgaccgccttgctcctgccgctggccttgctgctccacgccgccaggccggacatcgtgatgacacagagccctgatagcctggccgtgtctctgggagagagagccaccattaactgcaaggccagccagagcgtggactacgacggcgacagcttcctgaactggtatcagcagaagcccggccagcctcctaagctgctgatctacgccgccagcaatctggaaagcggcgtgccaagcagattttccggctctggcagcggcaccgatttcaccctgacaatatccagcctccagcctgaggacgtggccgtgtactactgccagcagagcaacgacgaccctctgacctttggacagggcaccaaggtggaaatcaaaggcggaggcggaagtggaggcggaggatctggcggcggaggctctcaagttcagctggttcagagcggagccgaagtgaagaaacctggggcctctgtgaaggtgtcctgcaaagccagcggctacacctttaccagctactggatcaactgggtccgacaggcccctggacaaggactggaatggatgggacagatccttccaggcggaggggacaccaactacaacggcaagttcaagggcagagtgaccatcaccgccgacaccagcacaagcaccgcctacatggaactgagcagcctgagaagcgaggacaccgccgtgtattattgcaccagacgggtgcccatccggctggattattggggacagggaaccctggtcaccgtgtctagtacgcgtgaggaggacctgaagaacgtgttcccacctgaggtggccgtgttcgagcctagcgaggccgagatcagccacacccagaaagccaccctcgtgtgcctggctaccggcttctaccccgaccatgtggaactgtcttggtgggtcaacggcaaagaggtgcacagcggcgtgtgtaccgacccccagccactgaaagaacagcccgccctgaacgacagccggtactgcctgagcagcagactgagagtgtccgccaccttctggcagaacccccggaaccacttcagatgccaggtgcagttctacggcctgagcgagaacgacgagtggacccaggacagagccaagcccgtgacccagatcgtgtctgccgaagcctggggcagagccgatgatgtgattaagatccactggcaggaaaagaagtccaacaccatcctgggcagccaggaaggcaacaccatgaagaccaacgacacctacatgaagttcagctggctgaccgtgcccgagaagtccctggacaaagaacacagatgcatcgtgcggcacgaaaacaacaagaacggcgtggaccaggaaatcatcttcccacccatcaagaccgatgtgattacaatggaccccaaggacaactgctccaaggacgccaacgataccctgctgctccagctgaccaacaccagcgcctactacatgtacttgttgctgctgctgaagtccgtggtgtacttcgccatcatcacatgctgcctgctgcggagaaccgccttctgctgcaacggcgagaagtctcgcgccaagagaagcggatctggcgtgaagcagaccctgaatttcgacctgctgaagctggctggcgacgtggaatccaacccaggcccttctagaggccatatgaccgagtacaagcccacggtgcgcctcgccacccgcgacgacgtccccagggccgtacgcaccctcgccgccgcgttcgccgactaccccgccacgcgccacaccgtcgatccggaccgccacatcgagcgggtcaccgagctgcaagaactcttcctcacgcgcgtcgggctcgacatcggcaaggtgtgggtcgcggacgacggcgccgcggtggcggtctggaccacgccggagagcgtcgaagcgggggcggtgttcgccgagatcggcccgcgcatggccgagttgagcggttcccggctggccgcgcagcaacagatggaaggcctcctggcgccgcaccggcccaaggagcccgcgtggttcctggccaccgtcggcgtctcgcccgaccaccagggcaagggtctgggcagcgccgtcgtgctccccggagtggaggcggccgagcgcgccggggtgcccgccttcctggagacctccgcgccccgcaacctccccttctacgagcggctcggcttcaccgtcaccgccgacgtcgaggtgcccgaaggaccgcgcacctggtgcatgacccgcaagcccggtgcctga

SEQ ID NO: 38220 - DNA, 2613 bp, synthetic construct
  source 1..2613: mol_type = other DNA
atggccttaccagtgaccgccttgctcctgccgctggccttgctgctccacgccgccaggccgctcgaggaggacctgaagaacgtgttcccacctgaggtggccgtgttcgagcctagcgaggccgagatcagccacacccagaaagccaccctcgtgtgcctggctaccggcttctaccccgaccatgtggaactgtcttggtgggtcaacggcaaagaggtgcacagcggcgtgtctaccgacccccagccactgaaagaacagcccgccctgaacgacagccggtactgcctgagcagcagactgagagtgtccgccaccttctggcagaacccccggaaccacttcagatgccaggtgcagttctacggcctgagcgagaacgacgagtggacccaggacagagccaagcccgtgacccagatcgtgtctgccgaagcctggggcagagccgattgcggctttaccagcgagagctaccagcagggcgtgctgagcgccaccaacctgagcgtgatcggcttcagaatcctgctgctgaaagtggccggctttaacctgctgatgaccctgcggctgtggtccagcagggccaagcgatctggatctggagcaacaaacttctcactactcaaacaagcaggtgacgtggaggagaatcccgggcctactagcatggccttaccagtgaccgccttgctcctgccgctggccttgctgctccacgccgccaggccggacatcgtgatgacacagagccctgatagcctggccgtgtctctgggagagagagccaccattaactgcaaggccagccagagcgtggactacgacggcgacagcttcctgaactggtatcagcagaagcccggccagcctcctaagctgctgatctacgccgccagcaatctggaaagcggcgtgccaagcagattttccggctctggcagcggcaccgatttcaccctgacaatatccagcctccagcctgaggacgtggccgtgtactactgccagcagagcaacgacgaccctctgacctttggacagggcaccaaggtggaaatcaaaggcggaggcggaagtggaggcggaggatctggcggcggaggctctcaagttcagctggttcagagcggagccgaagtgaagaaacctggggcctctgtgaaggtgtcctgcaaagccagcggctacacctttaccagctactggatcaactgggtccgacaggcccctggacaaggactggaatggatgggacagatccttccaggcggaggggacaccaactacaacggcaagttcaagggcagagtgaccatcaccgccgacaccagcacaagcaccgcctacatggaactgagcagcctgagaagcgaggacaccgccgtgtattattgcaccagacgggtgcccatccggctggattattggggacagggaaccctggtcaccgtgtctagtacgcgtatccagaaccctgatcctgccgtgtaccagctgcgggatagcaagagcagcgacaagagcgtgtgtctgttcaccgacttcgacagccagaccaacgtgtcccagagcaaggactccgacgtgtacatcaccgataagaccgtgctggacatgcggagcatggacttcaagagcaactccgccgtggcctggtccaacaagtccgatttcgcctgcgccaacgccttcaacaacagcattatccccgaggacacattcttcccaagccccgagagcagctgcgacgtgaagctggtggaaaagagcttcgagacagacaccaacctgaacttccagatcctgtacgagatcctgctgggcaaggccaccctgtacgccgtgctggtgtctgccctggtgctgatggctatggtcaagcggaaggacagccggggacgcgccaagagaagcggatctggcgtgaagcagaccctgaatttcgacctgctgaagctggctggcgacgtggaatccaacccaggcccttctagaggccatatgaccgagtacaagcccacggtgcgcctcgccacccgcgacgacgtccccagggccgtacgcaccctcgccgccgcgttcgccgactaccccgccacgcgccacaccgtcgatccggaccgccacatcgagcgggtcaccgagctgcaagaactcttcctcacgcgcgtcgggctcgacatcggcaaggtgtgggtcgcggacgacggcgccgcggtggcggtctggaccacgccggagagcgtcgaagcgggggcggtgttcgccgagatcggcccgcgcatggccgagttgagcggttcccggctggccgcgcagcaacagatggaaggcctcctggcgccgcaccggcccaaggagcccgcgtggttcctggccaccgtcggcgtctcgcccgaccaccagggcaagggtctgggcagcgccgtcgtgctccccggagtggaggcggccgagcgcgccggggtgcccgccttcctggagacctccgcgccccgcaacctccccttctacgagcggctcggcttcaccgtcaccgccgacgtcgaggtgcccgaaggaccgcgcacctggtgcatgacccgcaagcccggtgcctga

SEQ ID NO: 38221 - DNA, 2613 bp, synthetic construct
  source 1..2613: mol_type = other DNA
atggccttaccagtgaccgccttgctcctgccgctggccttgctgctccacgccgccaggccgctcgagatccagaaccctgatcctgccgtgtaccagctgcgggatagcaagagcagcgacaagagcgtgtgtctgttcaccgacttcgacagccagaccaacgtgtcccagagcaaggactccgacgtgtacatcaccgataagaccgtgctggacatgcggagcatggacttcaagagcaactccgccgtggcctggtccaacaagtccgatttcgcctgcgccaacgccttcaacaacagcattatccccgaggacacattcttcccaagccccgagagcagctgcgacgtgaagctggtggaaaagagcttcgagacagacaccaacctgaacttccagatcctgtacgagatcctgctgggcaaggccaccctgtacgccgtgctggtgtctgccctggtgctgatggctatggtcaagcggaaggacagccggggaagggccaagcgatctggatctggagcaacaaacttctcactactcaaacaagcaggtgacgtggaggagaatcccgggcctactagcatggccttaccagtgaccgccttgctcctgccgctggccttgctgctccacgccgccaggccggacatcgtgatgacacagagccctgatagcctggccgtgtctctgggagagagagccaccattaactgcaaggccagccagagcgtggactacgacggcgacagcttcctgaactggtatcagcagaagcccggccagcctcctaagctgctgatctacgccgccagcaatctggaaagcggcgtgccaagcagattttccggctctggcagcggcaccgatttcaccctgacaatatccagcctccagcctgaggacgtggccgtgtactactgccagcagagcaacgacgaccctctgacctttggacagggcaccaaggtggaaatcaaaggcggaggcggaagtggaggcggaggatctggcggcggaggctctcaagttcagctggttcagagcggagccgaagtgaagaaacctggggcctctgtgaaggtgtcctgcaaagccagcggctacacctttaccagctactggatcaactgggtccgacaggcccctggacaaggactggaatggatgggacagatccttccaggcggaggggacaccaactacaacggcaagttcaagggcagagtgaccatcaccgccgacaccagcacaagcaccgcctacatggaactgagcagcctgagaagcgaggacaccgccgtgtattattgcaccagacgggtgcccatccggctggattattggggacagggaaccctggtcaccgtgtctagtacgcgtgaggacctgaagaacgtgttcccacctgaggtggccgtgttcgagcctagcgaggccgagatcagccacacccagaaagccaccctcgtgtgcctggctaccggcttctaccccgaccatgtggaactgtcttggtgggtcaacggcaaagaggtgcacagcggcgtgtctaccgacccccagccactgaaagaacagcccgccctgaacgacagccggtactgcctgagcagcagactgagagtgtccgccaccttctggcagaacccccggaaccacttcagatgccaggtgcagttctacggcctgagcgagaacgacgagtggacccaggacagagccaagcccgtgacccagatcgtgtctgccgaagcctggggcagagccgattgcggctttaccagcgagagctaccagcagggcgtgctgagcgccaccaacctgagcgtgatcggcttcagaatcctgctgctgaaagtggccggctttaacctgctgatgaccctgcggctgtggtccagccgcgccaagagaagcggatctggcgtgaagcagaccctgaatttcgacctgctgaagctggctggcgacgtggaatccaacccaggcccttctagaggccatatgaccgagtacaagcccacggtgcgcctcgccacccgcgacgacgtccccagggccgtacgcaccctcgccgccgcgttcgccgactaccccgccacgcgccacaccgtcgatccggaccgccacatcgagcgggtcaccgagctgcaagaactcttcctcacgcgcgtcgggctcgacatcggcaaggtgtgggtcgcggacgacggcgccgcggtggcggtctggaccacgccggagagcgtcgaagcgggggcggtgttcgccgagatcggcccgcgcatggccgagttgagcggttcccggctggccgcgcagcaacagatggaaggcctcctggcgccgcaccggcccaaggagcccgcgtggttcctggccaccgtcggcgtctcgcccgaccaccagggcaagggtctgggcagcgccgtcgtgctccccggagtggaggcggccgagcgcgccggggtgcccgccttcctggagacctccgcgccccgcaacctccccttctacgagcggctcggcttcaccgtcaccgccgacgtcgaggtgcccgaaggaccgcgcacctggtgcatgacccgcaagcccggtgcctga

SEQ ID NO: 38222 - DNA, 2613 bp, synthetic construct
  source 1..2613: mol_type = other DNA
atggccttaccagtgaccgccttgctcctgccgctggccttgctgctccacgccgccaggccgctcgaggaggacctgaagaacgtgttcccacctgaggtggccgtgttcgagcctagcgaggccgagatcagccacacccagaaagccaccctcgtgtgcctggctaccggcttctaccccgaccatgtggaactgtcttggtgggtcaacggcaaagaggtgcacagcggcgtgtgtaccgacccccagccactgaaagaacagcccgccctgaacgacagccggtactgcctgagcagcagactgagagtgtccgccaccttctggcagaacccccggaaccacttcagatgccaggtgcagttctacggcctgagcgagaacgacgagtggacccaggacagagccaagcccgtgacccagatcgtgtctgccgaagcctggggcagagccgattgcgacgtgaagctggtggaaaagagcttcgagacagacaccaacctgaacttccagaacctgagcgtgatcggcttcagaatcctgctgctgaaagtggccggctttaacctgctgatgaccctgcggctgtggtccagcagggccaagcgatctggatctggagcaacaaacttctcactactcaaacaagcaggtgacgtggaggagaatcccgggcctactagcatggccttaccagtgaccgccttgctcctgccgctggccttgctgctccacgccgccaggccggacatcgtgatgacacagagccctgatagcctggccgtgtctctgggagagagagccaccattaactgcaaggccagccagagcgtggactacgacggcgacagcttcctgaactggtatcagcagaagcccggccagcctcctaagctgctgatctacgccgccagcaatctggaaagcggcgtgccaagcagattttccggctctggcagcggcaccgatttcaccctgacaatatccagcctccagcctgaggacgtggccgtgtactactgccagcagagcaacgacgaccctctgacctttggacagggcaccaaggtggaaatcaaaggcggaggcggaagtggaggcggaggatctggcggcggaggctctcaagttcagctggttcagagcggagccgaagtgaagaaacctggggcctctgtgaaggtgtcctgcaaagccagcggctacacctttaccagctactggatcaactgggtccgacaggcccctggacaaggactggaatggatgggacagatccttccaggcggaggggacaccaactacaacggcaagttcaagggcagagtgaccatcaccgccgacaccagcacaagcaccgcctacatggaactgagcagcctgagaagcgaggacaccgccgtgtattattgcaccagacgggtgcccatccggctggattattggggacagggaaccctggtcaccgtgtctagtacgcgtatccagaaccctgatcctgccgtgtaccagctgcgggatagcaagagcagcgacaagagcgtgtgtctgttcaccgacttcgacagccagaccaacgtgtcccagagcaaggactccgacgtgtacatcaccgataagtgcgtgctggacatgcggagcatggacttcaagagcaactccgccgtggcctggtccaacaagtccgatttcgcctgcgccaacgccttcaacaacagcattatccccgaggacacattcttcccaagccccgagagcagctgcggctttaccagcgagagctaccagcagggcgtgctgagcgccaccatcctgtacgagatcctgctgggcaaggccaccctgtacgccgtgctggtgtctgccctggtgctgatggctatggtcaagcggaaggacagccggggacgcgccaagagaagcggatctggcgtgaagcagaccctgaatttcgacctgctgaagctggctggcgacgtggaatccaacccaggcccttctagaggccatatgaccgagtacaagcccacggtgcgcctcgccacccgcgacgacgtccccagggccgtacgcaccctcgccgccgcgttcgccgactaccccgccacgcgccacaccgtcgatccggaccgccacatcgagcgggtcaccgagctgcaagaactcttcctcacgcgcgtcgggctcgacatcggcaaggtgtgggtcgcggacgacggcgccgcggtggcggtctggaccacgccggagagcgtcgaagcgggggcggtgttcgccgagatcggcccgcgcatggccgagttgagcggttcccggctggccgcgcagcaacagatggaaggcctcctggcgccgcaccggcccaaggagcccgcgtggttcctggccaccgtcggcgtctcgcccgaccaccagggcaagggtctgggcagcgccgtcgtgctccccggagtggaggcggccgagcgcgccggggtgcccgccttcctggagacctccgcgccccgcaacctccccttctacgagcggctcggcttcaccgtcaccgccgacgtcgaggtgcccgaaggaccgcgcacctggtgcatgacccgcaagcccggtgcctga

SEQ ID NO: 38223 - DNA, 2613 bp, synthetic construct
  source 1..2613: mol_type = other DNA
atggccttaccagtgaccgccttgctcctgccgctggccttgctgctccacgccgccaggccgctcgaggaggacctgaagaacgtgttcccacctgaggtggccgtgttcgagcctagcgaggccgagatcagccacacccagaaagccaccctcgtgtgcctggctaccggcttctaccccgaccatgtggaactgtcttggtgggtcaacggcaaagaggtgcacagcggcgtgtctaccgacccccagccactgaaagaacagcccgccctgaacgacagccggtactgcctgagcagcagactgagagtgtccgccaccttctggcagaacccccggaaccacttcagatgccaggtgcagttctacggcctgagcgagaacgacgagtggacccaggacagagccaagcccgtgacccagatcgtgtctgccgaagcctggggcagagccgattgcgacgtgaagctggtggaaaagagcttcgagacagacaccaacctgaacttccagaacctgagcgtgatcggcttcagaatcctgctgctgaaagtggccggctttaacctgctgatgaccctgcggctgtggtccagcagggccaagcgatctggatctggagcaacaaacttctcactactcaaacaagcaggtgacgtggaggagaatcccgggcctactagcatggccttaccagtgaccgccttgctcctgccgctggccttgctgctccacgccgccaggccggacatcgtgatgacacagagccctgatagcctggccgtgtctctgggagagagagccaccattaactgcaaggccagccagagcgtggactacgacggcgacagcttcctgaactggtatcagcagaagcccggccagcctcctaagctgctgatctacgccgccagcaatctggaaagcggcgtgccaagcagattttccggctctggcagcggcaccgatttcaccctgacaatatccagcctccagcctgaggacgtggccgtgtactactgccagcagagcaacgacgaccctctgacctttggacagggcaccaaggtggaaatcaaaggcggaggcggaagtggaggcggaggatctggcggcggaggctctcaagttcagctggttcagagcggagccgaagtgaagaaacctggggcctctgtgaaggtgtcctgcaaagccagcggctacacctttaccagctactggatcaactgggtccgacaggcccctggacaaggactggaatggatgggacagatccttccaggcggaggggacaccaactacaacggcaagttcaagggcagagtgaccatcaccgccgacaccagcacaagcaccgcctacatggaactgagcagcctgagaagcgaggacaccgccgtgtattattgcaccagacgggtgcccatccggctggattattggggacagggaaccctggtcaccgtgtctagtacgcgtatccagaaccctgatcctgccgtgtaccagctgcgggatagcaagagcagcgacaagagcgtgtgtctgttcaccgacttcgacagccagaccaacgtgtcccagagcaaggactccgacgtgtacatcaccgataagaccgtgctggacatgcggagcatggacttcaagagcaactccgccgtggcctggtccaacaagtccgatttcgcctgcgccaacgccttcaacaacagcattatccccgaggacacattcttcccaagccccgagagcagctgcggctttaccagcgagagctaccagcagggcgtgctgagcgccaccatcctgtacgagatcctgctgggcaaggccaccctgtacgccgtgctggtgtctgccctggtgctgatggctatggtcaagcggaaggacagccggggacgcgccaagagaagcggatctggcgtgaagcagaccctgaatttcgacctgctgaagctggctggcgacgtggaatccaacccaggcccttctagaggccatatgaccgagtacaagcccacggtgcgcctcgccacccgcgacgacgtccccagggccgtacgcaccctcgccgccgcgttcgccgactaccccgccacgcgccacaccgtcgatccggaccgccacatcgagcgggtcaccgagctgcaagaactcttcctcacgcgcgtcgggctcgacatcggcaaggtgtgggtcgcggacgacggcgccgcggtggcggtctggaccacgccggagagcgtcgaagcgggggcggtgttcgccgagatcggcccgcgcatggccgagttgagcggttcccggctggccgcgcagcaacagatggaaggcctcctggcgccgcaccggcccaaggagcccgcgtggttcctggccaccgtcggcgtctcgcccgaccaccagggcaagggtctgggcagcgccgtcgtgctccccggagtggaggcggccgagcgcgccggggtgcccgccttcctggagacctccgcgccccgcaacctccccttctacgagcggctcggcttcaccgtcaccgccgacgtcgaggtgcccgaaggaccgcgcacctggtgcatgacccgcaagcccggtgcctga

SEQ ID NO: 38224 - DNA, 2922 bp, synthetic construct
  source 1..2922: mol_type = other DNA
atggccttaccagtgaccgccttgctcctgccgctggccttgctgctccacgccgccaggccgctcgaggaggaggacctgaagaacgtgttcccacctgaggtggccgtgttcgagcctagcgaggccgagatcagccacacccagaaagccaccctcgtgtgcctggctaccggcttctaccccgaccatgtggaactgtcttggtgggtcaacggcaaagaggtgcacagcggcgtgtctaccgacccccagccactgaaagaacagcccgccctgaacgacagccggtactgcctgagcagcagactgagagtgtccgccaccttctggcagaacccccggaaccacttcagatgccaggtgcagttctacggcctgagcgagaacgacgagtggacccaggacagagccaagcccgtgacccagatcgtgtctgccgaagcctggggcagagccgatgatgtgattaagatccactggcaggaaaagaagtccaacaccatcctgggcagccaggaaggcaacaccatgaagaccaacgacacctacatgaagttcagctggctgaccgtgcccgagaagtccctggacaaagaacacagatgcatcgtgcggcacgaaaacaacaagaacggcgtggaccaggaaatcatcttcccacccatcaagaccgatgtgattacaatggaccccaaggacaactgctccaaggacgccaacgataccctgctgctccagctgaccaacaccagcgcctactacatgtacttgttgctgctgctgaagtccgtggtgtacttcgccatcatcacatgctgcctgctgcggagaaccgccttctgctgcaacggcgagaagtctagggccaagcgatctggatctggagcaacaaacttctcactactcaaacaagcaggtgacgtggaggagaatcccgggcctactagcatggccttaccagtgaccgccttgctcctgccgctggccttgctgctccacgccgccaggccggacatcgtgatgacacagagccctgatagcctggccgtgtctctgggagagagagccaccattaactgcaaggccagccagagcgtggactacgacggcgacagcttcctgaactggtatcagcagaagcccggccagcctcctaagctgctgatctacgccgccagcaatctggaaagcggcgtgccaagcagattttccggctctggcagcggcaccgatttcaccctgacaatatccagcctccagcctgaggacgtggccgtgtactactgccagcagagcaacgacgaccctctgacctttggacagggcaccaaggtggaaatcaaaggcggaggcggaagtggaggcggaggatctggcggcggaggctctcaagttcagctggttcagagcggagccgaagtgaagaaacctggggcctctgtgaaggtgtcctgcaaagccagcggctacacctttaccagctactggatcaactgggtccgacaggcccctggacaaggactggaatggatgggacagatccttccaggcggaggggacaccaactacaacggcaagttcaagggcagagtgaccatcaccgccgacaccagcacaagcaccgcctacatggaactgagcagcctgagaagcgaggacaccgccgtgtattattgcaccagacgggtgcccatccggctggattattggggacagggaaccctggtcaccgtgtctagtacgcgtatccagaaccctgatcctgccgtgtaccagctgcgggatagcaagagcagcgacaagagcgtgtgtctgttcaccgacttcgacagccagaccaacgtgtcccagagcaaggactccgacgtgtacatcaccgataagaccgtgctggacatgcggagcatggacttcaagagcaactccgccgtggcctggtccaacaagtccgatttcgcctgcgccaacgccttcaacaacagcattatccccgaggacacattcttcccaagccccgagagcagcgactccaccgaccacgtgaagcccaaagagacagagaacaccaagcagcccagcaagagctgccacaagcccaaggccatcgtgcacaccgagaaagtgaacatgatgagcctgaccgtgctgggcctgcggatgctgttcgccaaaaccgtggccgtgaacttcctgctgaccgccaagctgttcttcctccgcgccaagagaagcggatctggcgtgaagcagaccctgaatttcgacctgctgaagctggctggcgacgtggaatccaacccaggcccttctagaggccatatgaccgagtacaagcccacggtgcgcctcgccacccgcgacgacgtccccagggccgtacgcaccctcgccgccgcgttcgccgactaccccgccacgcgccacaccgtcgatccggaccgccacatcgagcgggtcaccgagctgcaagaactcttcctcacgcgcgtcgggctcgacatcggcaaggtgtgggtcgcggacgacggcgccgcggtggcggtctggaccacgccggagagcgtcgaagcgggggcggtgttcgccgagatcggcccgcgcatggccgagttgagcggttcccggctggccgcgcagcaacagatggaaggcctcctggcgccgcaccggcccaaggagcccgcgtggttcctggccaccgtcggcgtctcgcccgaccaccagggcaagggtctgggcagcgccgtcgtgctccccggagtggaggcggccgagcgcgccggggtgcccgccttcctggagacctccgcgccccgcaacctccccttctacgagcggctcggcttcaccgtcaccgccgacgtcgaggtgcccgaaggaccgcgcacctggtgcatgacccgcaagcccggtgcctga

SEQ ID NO: 38225 - DNA, 2613 bp, synthetic construct
  source 1..2613: mol_type = other DNA
atggccttaccagtgaccgccttgctcctgccgctggccttgctgctccacgccgccaggccgctcgaggaggacctgaagaacgtgttcccacctgaggtggccgtgttcgagcctagcgaggccgagatcagccacacccagaaagccaccctcgtgtgcctggctaccggcttctaccccgaccatgtggaactgtcttggtgggtcaacggcaaagaggtgcacagcggcgtgtgtaccgacccccagccactgaaagaacagcccgccctgaacgacagccggtactgcctgagcagcagactgagagtgtccgccaccttctggcagaacccccggaaccacttcagatgccaggtgcagttctacggcctgagcgagaacgacgagtggacccaggacagagccaagcccgtgacccagatcgtgtctgccgaagcctggggcagagccgattgcggctttaccagcgagagctaccagcagggcgtgctgagcgccaccaacctgagcgtgatcggcttcagaatcctgctgctgaaagtggccggctttaacctgctgatgaccctgcggctgtggtccagcagggccaagcgatctggatctggagcaacaaacttctcactactcaaacaagcaggtgacgtggaggagaatcccgggcctactagcatggccttaccagtgaccgccttgctcctgccgctggccttgctgctccacgccgccaggccggacatcgtgatgacacagagccctgatagcctggccgtgtctctgggagagagagccaccattaactgcaaggccagccagagcgtggactacgacggcgacagcttcctgaactggtatcagcagaagcccggccagcctcctaagctgctgatctacgccgccagcaatctggaaagcggcgtgccaagcagattttccggctctggcagcggcaccgatttcaccctgacaatatccagcctccagcctgaggacgtggccgtgtactactgccagcagagcaacgacgaccctctgacctttggacagggcaccaaggtggaaatcaaaggcggaggcggaagtggaggcggaggatctggcggcggaggctctcaagttcagctggttcagagcggagccgaagtgaagaaacctggggcctctgtgaaggtgtcctgcaaagccagcggctacacctttaccagctactggatcaactgggtccgacaggcccctggacaaggactggaatggatgggacagatccttccaggcggaggggacaccaactacaacggcaagttcaagggcagagtgaccatcaccgccgacaccagcacaagcaccgcctacatggaactgagcagcctgagaagcgaggacaccgccgtgtattattgcaccagacgggtgcccatccggctggattattggggacagggaaccctggtcaccgtgtctagtacgcgtatccagaaccctgatcctgccgtgtaccagctgcgggatagcaagagcagcgacaagagcgtgtgtctgttcaccgacttcgacagccagaccaacgtgtcccagagcaaggactccgacgtgtacatcaccgataagtgcgtgctggacatgcggagcatggacttcaagagcaactccgccgtggcctggtccaacaagtccgatttcgcctgcgccaacgccttcaacaacagcattatccccgaggacacattcttcccaagccccgagagcagctgcgacgtgaagctggtggaaaagagcttcgagacagacaccaacctgaacttccagatcctgtacgagatcctgctgggcaaggccaccctgtacgccgtgctggtgtctgccctggtgctgatggctatggtcaagcggaaggacagccggggacgcgccaagagaagcggatctggcgtgaagcagaccctgaatttcgacctgctgaagctggctggcgacgtggaatccaacccaggcccttctagaggccatatgaccgagtacaagcccacggtgcgcctcgccacccgcgacgacgtccccagggccgtacgcaccctcgccgccgcgttcgccgactaccccgccacgcgccacaccgtcgatccggaccgccacatcgagcgggtcaccgagctgcaagaactcttcctcacgcgcgtcgggctcgacatcggcaaggtgtgggtcgcggacgacggcgccgcggtggcggtctggaccacgccggagagcgtcgaagcgggggcggtgttcgccgagatcggcccgcgcatggccgagttgagcggttcccggctggccgcgcagcaacagatggaaggcctcctggcgccgcaccggcccaaggagcccgcgtggttcctggccaccgtcggcgtctcgcccgaccaccagggcaagggtctgggcagcgccgtcgtgctccccggagtggaggcggccgagcgcgccggggtgcccgccttcctggagacctccgcgccccgcaacctccccttctacgagcggctcggcttcaccgtcaccgccgacgtcgaggtgcccgaaggaccgcgcacctggtgcatgacccgcaagcccggtgcctga

SEQ ID NO: 38226 - DNA, 2700 bp, synthetic construct
  source 1..2700: mol_type = other DNA
atggccttaccagtgaccgccttgctcctgccgctggccttgctgctccacgccgccaggccgctcgaggaggaggacctgaagaacgtgttcccacctgaggtggccgtgttcgagcctagcgaggccgagatcagccacacccagaaagccaccctcgtgtgcctggctaccggcttctaccccgaccatgtggaactgtcttggtgggtcaacggcaaagaggtgcacagcggcgtgtgtaccgacccccagccactgaaagaacagcccgccctgaacgacagccggtactgcctgagcagcagactgagagtgtccgccaccttctggcagaacccccggaaccacttcagatgccaggtgcagttctacggcctgagcgagaacgacgagtggacccaggacagagccaagcccgtgacccagatcgtgtctgccgaagcctggggcagagccgattgcggctttaccagcgagagctaccagcagggcgtgctgagcgccaccaacctgagcgtgatcggcttcagaatcctgctgctgaaagtggccggctttaacctgctgatgaccctgcggctgtggtccagcagggccaagcgatctggatctggagcaacaaacttctcactactcaaacaagcaggtgacgtggaggagaatcccgggcctactagcatggccttaccagtgaccgccttgctcctgccgctggccttgctgctccacgccgccaggccggacatcgtgatgacacagagccctgatagcctggccgtgtctctgggagagagagccaccattaactgcaaggccagccagagcgtggactacgacggcgacagcttcctgaactggtatcagcagaagcccggccagcctcctaagctgctgatctacgccgccagcaatctggaaagcggcgtgccaagcagattttccggctctggcagcggcaccgatttcaccctgacaatatccagcctccagcctgaggacgtggccgtgtactactgccagcagagcaacgacgaccctctgacctttggacagggcaccaaggtggaaatcaaaggcggaggcggaagtggaggcggaggatctggcggcggaggctctcaagttcagctggttcagagcggagccgaagtgaagaaacctggggcctctgtgaaggtgtcctgcaaagccagcggctacacctttaccagctactggatcaactgggtccgacaggcccctggacaaggactggaatggatgggacagatccttccaggcggaggggacaccaactacaacggcaagttcaagggcagagtgaccatcaccgccgacaccagcacaagcaccgcctacatggaactgagcagcctgagaagcgaggacaccgccgtgtattattgcaccagacgggtgcccatccggctggattattggggacagggaaccctggtcaccgtgtctagtacgcgtggacagcctaaggccaatcctaccgtgacactgttccctccaagcagcgaagaactccaggccaacaaggccacacttgtgtgcctgatctccgacttctaccctggggctgtgacagtggcttggaaggccgatggatctcctgtgaaagccggcgtggaaaccaccaagccatccaagcagagcaacaacaaatacgccgccagctcctacctgagcctgacacctgagcagtggaagtcccacagatcctacagctgccaagtgacccacgaaggcagcaccgtggaaaagacagtggcccctacagagtgcagccccatcaagaccgatgtgattacaatggaccccaaggacaactgctccaaggacgccaacgataccctgctgctccagctgaccaacaccagcgcctactacatgtacttgttgctgctgctgaagtccgtggtgtacttcgccatcatcacatgctgcctgctgcggagaaccgccttctgctgcaacggcgagaagtctcgcgccaagagaagcggatctggcgtgaagcagaccctgaatttcgacctgctgaagctggctggcgacgtggaatccaacccaggcccttctagaggccatatgaccgagtacaagcccacggtgcgcctcgccacccgcgacgacgtccccagggccgtacgcaccctcgccgccgcgttcgccgactaccccgccacgcgccacaccgtcgatccggaccgccacatcgagcgggtcaccgagctgcaagaactcttcctcacgcgcgtcgggctcgacatcggcaaggtgtgggtcgcggacgacggcgccgcggtggcggtctggaccacgccggagagcgtcgaagcgggggcggtgttcgccgagatcggcccgcgcatggccgagttgagcggttcccggctggccgcgcagcaacagatggaaggcctcctggcgccgcaccggcccaaggagcccgcgtggttcctggccaccgtcggcgtctcgcccgaccaccagggcaagggtctgggcagcgccgtcgtgctccccggagtggaggcggccgagcgcgccggggtgcccgccttcctggagacctccgcgccccgcaacctccccttctacgagcggctcggcttcaccgtcaccgccgacgtcgaggtgcccgaaggaccgcgcacctggtgcatgacccgcaagcccggtgcctga

SEQ ID NO: 38227 - DNA, 2700 bp, synthetic construct
  source 1..2700: mol_type = other DNA
atggccttaccagtgaccgccttgctcctgccgctggccttgctgctccacgccgccaggccgctcgagggacagcctaaggccaatcctaccgtgacactgttccctccaagcagcgaagaactccaggccaacaaggccacacttgtgtgcctgatctccgacttctaccctggggctgtgacagtggcttggaaggccgatggatctcctgtgaaagccggcgtggaaaccaccaagccatccaagcagagcaacaacaaatacgccgccagctcctacctgagcctgacacctgagcagtggaagtcccacagatcctacagctgccaagtgacccacgaaggcagcaccgtggaaaagacagtggcccctacagagtgcagccccatcaagaccgatgtgattacaatggaccccaaggacaactgctccaaggacgccaacgataccctgctgctccagctgaccaacaccagcgcctactacatgtacttgttgctgctgctgaagtccgtggtgtacttcgccatcatcacatgctgcctgctgcggagaaccgccttctgctgcaacggcgagaagtctagggccaagcgatctggatctggagcaacaaacttctcactactcaaacaagcaggtgacgtggaggagaatcccgggcctactagcatggccttaccagtgaccgccttgctcctgccgctggccttgctgctccacgccgccaggccggacatcgtgatgacacagagccctgatagcctggccgtgtctctgggagagagagccaccattaactgcaaggccagccagagcgtggactacgacggcgacagcttcctgaactggtatcagcagaagcccggccagcctcctaagctgctgatctacgccgccagcaatctggaaagcggcgtgccaagcagattttccggctctggcagcggcaccgatttcaccctgacaatatccagcctccagcctgaggacgtggccgtgtactactgccagcagagcaacgacgaccctctgacctttggacagggcaccaaggtggaaatcaaaggcggaggcggaagtggaggcggaggatctggcggcggaggctctcaagttcagctggttcagagcggagccgaagtgaagaaacctggggcctctgtgaaggtgtcctgcaaagccagcggctacacctttaccagctactggatcaactgggtccgacaggcccctggacaaggactggaatggatgggacagatccttccaggcggaggggacaccaactacaacggcaagttcaagggcagagtgaccatcaccgccgacaccagcacaagcaccgcctacatggaactgagcagcctgagaagcgaggacaccgccgtgtattattgcaccagacgggtgcccatccggctggattattggggacagggaaccctggtcaccgtgtctagtacgcgtgaggaggacctgaagaacgtgttcccacctgaggtggccgtgttcgagcctagcgaggccgagatcagccacacccagaaagccaccctcgtgtgcctggctaccggcttctaccccgaccatgtggaactgtcttggtgggtcaacggcaaagaggtgcacagcggcgtgtgtaccgacccccagccactgaaagaacagcccgccctgaacgacagccggtactgcctgagcagcagactgagagtgtccgccaccttctggcagaacccccggaaccacttcagatgccaggtgcagttctacggcctgagcgagaacgacgagtggacccaggacagagccaagcccgtgacccagatcgtgtctgccgaagcctggggcagagccgattgcggctttaccagcgagagctaccagcagggcgtgctgagcgccaccaacctgagcgtgatcggcttcagaatcctgctgctgaaagtggccggctttaacctgctgatgaccctgcggctgtggtccagccgcgccaagagaagcggatctggcgtgaagcagaccctgaatttcgacctgctgaagctggctggcgacgtggaatccaacccaggcccttctagaggccatatgaccgagtacaagcccacggtgcgcctcgccacccgcgacgacgtccccagggccgtacgcaccctcgccgccgcgttcgccgactaccccgccacgcgccacaccgtcgatccggaccgccacatcgagcgggtcaccgagctgcaagaactcttcctcacgcgcgtcgggctcgacatcggcaaggtgtgggtcgcggacgacggcgccgcggtggcggtctggaccacgccggagagcgtcgaagcgggggcggtgttcgccgagatcggcccgcgcatggccgagttgagcggttcccggctggccgcgcagcaacagatggaaggcctcctggcgccgcaccggcccaaggagcccgcgtggttcctggccaccgtcggcgtctcgcccgaccaccagggcaagggtctgggcagcgccgtcgtgctccccggagtggaggcggccgagcgcgccggggtgcccgccttcctggagacctccgcgccccgcaacctccccttctacgagcggctcggcttcaccgtcaccgccgacgtcgaggtgcccgaaggaccgcgcacctggtgcatgacccgcaagcccggtgcctga

SEQ ID NO: 38228 - DNA, 2691 bp, synthetic construct
  source 1..2691: mol_type = other DNA
atggccttaccagtgaccgccttgctcctgccgctggccttgctgctccacgccgccaggccgctcgaggaggcctctacaaagggaccctccgtgtttcctctggctcccagcagcaagtctacaagcggaggaacagccgctctgggctgcctggtcaaggattactttcccgagcctgtgaccgtgtcctggaatagcggagcactgacaagcggcgtgcacacctttccagccgtgctgcaaagcagcggcctgtactctctgagcagcgtggtcacagtgcctagctctagcctgggcacccagacctacatctgcaatgtgaaccacaagcctagcaacaccaaggtggacaagagagtggaacccaagagctgtcccatcaagaccgatgtgattacaatggaccccaaggacaactgctccaaggacgccaacgataccctgctgctccagctgaccaacaccagcgcctactacatgtacttgttgctgctgctgaagtccgtggtgtacttcgccatcatcacatgctgcctgctgcggagaaccgccttctgctgcaacggcgagaagtctagggccaagcgatctggatctggagcaacaaacttctcactactcaaacaagcaggtgacgtggaggagaatcccgggcctactagcatggccttaccagtgaccgccttgctcctgccgctggccttgctgctccacgccgccaggccggacatcgtgatgacacagagccctgatagcctggccgtgtctctgggagagagagccaccattaactgcaaggccagccagagcgtggactacgacggcgacagcttcctgaactggtatcagcagaagcccggccagcctcctaagctgctgatctacgccgccagcaatctggaaagcggcgtgccaagcagattttccggctctggcagcggcaccgatttcaccctgacaatatccagcctccagcctgaggacgtggccgtgtactactgccagcagagcaacgacgaccctctgacctttggacagggcaccaaggtggaaatcaaaggcggaggcggaagtggaggcggaggatctggcggcggaggctctcaagttcagctggttcagagcggagccgaagtgaagaaacctggggcctctgtgaaggtgtcctgcaaagccagcggctacacctttaccagctactggatcaactgggtccgacaggcccctggacaaggactggaatggatgggacagatccttccaggcggaggggacaccaactacaacggcaagttcaagggcagagtgaccatcaccgccgacaccagcacaagcaccgcctacatggaactgagcagcctgagaagcgaggacaccgccgtgtattattgcaccagacgggtgcccatccggctggattattggggacagggaaccctggtcaccgtgtctagtacgcgtggacagcctaaggccaatcctaccgtgacactgttccctccaagcagcgaagaactccaggccaacaaggccacacttgtgtgcctgatctccgacttctaccctggggctgtgacagtggcttggaaggccgatggatctcctgtgaaagccggcgtggaaaccaccaagccatccaagcagagcaacaacaaatacgccgccagctcctacctgagcctgacacctgagcagtggaagtcccacagatcctacagctgccaagtgacccacgaaggcagcaccgtggaaaagacagtggcccctacagagtgcagcgaagtgaaaaccgactccaccgaccacgtgaagcccaaagagacagagaacaccaagcagcccagcaagagctgccacaagcccaaggccatcgtgcacaccgagaaagtgaacatgatgagcctgaccgtgctgggcctgcggatgctgttcgccaaaaccgtggccgtgaacttcctgctgaccgccaagctgttcttcctccgcgccaagagaagcggatctggcgtgaagcagaccctgaatttcgacctgctgaagctggctggcgacgtggaatccaacccaggcccttctagaggccatatgaccgagtacaagcccacggtgcgcctcgccacccgcgacgacgtccccagggccgtacgcaccctcgccgccgcgttcgccgactaccccgccacgcgccacaccgtcgatccggaccgccacatcgagcgggtcaccgagctgcaagaactcttcctcacgcgcgtcgggctcgacatcggcaaggtgtgggtcgcggacgacggcgccgcggtggcggtctggaccacgccggagagcgtcgaagcgggggcggtgttcgccgagatcggcccgcgcatggccgagttgagcggttcccggctggccgcgcagcaacagatggaaggcctcctggcgccgcaccggcccaaggagcccgcgtggttcctggccaccgtcggcgtctcgcccgaccaccagggcaagggtctgggcagcgccgtcgtgctccccggagtggaggcggccgagcgcgccggggtgcccgccttcctggagacctccgcgccccgcaacctccccttctacgagcggctcggcttcaccgtcaccgccgacgtcgaggtgcccgaaggaccgcgcacctggtgcatgacccgcaagcccggtgcctga

SEQ ID NO: 38229 - DNA, 2625 bp, synthetic construct
  source 1..2625: mol_type = other DNA
atggccttaccagtgaccgccttgctcctgccgctggccttgctgctccacgccgccaggccgctcgaggaggcctctacaaagggaccctccgtgtttcctctggctcccagcagcaagtctacaagcggaggaacagccgctctgggctgcctggtcaaggattactttcccgagcctgtgaccgtgtcctggaatagcggagcactgacaagcggcgtgcacacctttccagccgtgctgcaaagcagcggcctgtactctctgagcagcgtggtcacagtgcctagctctagcctgggcacccagacctacatctgcaatgtgaaccacaagcctagcaacaccaaggtggacaagagagtggaacccaagagctgtggcagagccgattgcggctttaccagcgagagctaccagcagggcgtgctgagcgccaccatcctgtacgagatcctgctgggcaaggccaccctgtacgccgtgctggtgtctgccctggtgctgatggctatggtcaagcggaaggacagccggggaagggccaagcgatctggatctggagcaacaaacttctcactactcaaacaagcaggtgacgtggaggagaatcccgggcctactagcatggccttaccagtgaccgccttgctcctgccgctggccttgctgctccacgccgccaggccggacatcgtgatgacacagagccctgatagcctggccgtgtctctgggagagagagccaccattaactgcaaggccagccagagcgtggactacgacggcgacagcttcctgaactggtatcagcagaagcccggccagcctcctaagctgctgatctacgccgccagcaatctggaaagcggcgtgccaagcagattttccggctctggcagcggcaccgatttcaccctgacaatatccagcctccagcctgaggacgtggccgtgtactactgccagcagagcaacgacgaccctctgacctttggacagggcaccaaggtggaaatcaaaggcggaggcggaagtggaggcggaggatctggcggcggaggctctcaagttcagctggttcagagcggagccgaagtgaagaaacctggggcctctgtgaaggtgtcctgcaaagccagcggctacacctttaccagctactggatcaactgggtccgacaggcccctggacaaggactggaatggatgggacagatccttccaggcggaggggacaccaactacaacggcaagttcaagggcagagtgaccatcaccgccgacaccagcacaagcaccgcctacatggaactgagcagcctgagaagcgaggacaccgccgtgtattattgcaccagacgggtgcccatccggctggattattggggacagggaaccctggtcaccgtgtctagtacgcgtggacagcctaaggccaatcctaccgtgacactgttccctccaagcagcgaagaactccaggccaacaaggccacacttgtgtgcctgatctccgacttctaccctggggctgtgacagtggcttggaaggccgatggatctcctgtgaaagccggcgtggaaaccaccaagccatccaagcagagcaacaacaaatacgccgccagctcctacctgagcctgacacctgagcagtggaagtcccacagatcctacagctgccaagtgacccacgaaggcagcaccgtggaaaagacagtggcccctacagagtgcagcatccccgaggacacattcttcccaagccccgagagcagctgcgacgtgaagctggtggaaaagagcttcgagacagacaccaacctgaacttccagaacctgagcgtgatcggcttcagaatcctgctgctgaaagtggccggctttaacctgctgatgaccctgcggctgtggtccagccgcgccaagagaagcggatctggcgtgaagcagaccctgaatttcgacctgctgaagctggctggcgacgtggaatccaacccaggcccttctagaggccatatgaccgagtacaagcccacggtgcgcctcgccacccgcgacgacgtccccagggccgtacgcaccctcgccgccgcgttcgccgactaccccgccacgcgccacaccgtcgatccggaccgccacatcgagcgggtcaccgagctgcaagaactcttcctcacgcgcgtcgggctcgacatcggcaaggtgtgggtcgcggacgacggcgccgcggtggcggtctggaccacgccggagagcgtcgaagcgggggcggtgttcgccgagatcggcccgcgcatggccgagttgagcggttcccggctggccgcgcagcaacagatggaaggcctcctggcgccgcaccggcccaaggagcccgcgtggttcctggccaccgtcggcgtctcgcccgaccaccagggcaagggtctgggcagcgccgtcgtgctccccggagtggaggcggccgagcgcgccggggtgcccgccttcctggagacctccgcgccccgcaacctccccttctacgagcggctcggcttcaccgtcaccgccgacgtcgaggtgcccgaaggaccgcgcacctggtgcatgacccgcaagcccggtgcctga

SEQ ID NO: 38230 - DNA, 2625 bp, synthetic construct
  source 1..2625: mol_type = other DNA
atggccttaccagtgaccgccttgctcctgccgctggccttgctgctccacgccgccaggccgctcgaggaggcctctacaaagggaccctccgtgtttcctctggctcccagcagcaagtctacaagcggaggaacagccgctctgggctgcctggtcaaggattactttcccgagcctgtgaccgtgtcctggaatagcggagcactgacaagcggcgtgcacacctttccagccgtgctgcaaagcagcggcctgtactctctgagcagcgtggtcacagtgcctagctctagcctgggcacccagacctacatctgcaatgtgaaccacaagcctagcaacaccaaggtggacaagagagtggaacccaagagctgtatccccgaggacacattcttcccaagccccgagagcagctgcgacgtgaagctggtggaaaagagcttcgagacagacaccaacctgaacttccagaacctgagcgtgatcggcttcagaatcctgctgctgaaagtggccggctttaacctgctgatgaccctgcggctgtggtccagcagggccaagcgatctggatctggagcaacaaacttctcactactcaaacaagcaggtgacgtggaggagaatcccgggcctactagcatggccttaccagtgaccgccttgctcctgccgctggccttgctgctccacgccgccaggccggacatcgtgatgacacagagccctgatagcctggccgtgtctctgggagagagagccaccattaactgcaaggccagccagagcgtggactacgacggcgacagcttcctgaactggtatcagcagaagcccggccagcctcctaagctgctgatctacgccgccagcaatctggaaagcggcgtgccaagcagattttccggctctggcagcggcaccgatttcaccctgacaatatccagcctccagcctgaggacgtggccgtgtactactgccagcagagcaacgacgaccctctgacctttggacagggcaccaaggtggaaatcaaaggcggaggcggaagtggaggcggaggatctggcggcggaggctctcaagttcagctggttcagagcggagccgaagtgaagaaacctggggcctctgtgaaggtgtcctgcaaagccagcggctacacctttaccagctactggatcaactgggtccgacaggcccctggacaaggactggaatggatgggacagatccttccaggcggaggggacaccaactacaacggcaagttcaagggcagagtgaccatcaccgccgacaccagcacaagcaccgcctacatggaactgagcagcctgagaagcgaggacaccgccgtgtattattgcaccagacgggtgcccatccggctggattattggggacagggaaccctggtcaccgtgtctagtacgcgtggacagcctaaggccaatcctaccgtgacactgttccctccaagcagcgaagaactccaggccaacaaggccacacttgtgtgcctgatctccgacttctaccctggggctgtgacagtggcttggaaggccgatggatctcctgtgaaagccggcgtggaaaccaccaagccatccaagcagagcaacaacaaatacgccgccagctcctacctgagcctgacacctgagcagtggaagtcccacagatcctacagctgccaagtgacccacgaaggcagcaccgtggaaaagacagtggcccctacagagtgcagcggcagagccgattgcggctttaccagcgagagctaccagcagggcgtgctgagcgccaccatcctgtacgagatcctgctgggcaaggccaccctgtacgccgtgctggtgtctgccctggtgctgatggctatggtcaagcggaaggacagccggggacgcgccaagagaagcggatctggcgtgaagcagaccctgaatttcgacctgctgaagctggctggcgacgtggaatccaacccaggcccttctagaggccatatgaccgagtacaagcccacggtgcgcctcgccacccgcgacgacgtccccagggccgtacgcaccctcgccgccgcgttcgccgactaccccgccacgcgccacaccgtcgatccggaccgccacatcgagcgggtcaccgagctgcaagaactcttcctcacgcgcgtcgggctcgacatcggcaaggtgtgggtcgcggacgacggcgccgcggtggcggtctggaccacgccggagagcgtcgaagcgggggcggtgttcgccgagatcggcccgcgcatggccgagttgagcggttcccggctggccgcgcagcaacagatggaaggcctcctggcgccgcaccggcccaaggagcccgcgtggttcctggccaccgtcggcgtctcgcccgaccaccagggcaagggtctgggcagcgccgtcgtgctccccggagtggaggcggccgagcgcgccggggtgcccgccttcctggagacctccgcgccccgcaacctccccttctacgagcggctcggcttcaccgtcaccgccgacgtcgaggtgcccgaaggaccgcgcacctggtgcatgacccgcaagcccggtgcctga

SEQ ID NO: 38231 - DNA, 1863 bp, synthetic construct
  source 1..1863: mol_type = other DNA
atggccttaccagtgaccgccttgctcctgccgctggccttgctgctccacgccgccaggccggacatcgtgatgacacagagccctgatagcctggccgtgtctctgggagagagagccaccattaactgcaaggccagccagagcgtggactacgacggcgacagcttcctgaactggtatcagcagaagcccggccagcctcctaagctgctgatctacgccgccagcaatctggaaagcggcgtgccaagcagattttccggctctggcagcggcaccgatttcaccctgacaatatccagcctccagcctgaggacgtggccgtgtactactgccagcagagcaacgacgaccctctgacctttggacagggcaccaaggtggaaatcaaactcgaggacctgaagaacgtgttcccacctgaggtggccgtgttcgagcctagcgaggccgagatcagccacacccagaaagccaccctcgtgtgcctggctaccggcttctaccccgaccatgtggaactgtcttggtgggtcaacggcaaagaggtgcacagcggcgtgtgtaccgacccccagccactgaaagaacagcccgccctgaacgacagccggtactgcctgagcagcagactgagagtgtccgccaccttctggcagaacccccggaaccacttcagatgccaggtgcagttctacggcctgagcgagaacgacgagtggacccaggacagagccaagcccgtgacccagatcgtgtctgccgaagcctggggcagagccgatagcggctttaccagcgagagctaccagcagggcgtgctgagcgccaccatcctgtacgagatcctgctgggcaaggccaccctgtacgccgtgctggtgtctgccctggtgctgatggctatggtcaagcggaaggacagccggggaagggccaagcgatctggatctggagcaacaaacttctcactactcaaacaagcaggtgacgtggaggagaatcccgggcctactagtatggactggatttggcgcatccttttccttgtcggcgctgctaccggcgcgcattccttcgaacaagttcagctggttcagagcggagccgaagtgaagaaacctggggcctctgtgaaggtgtcctgcaaagccagcggctacacctttaccagctactggatcaactgggtccgacaggcccctggacaaggactggaatggatgggacagatccttccaggcggaggggacaccaactacaacggcaagttcaagggcagagtgaccatcaccgccgacaccagcacaagcaccgcctacatggaactgagcagcctgagaagcgaggacaccgccgtgtattattgcaccagacgggtgcccatccggctggattattggggacagggaaccctggtcaccgtgtctagtacgcgtatccagaaccctgatcctgccgtgtaccagctgcgggatagcaagagcagcgacaagagcgtgtgtctgttcaccgacttcgacagccagaccaacgtgtcccagagcaaggactccgacgtgtacatcaccgataagtgcgtgctggacatgcggagcatggacttcaagagcaactccgccgtggcctggtccaacaagtccgatttcgcctgcgccaacgccttcaacaacagcattatccccgaggacacattcttcccaagccccgagagcagcagcgacgtgaagctggtggaaaagagcttcgagacagacaccaacctgaacttccagaacctgagcgtgatcggcttcagaatcctgctgctgaaagtggccggctttaacctgctgatgaccctgcggctgtggtccagc

SEQ ID NO: 38232 - DNA, 2703 bp, synthetic construct
  source 1..2703: mol_type = other DNA
atggccttaccagtgaccgccttgctcctgccgctggccttgctgctccacgccgccaggccggaggttcagctgcttgagtctggcggaggactggttcaacctggcggaagcctgagactgtcttgtgccgcctctggcagaaccttcagcatgggctggtatagacaggcccctggcaagggcctcgaatttgtgtctgccatcacatacagcggcggcagcccttactacgccgattctgtgaagggcagattcaccatcagccgggacaacagcaagaacaccgtgtacctccagatgaacagcctgagagccgaggacaccgccgtgtactactgtgccgccaatccaacctacggcagcgactggaatgccgagaattggggccagggcacactggtcacagtgtctagtggtaccggcggaggcggatctggcggcggaggtagcggtggcggaggatctgaattcgacatcgtgatgacacagagccctgatagcctggccgtgtctctgggagagagagccaccattaactgcaaggccagccagagcgtggactacgacggcgacagcttcctgaactggtatcagcagaagcccggccagcctcctaagctgctgatctacgccgccagcaatctggaaagcggcgtgccaagcagattttccggctctggcagcggcaccgatttcaccctgacaatatccagcctccagcctgaggacgtggccgtgtactactgccagcagagcaacgacgaccctctgacctttggacagggcaccaaggtggaaatcaaactcgagatccagaaccctgatcctgccgtgtaccagctgcgggatagcaagagcagcgacaagagcgtgtgtctgttcaccgacttcgacagccagaccaacgtgtcccagagcaaggactccgacgtgtacatcaccgataagtgcgtgctggacatgcggagcatggacttcaagagcaactccgccgtggcctggtccaacaagtccgatttcgcctgcgccaacgccttcaacaacagcattatccccgaggacacattcttcccaagcagcgacgtgccctgcgacgtgaagctggtggaaaagagcttcgagacagacaccaacctgaacttccagaacctgagcgtgatcggcttcagaatcctgctgctgaaagtggccggctttaacctgctgatgaccctgcggctgtggtccagccgcgccaagagaagcggatctggcgtgaagcagaccctgaatttcgacctgctgaagctggctggcgacgtggaatccaacccaggccctactagtaccatggactggatttggcgcatccttttccttgtcggcgctgctaccggcacccattccgggcccgaagtgcaactggttgaatccggtggcggcctggtgcaacccggcggatctctcagacttagctgtgccgcctccggcagaaccttcacaatgggatggtacaggcaggctccagggaaagagagagagttcgtcgccgccatctctctgtctcccacactggcctactacgccgactctgtgaaaggccggttcaccatctccagagataatagcaagaacaccgtggtgctgcaaatgaactctctgagagccgaggatacagccctgtactattgtgccgctgaccggaagtccgtgatgagcatcagacccgattactggggacagggcacactggtcacagtgtctagtggatccggcggcggaggatctggcggaggcggatctgggggcggaggctctttcgaacaagttcagctggttcagagcggagccgaagtgaagaaacctggggcctctgtgaaggtgtcctgcaaagccagcggctacacctttaccagctactggatcaactgggtccgacaggcccctggacaaggactggaatggatgggacagatccttccaggcggaggggacaccaactacaacggcaagttcaagggcagagtgaccatcaccgccgacaccagcacaagcaccgcctacatggaactgagcagcctgagaagcgaggacaccgccgtgtattattgcaccagacgggtgcccatccggctggattattggggacagggaaccctggtcaccgtgtctagtacgcgtgaggacctgaagaacgtgttcccacctgaggtggccgtgttcgagcctagcaaggccgagatcgcccacacccagaaagccaccctcgtgtgcctggctaccggcttctaccccgaccatgtggaactgtcttggtgggtcaacggcaaagaggtgcacagcggcgtgtgtaccgacccccagccactgaaagaacagcccgccctgaacgacagccggtactgcctgagcagcagactgagagtgtccgccaccttctggcagaacccccggaaccacttcagatgccaggtgcagttctacggcctgagcgagaacgacgagtggacccaggacagagccaagcccgtgacccagatcgtgtctgccgaagcctggggcagagccgattgcggcatcaccagcgccagctaccaccagggcgtgctgagcgccaccatcctgtacgagatcctgctgggcaaggccaccctgtacgccgtgctggtgtctgccctggtgctgatggctatggtcaagcggaaggacagccggggataa

SEQ ID NO: 38233 - DNA, 2703 bp, synthetic construct
  source 1..2703: mol_type = other DNA
atggccttaccagtgaccgccttgctcctgccgctggccttgctgctccacgccgccaggccggaagtgcagctggttgaatctggcggaggactggttcaggctggcggatctctgagactgtcttgtgccgccagcggcagaacctttagcatgggctggtttagacaggcccctggcaaagagagagagttcgtcgccgccatcacatactctggcggcagcccttactacgccgactctgtgaagggcagattcaccatcagccgggacaacgccaagaacaccgtgtacctccagatgaacagcctgaagcctgaggacaccgccgtgtactactgcgccgccaatccaacatacggcagcgactggaacgccgagaattggggccagggaacccaagtgacagtgtctagcggtaccggcggaggcggatctggcggcggaggtagcggtggcggaggatctgaattcgacatcgtgatgacacagagccctgatagcctggccgtgtctctgggagagagagccaccattaactgcaaggccagccagagcgtggactacgacggcgacagcttcctgaactggtatcagcagaagcccggccagcctcctaagctgctgatctacgccgccagcaatctggaaagcggcgtgccaagcagattttccggctctggcagcggcaccgatttcaccctgacaatatccagcctccagcctgaggacgtggccgtgtactactgccagcagagcaacgacgaccctctgacctttggacagggcaccaaggtggaaatcaaactcgagatccagaaccctgatcctgccgtgtaccagctgcgggatagcaagagcagcgacaagagcgtgtgtctgttcaccgacttcgacagccagaccaacgtgtcccagagcaaggactccgacgtgtacatcaccgataagtgcgtgctggacatgcggagcatggacttcaagagcaactccgccgtggcctggtccaacaagtccgatttcgcctgcgccaacgccttcaacaacagcattatccccgaggacacattcttcccaagcagcgacgtgccctgcgacgtgaagctggtggaaaagagcttcgagacagacaccaacctgaacttccagaacctgagcgtgatcggcttcagaatcctgctgctgaaagtggccggctttaacctgctgatgaccctgcggctgtggtccagccgcgccaagagaagcggatctggcgtgaagcagaccctgaatttcgacctgctgaagctggctggcgacgtggaatccaacccaggccctactagtaccatggactggatttggcgcatccttttccttgtcggcgctgctaccggcgcccattccgggcccgaagtgcaactggttgaatccggtggcggcctggtgcaacccggcggatctctcagacttagctgtgccgcctccggcagaaccttcacaatgggatggtacaggcaggctccagggaaagagagagagttcgtcgccgccatctctctgtctcccacactggcctactacgccgactctgtgaaaggccggttcaccatctccagagataatagcaagaacaccgtggtgctgcaaatgaactctctgagagccgaggatacagccctgtactattgtgccgctgaccggaagtccgtgatgagcatcagacccgattactggggacagggcacactggtcacagtgtctagtggatccggcggcggaggatctggcggaggcggatctgggggcggaggctctttcgaacaagttcagctggttcagagcggagccgaagtgaagaaacctggggcctctgtgaaggtgtcctgcaaagccagcggctacacctttaccagctactggatcaactgggtccgacaggcccctggacaaggactggaatggatgggacagatccttccaggcggaggggacaccaactacaacggcaagttcaagggcagagtgaccatcaccgccgacaccagcacaagcaccgcctacatggaactgagcagcctgagaagcgaggacaccgccgtgtattattgcaccagacgggtgcccatccggctggattattggggacagggaaccctggtcaccgtgtctagtacgcgtgaggacctgaagaacgtgttcccacctgaggtggccgtgttcgagcctagcaaggccgagatcgcccacacccagaaagccaccctcgtgtgcctggctaccggcttctaccccgaccatgtggaactgtcttggtgggtcaacggcaaagaggtgcacagcggcgtgtgtaccgacccccagccactgaaagaacagcccgccctgaacgacagccggtactgcctgagcagcagactgagagtgtccgccaccttctggcagaacccccggaaccacttcagatgccaggtgcagttctacggcctgagcgagaacgacgagtggacccaggacagagccaagcccgtgacccagatcgtgtctgccgaagcctggggcagagccgattgcggcatcaccagcgccagctaccaccagggcgtgctgagcgccaccatcctgtacgagatcctgctgggcaaggccaccctgtacgccgtgctggtgtctgccctggtgctgatggctatggtcaagcggaaggacagccggggataa

SEQ ID NO: 38234 - DNA, 2694 bp, synthetic construct
  source 1..2694: mol_type = other DNA
atggccttaccagtgaccgccttgctcctgccgctggccttgctgctccacgccgccaggccggaagtgcagctggttgaatctggcggaggactggttcaggctggcggatctctgagactgtcttgtgccgccagcggcagaacctttagcatgggctggtttagacaggcccctggcaaagagagagagttcgtcgccgccatcacatactctggcggcagcccttactacgccgactctgtgaagggcagattcaccatcagccgggacaacgccaagaacaccgtgtacctccagatgaacagcctgaagcctgaggacaccgccgtgtactactgcgccgccaatccaacatacggcagcgactggaacgccgagaattggggccagggaacccaagtgacagtgtctagcggtaccggcggaggcggatctggcggcggaggtagcggtggcggaggatctgaattcgacatcgtgatgacacagagccctgatagcctggccgtgtctctgggagagagagccaccattaactgcaaggccagccagagcgtggactacgacggcgacagcttcctgaactggtatcagcagaagcccggccagcctcctaagctgctgatctacgccgccagcaatctggaaagcggcgtgccaagcagattttccggctctggcagcggcaccgatttcaccctgacaatatccagcctccagcctgaggacgtggccgtgtactactgccagcagagcaacgacgaccctctgacctttggacagggcaccaaggtggaaatcaaactcgaggacctgaagaacgtgttcccacctgaggtggccgtgttcgagcctagcgaggccgagatcagccacacccagaaagccaccctcgtgtgcctggctaccggcttctaccccgaccatgtggaactgtcttggtgggtcaacggcaaagaggtgcacagcggcgtgtgtaccgacccccagccactgaaagaacagcccgccctgaacgacagccggtactgcctgagcagcagactgagagtgtccgccaccttctggcagaacccccggaaccacttcagatgccaggtgcagttctacggcctgagcgagaacgacgagtggacccaggacagagccaagcccgtgacccagatcgtgtctgccgaagcctggggcagagccgattgcggctttaccagcgagagctaccagcagggcgtgctgagcgccaccatcctgtacgagatcctgctgggcaaggccaccctgtacgccgtgctggtgtctgccctggtgctgatggctatggtcaagcggaaggacagccggggaagggccaagcgatctggatctggagcaacaaacttctcactactcaaacaagcaggtgacgtggaggagaatcccgggcctactagtgccaccatggactggatttggcgcatccttttccttgtcggcgctgctaccggcgcccattccgggcccgaagtgcaactggttgaatccggtggcggcctggtgcaagcaggcggatctctcagacttagctgtgccgcctccggcagaaccttcacaatgggatggtttaggcaggctccagggaaagagagagagttcgtcgccgccatctctctgtctcccacactggcctactacgccgactctgtgaaaggccggttcaccatctccagagataatgccaagaacaccgtggtgctgcaaatgaactctctgaaacccgaggatacagccctgtactattgtgccgctgaccggaagtccgtgatgagcatcagacccgattactggggacagggcacacaagtcacagtgtcctctggatccggcggcggaggatctggcggaggcggatctgggggcggaggctctttcgaacaagttcagctggttcagagcggagccgaagtgaagaaacctggggcctctgtgaaggtgtcctgcaaagccagcggctacacctttaccagctactggatcaactgggtccgacaggcccctggacaaggactggaatggatgggacagatccttccaggcggaggggacaccaactacaacggcaagttcaagggcagagtgaccatcaccgccgacaccagcacaagcaccgcctacatggaactgagcagcctgagaagcgaggacaccgccgtgtattattgcaccagacgggtgcccatccggctggattattggggacagggaaccctggtcaccgtgtctagtacgcgtatccagaaccctgatcctgccgtgtaccagctgcgggatagcaagagcagcgacaagagcgtgtgtctgttcaccgacttcgacagccagaccaacgtgtcccagagcaaggactccgacgtgtacatcaccgataagtgcgtgctggacatgcggagcatggacttcaagagcaactccgccgtggcctggtccaacaagtccgatttcgcctgcgccaacgccttcaacaacagcattatccccgaggacacattcttcccaagccccgagagcagctgcgacgtgaagctggtggaaaagagcttcgagacagacaccaacctgaacttccagaacctgagcgtgatcggcttcagaatcctgctgctgaaagtggccggctttaacctgctgatgaccctgcggctgtggtccagctaa

SEQ ID NO: 38235 - DNA, 2307 bp, synthetic construct
  source 1..2307: mol_type = other DNA
atggccttaccagtgaccgccttgctcctgccgctggccttgctgctccacgccgccaggccggaagtgcagctggttgaatctggcggaggactggttcagcctggcggatctctgagactgagctgtgaagccagcggcttcgccagcgacgattacatcatcggctggttcagacaggcccctggcaaagagagagagggcgtcagctgcatcagctctaagtacgccaacaccgtgtacaccgacagcgtgaagggcagattcagactgagcagaggcaccgccaagaataccgtgtacctccagatgagcgccctgaagcctgaggataccgccgtgtactactgcgctatggacagccgcagagtgacatgccctgagatcagcaccatgcaccggaacttcgattcttggggccagggcacactggtcacagtgtcatctggtaccggcggaggcggatctggcggcggaggtagcggtggcggaggatctgaattcgacatcgtgatgacacagagccctgatagcctggccgtgtctctgggagagagagccaccattaactgcaaggccagccagagcgtggactacgacggcgacagcttcctgaactggtatcagcagaagcccggccagcctcctaagctgctgatctacgccgccagcaatctggaaagcggcgtgccaagcagattttccggctctggcagcggcaccgatttcaccctgacaatatccagcctccagcctgaggacgtggccgtgtactactgccagcagagcaacgacgaccctctgacctttggacagggcaccaaggtggaaatcaaactcgaggacctgaagaacgtgttcccacctgaggtggccgtgttcgagcctagcaaggccgagatcgcccacacccagaaagccaccctcgtgtgcctggctaccggcttctaccccgaccatgtggaactgtcttggtgggtcaacggcaaagaggtgcacagcggcgtgtgtaccgacccccagccactgaaagaacagcccgccctgaacgacagccggtactgcctgagcagcagactgagagtgtccgccaccttctggcagaacccccggaaccacttcagatgccaggtgcagttctacggcctgagcgagaacgacgagtggacccaggacagagccaagcccgtgacccagatcgtgtctgccgaagcctggggcagagccgattgcggcatcaccagcgccagctaccaccagggcgtgctgagcgccaccatcctgtacgagatcctgctgggcaaggccaccctgtacgccgtgctggtgtctgccctggtgctgatggctatggtcaagcggaaggacagccggggaagggccaagcgatctggatctggagcaacaaacttctcactactcaaacaagcaggtgacgtggaggagaatcccgggcctactagtatggactggatttggcgcatccttttccttgtcggcgctgctaccggcgcgcattccttcgaacaagttcagctggttcagagcggagccgaagtgaagaaacctggggcctctgtgaaggtgtcctgcaaagccagcggctacacctttaccagctactggatcaactgggtccgacaggcccctggacaaggactggaatggatgggacagatccttccaggcggaggggacaccaactacaacggcaagttcaagggcagagtgaccatcaccgccgacaccagcacaagcaccgcctacatggaactgagcagcctgagaagcgaggacaccgccgtgtattattgcaccagacgggtgcccatccggctggattattggggacagggaaccctggtcaccgtgtctagtacgcgtatccagaaccctgatcctgccgtgtaccagctgcgggatagcaagagcagcgacaagagcgtgtgtctgttcaccgacttcgacagccagaccaacgtgtcccagagcaaggactccgacgtgtacatcaccgataagtgcgtgctggacatgcggagcatggacttcaagagcaactccgccgtggcctggtccaacaagtccgatttcgcctgcgccaacgccttcaacaacagcattatccccgaggacacattcttcccaagcagcgacgtgccctgcgacgtgaagctggtggaaaagagcttcgagacagacaccaacctgaacttccagaacctgagcgtgatcggcttcagaatcctgctgctgaaagtggccggctttaacctgctgatgaccctgcggctgtggtccagctaa

SEQ ID NO: 38236 - DNA, 2280 bp, synthetic construct
  source 1..2280: mol_type = other DNA
atggccttaccagtgaccgccttgctcctgccgctggccttgctgctccacgccgccaggccggacatcgtgatgacacagagccctgatagcctggccgtgtctctgggagagagagccaccattaactgcaaggccagccagagcgtggactacgacggcgacagcttcctgaactggtatcagcagaagcccggccagcctcctaagctgctgatctacgccgccagcaatctggaaagcggcgtgccaagcagattttccggctctggcagcggcaccgatttcaccctgacaatatccagcctccagcctgaggacgtggccgtgtactactgccagcagagcaacgacgaccctctgacctttggacagggcaccaaggtggaaatcaaactcgaggacctgaagaacgtgttcccacctgaggtggccgtgttcgagcctagcgaggccgagatcagccacacccagaaagccaccctcgtgtgcctggctaccggcttctaccccgaccatgtggaactgtcttggtgggtcaacggcaaagaggtgcacagcggcgtgtgtaccgacccccagccactgaaagaacagcccgccctgaacgacagccggtactgcctgagcagcagactgagagtgtccgccaccttctggcagaacccccggaaccacttcagatgccaggtgcagttctacggcctgagcgagaacgacgagtggacccaggacagagccaagcccgtgacccagatcgtgtctgccgaagcctggggcagagccgattgcggctttaccagcgagagctaccagcagggcgtgctgagcgccaccatcctgtacgagatcctgctgggcaaggccaccctgtacgccgtgctggtgtctgccctggtgctgatggctatggtcaagcggaaggacagccggggaagggccaagcgatctggatctggagcaacaaacttctcactactcaaacaagcaggtgacgtggaggagaatcccgggcctactagtaccatggactggatttggcgcatccttttccttgtcggcgctgctaccggcgcccattccgggcccgaagtgcaactggttgaatccggtggcggcctggtgcaacccggcggatctctcagacttagctgtgccgcctccggcagaaccttcacaatgggatggtacaggcaggctccagggaaagagagagagttcgtcgccgccatctctctgtctcccacactggcctactacgccgactctgtgaaaggccggttcaccatctccagagataatagcaagaacaccgtggtgctgcaaatgaactctctgagagccgaggatacagccctgtactattgtgccgctgaccggaagtccgtgatgagcatcagacccgattactggggacagggcacactggtcacagtgtctagtggatccggcggcggaggatctggcggaggcggatctgggggcggaggctctttcgaacaagttcagctggttcagagcggagccgaagtgaagaaacctggggcctctgtgaaggtgtcctgcaaagccagcggctacacctttaccagctactggatcaactgggtccgacaggcccctggacaaggactggaatggatgggacagatccttccaggcggaggggacaccaactacaacggcaagttcaagggcagagtgaccatcaccgccgacaccagcacaagcaccgcctacatggaactgagcagcctgagaagcgaggacaccgccgtgtattattgcaccagacgggtgcccatccggctggattattggggacagggaaccctggtcaccgtgtctagtacgcgtatccagaaccctgatcctgccgtgtaccagctgcgggatagcaagagcagcgacaagagcgtgtgtctgttcaccgacttcgacagccagaccaacgtgtcccagagcaaggactccgacgtgtacatcaccgataagtgcgtgctggacatgcggagcatggacttcaagagcaactccgccgtggcctggtccaacaagtccgatttcgcctgcgccaacgccttcaacaacagcattatccccgaggacacattcttcccaagccccgagagcagctgcgacgtgaagctggtggaaaagagcttcgagacagacaccaacctgaacttccagaacctgagcgtgatcggcttcagaatcctgctgctgaaagtggccggctttaacctgctgatgaccctgcggctgtggtccagctaa

SEQ ID NO: 38237 - DNA, 2298 bp, synthetic construct
  source 1..2298: mol_type = other DNA
atggccttaccagtgaccgccttgctcctgccgctggccttgctgctccacgccgccaggccggacatcgtgatgacacagagccctgatagcctggccgtgtctctgggagagagagccaccattaactgcaaggccagccagagcgtggactacgacggcgacagcttcctgaactggtatcagcagaagcccggccagcctcctaagctgctgatctacgccgccagcaatctggaaagcggcgtgccaagcagattttccggctctggcagcggcaccgatttcaccctgacaatatccagcctccagcctgaggacgtggccgtgtactactgccagcagagcaacgacgaccctctgacctttggacagggcaccaaggtggaaatcaaactcgaggacctgaagaacgtgttcccacctgaggtggccgtgttcgagcctagcgaggccgagatcagccacacccagaaagccaccctcgtgtgcctggctaccggcttctaccccgaccatgtggaactgtcttggtgggtcaacggcaaagaggtgcacagcggcgtgtgtaccgacccccagccactgaaagaacagcccgccctgaacgacagccggtactgcctgagcagcagactgagagtgtccgccaccttctggcagaacccccggaaccacttcagatgccaggtgcagttctacggcctgagcgagaacgacgagtggacccaggacagagccaagcccgtgacccagatcgtgtctgccgaagcctggggcagagccgattgcggctttaccagcgagagctaccagcagggcgtgctgagcgccaccatcctgtacgagatcctgctgggcaaggccaccctgtacgccgtgctggtgtctgccctggtgctgatggctatggtcaagcggaaggacagccggggaagggccaagcgatctggatctggagcaacaaacttctcactactcaaacaagcaggtgacgtggaggagaatcccgggcctactagtaccatggactggatttggcgcatccttttccttgtcggcgctgctaccggcgcccattccgggccccaggtgcagctggttgaatctggcggaggactggttcagcctggcggatctctgagactgtcttgtgccgccagcggcaacatcaacagcagaaactgcatgggctggttcagacaggcccctggcaagggaagagaaggcgtggcagctatcggccaagtgaccggcagaacctactacgtggacagcgtgaagggcagattcaccatcagcctggacaacagcaagaacaccctgtacctccagatgaacagcctgagagccgaggacaccgccgtgtactattgtgctgctgcccctggctgtctgctgtctgcacttagaagcgccgactacagaaactggggccagggcacactggtcaccgtttcttctggatccggcggcggaggatctggcggaggcggatctgggggcggaggctctttcgaacaagttcagctggttcagagcggagccgaagtgaagaaacctggggcctctgtgaaggtgtcctgcaaagccagcggctacacctttaccagctactggatcaactgggtccgacaggcccctggacaaggactggaatggatgggacagatccttccaggcggaggggacaccaactacaacggcaagttcaagggcagagtgaccatcaccgccgacaccagcacaagcaccgcctacatggaactgagcagcctgagaagcgaggacaccgccgtgtattattgcaccagacgggtgcccatccggctggattattggggacagggaaccctggtcaccgtgtctagtacgcgtatccagaaccctgatcctgccgtgtaccagctgcgggatagcaagagcagcgacaagagcgtgtgtctgttcaccgacttcgacagccagaccaacgtgtcccagagcaaggactccgacgtgtacatcaccgataagtgcgtgctggacatgcggagcatggacttcaagagcaactccgccgtggcctggtccaacaagtccgatttcgcctgcgccaacgccttcaacaacagcattatccccgaggacacattcttcccaagccccgagagcagctgcgacgtgaagctggtggaaaagagcttcgagacagacaccaacctgaacttccagaacctgagcgtgatcggcttcagaatcctgctgctgaaagtggccggctttaacctgctgatgaccctgcggctgtggtccagc

SEQ ID NO: 38238 - DNA, 2301 bp, synthetic construct
  source 1..2301: mol_type = other DNA
atggccttaccagtgaccgccttgctcctgccgctggccttgctgctccacgccgccaggccggacatcgtgatgacacagagccctgatagcctggccgtgtctctgggagagagagccaccattaactgcaaggccagccagagcgtggactacgacggcgacagcttcctgaactggtatcagcagaagcccggccagcctcctaagctgctgatctacgccgccagcaatctggaaagcggcgtgccaagcagattttccggctctggcagcggcaccgatttcaccctgacaatatccagcctccagcctgaggacgtggccgtgtactactgccagcagagcaacgacgaccctctgacctttggacagggcaccaaggtggaaatcaaactcgaggacctgaagaacgtgttcccacctgaggtggccgtgttcgagcctagcgaggccgagatcagccacacccagaaagccaccctcgtgtgcctggctaccggcttctaccccgaccatgtggaactgtcttggtgggtcaacggcaaagaggtgcacagcggcgtgtgtaccgacccccagccactgaaagaacagcccgccctgaacgacagccggtactgcctgagcagcagactgagagtgtccgccaccttctggcagaacccccggaaccacttcagatgccaggtgcagttctacggcctgagcgagaacgacgagtggacccaggacagagccaagcccgtgacccagatcgtgtctgccgaagcctggggcagagccgattgcggctttaccagcgagagctaccagcagggcgtgctgagcgccaccatcctgtacgagatcctgctgggcaaggccaccctgtacgccgtgctggtgtctgccctggtgctgatggctatggtcaagcggaaggacagccggggaagggccaagcgatctggatctggagcaacaaacttctcactactcaaacaagcaggtgacgtggaggagaatcccgggcctactagtaccatggactggatttggcgcatccttttccttgtcggcgctgctaccggcgcccattccgggccccaggtgcagctggttgaatctggcggaggatctgttcaggctggcggctctctgagactgtcttgtggcgcttccggcaacatcagcagcagaaactgcatgggctggttcagacaggcccctggcaaagagagagaaggcgttgccgccatcggacaagtgaccggcagatcctactacgtggacagcgtgaagggcagattcaccatcagcctggacaacgccaagaacaccctgtacctccagatgaacacactgaagcccgaggacaccgccatgtactactgtgctgctgcccctggctgtctgctgtctgcacttagaagcgccgactacagaaactggggccagggaacccaagtgacagtgtctagtggatccggcggcggaggatctggcggaggcggatctgggggcggaggctctttcgaacaagttcagctggttcagagcggagccgaagtgaagaaacctggggcctctgtgaaggtgtcctgcaaagccagcggctacacctttaccagctactggatcaactgggtccgacaggcccctggacaaggactggaatggatgggacagatccttccaggcggaggggacaccaactacaacggcaagttcaagggcagagtgaccatcaccgccgacaccagcacaagcaccgcctacatggaactgagcagcctgagaagcgaggacaccgccgtgtattattgcaccagacgggtgcccatccggctggattattggggacagggaaccctggtcaccgtgtctagtacgcgtatccagaaccctgatcctgccgtgtaccagctgcgggatagcaagagcagcgacaagagcgtgtgtctgttcaccgacttcgacagccagaccaacgtgtcccagagcaaggactccgacgtgtacatcaccgataagtgcgtgctggacatgcggagcatggacttcaagagcaactccgccgtggcctggtccaacaagtccgatttcgcctgcgccaacgccttcaacaacagcattatccccgaggacacattcttcccaagccccgagagcagctgcgacgtgaagctggtggaaaagagcttcgagacagacaccaacctgaacttccagaacctgagcgtgatcggcttcagaatcctgctgctgaaagtggccggctttaacctgctgatgaccctgcggctgtggtccagctaa

SEQ ID NO: 38239 - DNA, 2724 bp, synthetic construct
  source 1..2724: mol_type = other DNA
atggccttaccagtgaccgccttgctcctgccgctggccttgctgctccacgccgccaggccggaagtgcagctggttgaatctggcggaggactggttcaggctggcggatctctgagactgtcttgtgccgccagcggcagaacctttagcatgggctggtttagacaggcccctggcaaagagagagagttcgtcgccgccatcacatactctggcggcagcccttactacgccgactctgtgaagggcagattcaccatcagccgggacaacgccaagaacaccgtgtacctccagatgaacagcctgaagcctgaggacaccgccgtgtactactgcgccgccaatccaacatacggcagcgactggaacgccgagaattggggccagggaacccaagtgacagtgtctagcggtaccggcggaggcggatctggcggcggaggtagcggtggcggaggatctgaattcgacatcgtgatgacacagagccctgatagcctggccgtgtctctgggagagagagccaccattaactgcaaggccagccagagcgtggactacgacggcgacagcttcctgaactggtatcagcagaagcccggccagcctcctaagctgctgatctacgccgccagcaatctggaaagcggcgtgccaagcagattttccggctctggcagcggcaccgatttcaccctgacaatatccagcctccagcctgaggacgtggccgtgtactactgccagcagagcaacgacgaccctctgacctttggacagggcaccaaggtggaaatcaaactcgagatccagaaccctgatcctgccgtgtaccagctgcgggatagcaagagcagcgacaagagcgtgtgtctgttcaccgacttcgacagccagaccaacgtgtcccagagcaaggactccgacgtgtacatcaccgataagtgcgtgctggacatgcggagcatggacttcaagagcaactccgccgtggcctggtccaacaagtccgatttcgcctgcgccaacgccttcaacaacagcattatccccgaggacacattcttcccaagcagcgacgtgccctgcgacgtgaagctggtggaaaagagcttcgagacagacaccaacctgaacttccagaacctgagcgtgatcggcttcagaatcctgctgctgaaagtggccggctttaacctgctgatgaccctgcggctgtggtccagccgcgccaagagaagcggatctggcgtgaagcagaccctgaatttcgacctgctgaagctggctggcgacgtggaatccaacccaggccctactagtaccatggactggatttggcgcatccttttccttgtcggcgctgctaccggcgcccattccgggccccaggtgcagctggttgaatctggcggaggatctgttcaggctggcggctctctgagactgtcttgtggcgcttccggcaacatcagcagcagaaactgcatgggctggttcagacaggcccctggcaaagagagagaaggcgttgccgccatcggacaagtgaccggcagatcctactacgtggacagcgtgaagggcagattcaccatcagcctggacaacgccaagaacaccctgtacctccagatgaacacactgaagcccgaggacaccgccatgtactactgtgctgctgcccctggctgtctgctgtctgcacttagaagcgccgactacagaaactggggccagggaacccaagtgacagtgtctagtggatccggcggcggaggatctggcggaggcggatctgggggcggaggctctttcgaacaagttcagctggttcagagcggagccgaagtgaagaaacctggggcctctgtgaaggtgtcctgcaaagccagcggctacacctttaccagctactggatcaactgggtccgacaggcccctggacaaggactggaatggatgggacagatccttccaggcggaggggacaccaactacaacggcaagttcaagggcagagtgaccatcaccgccgacaccagcacaagcaccgcctacatggaactgagcagcctgagaagcgaggacaccgccgtgtattattgcaccagacgggtgcccatccggctggattattggggacagggaaccctggtcaccgtgtctagtacgcgtgaggacctgaagaacgtgttcccacctgaggtggccgtgttcgagcctagcaaggccgagatcgcccacacccagaaagccaccctcgtgtgcctggctaccggcttctaccccgaccatgtggaactgtcttggtgggtcaacggcaaagaggtgcacagcggcgtgtgtaccgacccccagccactgaaagaacagcccgccctgaacgacagccggtactgcctgagcagcagactgagagtgtccgccaccttctggcagaacccccggaaccacttcagatgccaggtgcagttctacggcctgagcgagaacgacgagtggacccaggacagagccaagcccgtgacccagatcgtgtctgccgaagcctggggcagagccgattgcggcatcaccagcgccagctaccaccagggcgtgctgagcgccaccatcctgtacgagatcctgctgggcaaggccaccctgtacgccgtgctggtgtctgccctggtgctgatggctatggtcaagcggaaggacagccggggataa

SEQ ID NO: 38240 - DNA, 2715 bp, synthetic construct
  source 1..2715: mol_type = other DNA
atggccttaccagtgaccgccttgctcctgccgctggccttgctgctccacgccgccaggccgcaggtgcagctggttgaatctggcggaggatctgttcaggctggcggctctctgagactgtcttgtggcgcttccggcaacatcagcagcagaaactgcatgggctggttcagacaggcccctggcaaagagagagaaggcgttgccgccatcggacaagtgaccggcagatcctactacgtggacagcgtgaagggcagattcaccatcagcctggacaacgccaagaacaccctgtacctccagatgaacacactgaagcccgaggacaccgccatgtactactgtgctgctgcccctggctgtctgctgtctgcacttagaagcgccgactacagaaactggggccagggaacccaagtgacagtgtctagtggtaccggcggaggcggatctggcggcggaggtagcggtggcggaggatctgaattcgacatcgtgatgacacagagccctgatagcctggccgtgtctctgggagagagagccaccattaactgcaaggccagccagagcgtggactacgacggcgacagcttcctgaactggtatcagcagaagcccggccagcctcctaagctgctgatctacgccgccagcaatctggaaagcggcgtgccaagcagattttccggctctggcagcggcaccgatttcaccctgacaatatccagcctccagcctgaggacgtggccgtgtactactgccagcagagcaacgacgaccctctgacctttggacagggcaccaaggtggaaatcaaactcgaggacctgaagaacgtgttcccacctgaggtggccgtgttcgagcctagcgaggccgagatcagccacacccagaaagccaccctcgtgtgcctggctaccggcttctaccccgaccatgtggaactgtcttggtgggtcaacggcaaagaggtgcacagcggcgtgtgtaccgacccccagccactgaaagaacagcccgccctgaacgacagccggtactgcctgagcagcagactgagagtgtccgccaccttctggcagaacccccggaaccacttcagatgccaggtgcagttctacggcctgagcgagaacgacgagtggacccaggacagagccaagcccgtgacccagatcgtgtctgccgaagcctggggcagagccgattgcggctttaccagcgagagctaccagcagggcgtgctgagcgccaccatcctgtacgagatcctgctgggcaaggccaccctgtacgccgtgctggtgtctgccctggtgctgatggctatggtcaagcggaaggacagccggggaagggccaagcgatctggatctggagcaacaaacttctcactactcaaacaagcaggtgacgtggaggagaatcccgggcctactagtgccaccatggactggatttggcgcatccttttccttgtcggcgctgctaccggcgcccattccgggcccgaagtgcaactggttgaatccggtggcggcctggtgcaagcaggcggatctctcagacttagctgtgccgcctccggcagaaccttcacaatgggatggtttaggcaggctccagggaaagagagagagttcgtcgccgccatctctctgtctcccacactggcctactacgccgactctgtgaaaggccggttcaccatctccagagataatgccaagaacaccgtggtgctgcaaatgaactctctgaaacccgaggatacagccctgtactattgtgccgctgaccggaagtccgtgatgagcatcagacccgattactggggacagggcacacaagtcacagtgtcctctggatccggcggcggaggatctggcggaggcggatctgggggcggaggctctttcgaacaagttcagctggttcagagcggagccgaagtgaagaaacctggggcctctgtgaaggtgtcctgcaaagccagcggctacacctttaccagctactggatcaactgggtccgacaggcccctggacaaggactggaatggatgggacagatccttccaggcggaggggacaccaactacaacggcaagttcaagggcagagtgaccatcaccgccgacaccagcacaagcaccgcctacatggaactgagcagcctgagaagcgaggacaccgccgtgtattattgcaccagacgggtgcccatccggctggattattggggacagggaaccctggtcaccgtgtctagtacgcgtatccagaaccctgatcctgccgtgtaccagctgcgggatagcaagagcagcgacaagagcgtgtgtctgttcaccgacttcgacagccagaccaacgtgtcccagagcaaggactccgacgtgtacatcaccgataagtgcgtgctggacatgcggagcatggacttcaagagcaactccgccgtggcctggtccaacaagtccgatttcgcctgcgccaacgccttcaacaacagcattatccccgaggacacattcttcccaagccccgagagcagctgcgacgtgaagctggtggaaaagagcttcgagacagacaccaacctgaacttccagaacctgagcgtgatcggcttcagaatcctgctgctgaaagtggccggctttaacctgctgatgaccctgcggctgtggtccagctaa

SEQ ID NO: 38241 - DNA, 2304 bp, synthetic construct
  source 1..2304: mol_type = other DNA
atggccttaccagtgaccgccttgctcctgccgctggccttgctgctccacgccgccaggccgcaggtgcagctggttgaatctggcggaggatctgttcaggctggcggctctctgagactgtcttgtggcgcttccggcaacatcagcagcagaaactgcatgggctggttcagacaggcccctggcaaagagagagaaggcgttgccgccatcggacaagtgaccggcagatcctactacgtggacagcgtgaagggcagattcaccatcagcctggacaacgccaagaacaccctgtacctccagatgaacacactgaagcccgaggacaccgccatgtactactgtgctgctgcccctggctgtctgctgtctgcacttagaagcgccgactacagaaactggggccagggaacccaagtgacagtgtctagtggtaccggcggaggcggatctggcggcggaggtagcggtggcggaggatctgaattcgacatcgtgatgacacagagccctgatagcctggccgtgtctctgggagagagagccaccattaactgcaaggccagccagagcgtggactacgacggcgacagcttcctgaactggtatcagcagaagcccggccagcctcctaagctgctgatctacgccgccagcaatctggaaagcggcgtgccaagcagattttccggctctggcagcggcaccgatttcaccctgacaatatccagcctccagcctgaggacgtggccgtgtactactgccagcagagcaacgacgaccctctgacctttggacagggcaccaaggtggaaatcaaactcgaggacctgaagaacgtgttcccacctgaggtggccgtgttcgagcctagcgaggccgagatcagccacacccagaaagccaccctcgtgtgcctggctaccggcttctaccccgaccatgtggaactgtcttggtgggtcaacggcaaagaggtgcacagcggcgtgtgtaccgacccccagccactgaaagaacagcccgccctgaacgacagccggtactgcctgagcagcagactgagagtgtccgccaccttctggcagaacccccggaaccacttcagatgccaggtgcagttctacggcctgagcgagaacgacgagtggacccaggacagagccaagcccgtgacccagatcgtgtctgccgaagcctggggcagagccgattgcggctttaccagcgagagctaccagcagggcgtgctgagcgccaccatcctgtacgagatcctgctgggcaaggccaccctgtacgccgtgctggtgtctgccctggtgctgatggctatggtcaagcggaaggacagccggggaagggccaagcgatctggatctggagcaacaaacttctcactactcaaacaagcaggtgacgtggaggagaatcccgggcctactagtgccaccatggactggatttggcgcatccttttccttgtcggcgctgctaccggcgcccattccttcgaacaagttcagctggttcagagcggagccgaagtgaagaaacctggggcctctgtgaaggtgtcctgcaaagccagcggctacacctttaccagctactggatcaactgggtccgacaggcccctggacaaggactggaatggatgggacagatccttccaggcggaggggacaccaactacaacggcaagttcaagggcagagtgaccatcaccgccgacaccagcacaagcaccgcctacatggaactgagcagcctgagaagcgaggacaccgccgtgtattattgcaccagacgggtgcccatccggctggattattggggacagggaaccctggtcaccgtgtctagtacgcgtatccagaaccctgatcctgccgtgtaccagctgcgggatagcaagagcagcgacaagagcgtgtgtctgttcaccgacttcgacagccagaccaacgtgtcccagagcaaggactccgacgtgtacatcaccgataagtgcgtgctggacatgcggagcatggacttcaagagcaactccgccgtggcctggtccaacaagtccgatttcgcctgcgccaacgccttcaacaacagcattatccccgaggacacattcttcccaagccccgagagcagctgcgacgtgaagctggtggaaaagagcttcgagacagacaccaacctgaacttccagaacctgagcgtgatcggcttcagaatcctgctgctgaaagtggccggctttaacctgctgatgaccctgcggctgtggtccagctaa

SEQ ID NO: 38242 - DNA, 2304 bp, synthetic construct
  source 1..2304: mol_type = other DNA
atggccttaccagtgaccgccttgctcctgccgctggccttgctgctccacgccgccaggccgcaagttcagctggtggaaagcggtggtggcgttgtgcaacctggtggaagtctgaggctgagctgtgccgcttctggcctgagctttagcacctacactgtggcctggttcaggcaggctcccggaaagggtcttgaaggcgtggccgccattccttacaccagccagcacatggtgtacacagacagcgtcagaggccggttcaccatcagcagagacaactccaagaatacgctctatctccagatgaactctctgcgcgccgaagatacagccgtgtattactgcgccaccgacagacggcctggcacctctatgctggctatcaacggctacaacagatggggacagggaaccaccgtgaccgtgtcatctggtaccggcggaggcggatctggcggcggaggtagcggtggcggaggatctgaattcgacatcgtgatgacacagagccctgatagcctggccgtgtctctgggagagagagccaccattaactgcaaggccagccagagcgtggactacgacggcgacagcttcctgaactggtatcagcagaagcccggccagcctcctaagctgctgatctacgccgccagcaatctggaaagcggcgtgccaagcagattttccggctctggcagcggcaccgatttcaccctgacaatatccagcctccagcctgaggacgtggccgtgtactactgccagcagagcaacgacgaccctctgacctttggacagggcaccaaggtggaaatcaaactcgaggacctgaagaacgtgttcccacctgaggtggccgtgttcgagcctagcgaggccgagatcagccacacccagaaagccaccctcgtgtgcctggctaccggcttctaccccgaccatgtggaactgtcttggtgggtcaacggcaaagaggtgcacagcggcgtgtgtaccgacccccagccactgaaagaacagcccgccctgaacgacagccggtactgcctgagcagcagactgagagtgtccgccaccttctggcagaacccccggaaccacttcagatgccaggtgcagttctacggcctgagcgagaacgacgagtggacccaggacagagccaagcccgtgacccagatcgtgtctgccgaagcctggggcagagccgattgcggctttaccagcgagagctaccagcagggcgtgctgagcgccaccatcctgtacgagatcctgctgggcaaggccaccctgtacgccgtgctggtgtctgccctggtgctgatggctatggtcaagcggaaggacagccggggaagggccaagcgatctggatctggagcaacaaacttctcactactcaaacaagcaggtgacgtggaggagaatcccgggcctactagtgccaccatggactggatttggcgcatccttttccttgtcggcgctgctaccggcgcccattccttcgaacaagttcagctggttcagagcggagccgaagtgaagaaacctggggcctctgtgaaggtgtcctgcaaagccagcggctacacctttaccagctactggatcaactgggtccgacaggcccctggacaaggactggaatggatgggacagatccttccaggcggaggggacaccaactacaacggcaagttcaagggcagagtgaccatcaccgccgacaccagcacaagcaccgcctacatggaactgagcagcctgagaagcgaggacaccgccgtgtattattgcaccagacgggtgcccatccggctggattattggggacagggaaccctggtcaccgtgtctagtacgcgtatccagaaccctgatcctgccgtgtaccagctgcgggatagcaagagcagcgacaagagcgtgtgtctgttcaccgacttcgacagccagaccaacgtgtcccagagcaaggactccgacgtgtacatcaccgataagtgcgtgctggacatgcggagcatggacttcaagagcaactccgccgtggcctggtccaacaagtccgatttcgcctgcgccaacgccttcaacaacagcattatccccgaggacacattcttcccaagccccgagagcagctgcgacgtgaagctggtggaaaagagcttcgagacagacaccaacctgaacttccagaacctgagcgtgatcggcttcagaatcctgctgctgaaagtggccggctttaacctgctgatgaccctgcggctgtggtccagctaa

SEQ ID NO: 38243 - DNA, 2301 bp, synthetic construct
  source 1..2301: mol_type = other DNA
atggccttaccagtgaccgccttgctcctgccgctggccttgctgctccacgccgccaggccggacatcgtgatgacacagagccctgatagcctggccgtgtctctgggagagagagccaccattaactgcaaggccagccagagcgtggactacgacggcgacagcttcctgaactggtatcagcagaagcccggccagcctcctaagctgctgatctacgccgccagcaatctggaaagcggcgtgccaagcagattttccggctctggcagcggcaccgatttcaccctgacaatatccagcctccagcctgaggacgtggccgtgtactactgccagcagagcaacgacgaccctctgacctttggacagggcaccaaggtggaaatcaaactcgaggacctgaagaacgtgttcccacctgaggtggccgtgttcgagcctagcgaggccgagatcagccacacccagaaagccaccctcgtgtgcctggctaccggcttctaccccgaccatgtggaactgtcttggtgggtcaacggcaaagaggtgcacagcggcgtgtgtaccgacccccagccactgaaagaacagcccgccctgaacgacagccggtactgcctgagcagcagactgagagtgtccgccaccttctggcagaacccccggaaccacttcagatgccaggtgcagttctacggcctgagcgagaacgacgagtggacccaggacagagccaagcccgtgacccagatcgtgtctgccgaagcctggggcagagccgattgcggctttaccagcgagagctaccagcagggcgtgctgagcgccaccatcctgtacgagatcctgctgggcaaggccaccctgtacgccgtgctggtgtctgccctggtgctgatggctatggtcaagcggaaggacagccggggaagggccaagcgatctggatctggagcaacaaacttctcactactcaaacaagcaggtgacgtggaggagaatcccgggcctactagtaccatggactggatttggcgcatccttttccttgtcggcgctgctaccggcgcccattccgggccccaagttcagctggtggaaagcggtggtggcgttgtgcaacctggtggaagtctgaggctgagctgtgccgcttctggcctgagctttagcacctacactgtggcctggttcaggcaggctcccggaaagggtcttgaaggcgtggccgccattccttacaccagccagcacatggtgtacacagacagcgtcagaggccggttcaccatcagcagagacaactccaagaatacgctctatctccagatgaactctctgcgcgccgaagatacagccgtgtattactgcgccaccgacagacggcctggcacctctatgctggctatcaacggctacaacagatggggacagggaaccaccgtgaccgtgtcatctggatccggcggcggaggatctggcggaggcggatctgggggcggaggctctttcgaacaagttcagctggttcagagcggagccgaagtgaagaaacctggggcctctgtgaaggtgtcctgcaaagccagcggctacacctttaccagctactggatcaactgggtccgacaggcccctggacaaggactggaatggatgggacagatccttccaggcggaggggacaccaactacaacggcaagttcaagggcagagtgaccatcaccgccgacaccagcacaagcaccgcctacatggaactgagcagcctgagaagcgaggacaccgccgtgtattattgcaccagacgggtgcccatccggctggattattggggacagggaaccctggtcaccgtgtctagtacgcgtatccagaaccctgatcctgccgtgtaccagctgcgggatagcaagagcagcgacaagagcgtgtgtctgttcaccgacttcgacagccagaccaacgtgtcccagagcaaggactccgacgtgtacatcaccgataagtgcgtgctggacatgcggagcatggacttcaagagcaactccgccgtggcctggtccaacaagtccgatttcgcctgcgccaacgccttcaacaacagcattatccccgaggacacattcttcccaagccccgagagcagctgcgacgtgaagctggtggaaaagagcttcgagacagacaccaacctgaacttccagaacctgagcgtgatcggcttcagaatcctgctgctgaaagtggccggctttaacctgctgatgaccctgcggctgtggtccagctaa

SEQ ID NO: 38244 - DNA, 2307 bp, synthetic construct
  source 1..2307: mol_type = other DNA
atggccttaccagtgaccgccttgctcctgccgctggccttgctgctccacgccgccaggccggacatcgtgatgacacagagccctgatagcctggccgtgtctctgggagagagagccaccattaactgcaaggccagccagagcgtggactacgacggcgacagcttcctgaactggtatcagcagaagcccggccagcctcctaagctgctgatctacgccgccagcaatctggaaagcggcgtgccaagcagattttccggctctggcagcggcaccgatttcaccctgacaatatccagcctccagcctgaggacgtggccgtgtactactgccagcagagcaacgacgaccctctgacctttggacagggcaccaaggtggaaatcaaactcgaggacctgaagaacgtgttcccacctgaggtggccgtgttcgagcctagcgaggccgagatcagccacacccagaaagccaccctcgtgtgcctggctaccggcttctaccccgaccatgtggaactgtcttggtgggtcaacggcaaagaggtgcacagcggcgtgtgtaccgacccccagccactgaaagaacagcccgccctgaacgacagccggtactgcctgagcagcagactgagagtgtccgccaccttctggcagaacccccggaaccacttcagatgccaggtgcagttctacggcctgagcgagaacgacgagtggacccaggacagagccaagcccgtgacccagatcgtgtctgccgaagcctggggcagagccgattgcggctttaccagcgagagctaccagcagggcgtgctgagcgccaccatcctgtacgagatcctgctgggcaaggccaccctgtacgccgtgctggtgtctgccctggtgctgatggctatggtcaagcggaaggacagccggggaagggccaagcgatctggatctggagcaacaaacttctcactactcaaacaagcaggtgacgtggaggagaatcccgggcctactagtaccatggactggatttggcgcatccttttccttgtcggcgctgctaccggcgcccattccgggcccgaggtgcagctggttgaatctggcggaggatctgttcaggctggcggctctctgagactgtcttgtgccgccagcggctacacctacagcatcaactgcatgggctggttcagacaggcccctggcaaagagagagaaggcgttgccgccatctctaccggcggaggcagaaccgattaccgggattctgtgaagggcagattcaccatcagccaggacaacgccaagaacaccgtgtacctccagatgaacagcctgaagcctgaggacaccgccatgtactactgtgccggcaagaccacctatcctggctacggatgtggcctgggcagaagcgcctacaattattggggccagggcacccaagtgaccgtgtcatctggatccggcggcggaggatctggcggaggcggatctgggggcggaggctctttcgaacaagttcagctggttcagagcggagccgaagtgaagaaacctggggcctctgtgaaggtgtcctgcaaagccagcggctacacctttaccagctactggatcaactgggtccgacaggcccctggacaaggactggaatggatgggacagatccttccaggcggaggggacaccaactacaacggcaagttcaagggcagagtgaccatcaccgccgacaccagcacaagcaccgcctacatggaactgagcagcctgagaagcgaggacaccgccgtgtattattgcaccagacgggtgcccatccggctggattattggggacagggaaccctggtcaccgtgtctagtacgcgtatccagaaccctgatcctgccgtgtaccagctgcgggatagcaagagcagcgacaagagcgtgtgtctgttcaccgacttcgacagccagaccaacgtgtcccagagcaaggactccgacgtgtacatcaccgataagtgcgtgctggacatgcggagcatggacttcaagagcaactccgccgtggcctggtccaacaagtccgatttcgcctgcgccaacgccttcaacaacagcattatccccgaggacacattcttcccaagccccgagagcagctgcgacgtgaagctggtggaaaagagcttcgagacagacaccaacctgaacttccagaacctgagcgtgatcggcttcagaatcctgctgctgaaagtggccggctttaacctgctgatgaccctgcggctgtggtccagctaa

SEQ ID NO: 38245 - DNA, 1863 bp, synthetic construct
  source 1..1863: mol_type = other DNA
atggccttaccagtgaccgccttgctcctgccgctggccttgctgctccacgccgccaggccggacatcgtgatgacacagagccctgatagcctggccgtgtctctgggagagagagccaccattaactgcaaggccagccagagcgtggactacgacggcgacagcttcctgaactggtatcagcagaagcccggccagcctcctaagctgctgatctacgccgccagcaatctggaaagcggcgtgccaagcagattttccggctctggcagcggcaccgatttcaccctgacaatatccagcctccagcctgaggacgtggccgtgtactactgccagcagagcaacgacgaccctctgacctttggacagggcaccaaggtggaaatcaaactcgaggacctgaagcacgtgttcccacctgaggtggccgtgttcgagcctagcgacgccgagatctggcacacccagaaagccaccctcgtgtgcctggctaccggcttctaccccgaccatgtggaactgtcttggtgggtcaacggcaaagaggtgcacagcggcgtgtctaccgacccccagccactgaaagaacagcccgccctgaacgacagccggtactgcctgagcagcagactgagagtgtccgccaccttctggcagaacccccggaaccacttcagatgccaggtgcagttctacggcctgagcgagaacgacgagtggacccaggacagagccaagcccgtgacccagatcgtgtctgccgaagcctggggcagagccgattgcggctttaccagcgagagctaccagcagggcgtgctgagcgccaccatcctgtacgagatcctgctgggcaaggccaccctgtacgccgtgctggtgtctgccctggtgctgatggctatggtcaagcggaaggacagccggggaagggccaagcgatctggatctggagcaacaaacttctcactactcaaacaagcaggtgacgtggaggagaatcccgggcctactagtatggactggatttggcgcatccttttccttgtcggcgctgctaccggcgcgcattccttcgaacaagttcagctggttcagagcggagccgaagtgaagaaacctggggcctctgtgaaggtgtcctgcaaagccagcggctacacctttaccagctactggatcaactgggtccgacaggcccctggacaaggactggaatggatgggacagatccttccaggcggaggggacaccaactacaacggcaagttcaagggcagagtgaccatcaccgccgacaccagcacaagcaccgcctacatggaactgagcagcctgagaagcgaggacaccgccgtgtattattgcaccagacgggtgcccatccggctggattattggggacagggaaccctggtcaccgtgtctagtacgcgtatccagaaccctgatcctgccgtgtaccagctgcgggatagcaagagcagcgacaagagcgtgtgtctgttcaccgacttcgacagccagaccaacgtgtcccagagcaaggactccgacgtgtacatcaccgataagaccgtgctggacatgcggagcatggacttcaagagcaactccgccgtggcctggtccagcaagtccgatttcgcctgcgccaacgccttcaacaacagcattatccccgaggacacattcttcccaagccccgagatggcctgcgacgtgaagctggtggaaaagagcttcgagacagacaccaacctgaacttccagaacctgctcgtgatctggctgagaatcctgctgctgaaagtggccggctttaacctgctgatgaccctgcggctgtggtccagc

SEQ ID NO: 38246 - DNA, 1863 bp, synthetic construct
  source 1..1863: mol_type = other DNA
atggccttaccagtgaccgccttgctcctgccgctggccttgctgctccacgccgccaggccggacatcgtgatgacacagagccctgatagcctggccgtgtctctgggagagagagccaccattaactgcaaggccagccagagcgtggactacgacggcgacagcttcctgaactggtatcagcagaagcccggccagcctcctaagctgctgatctacgccgccagcaatctggaaagcggcgtgccaagcagattttccggctctggcagcggcaccgatttcaccctgacaatatccagcctccagcctgaggacgtggccgtgtactactgccagcagagcaacgacgaccctctgacctttggacagggcaccaaggtggaaatcaaactcgaggacctgaagcacgtgttcccacctgaggtggccgtgttcgagcctagcgacgccgagatctggcacacccagaaagccaccctcgtgtgcctggctaccggcttctaccccgaccatgtggaactgtcttggtgggtcaacggcaaagaggtgcacagcggcgtgtctaccgacccccagccactgaaagaacagcccgccctgaacgacagccggtactgcctgagcagcagactgagagtgtccgccaccttctggcagaacccccggaaccacttcagatgccaggtgcagttctacggcctgagcgagaacgacgagtggacccaggacagagccaagcccgtgacccagatcgtgtctgccgaagcctggggcagagccgattgcggctttaccagcgagagctaccagcagggcgtgctgagcgccaccatcctgtacgagatcctgctgggcaaggccaccctgtacgccgtgctggtgtctgccctggtgctgatggctatggtcaagcggaaggacagccggggaagggccaagcgatctggatctggagcaacaaacttctcactactcaaacaagcaggtgacgtggaggagaatcccgggcctactagtatggactggatttggcgcatccttttccttgtcggcgctgctaccggcgcgcattccttcgaacaagttcagctggttcagagcggagccgaagtgaagaaacctggggcctctgtgaaggtgtcctgcaaagccagcggctacacctttaccagctactggatcaactgggtccgacaggcccctggacaaggactggaatggatgggacagatccttccaggcggaggggacaccaactacaacggcaagttcaagggcagagtgaccatcaccgccgacaccagcacaagcaccgcctacatggaactgagcagcctgagaagcgaggacaccgccgtgtattattgcaccagacgggtgcccatccggctggattattggggacagggaaccctggtcaccgtgtctagtacgcgtatccagaaccctgatcctgccgtgtaccagctgcgggatagcaagagcagcgacaagagcgtgtgtctgttcaccgacttcgacagccagaccaacgtgtcccagagcaaggactccgacgtgtacatcaccgataagaccgtgctggacatgcggagcatggacttcaagagcaactccgccgtggcctggtccaccaagtccgatttcgcctgcgccaacgccttcaacaacagcattatccccgaggacacattcttcccaagccccgaggtggtgtgcgacgtgaagctggtggaaaagagcttcgagacagacaccaacctgaacttccagaacctggtggtgatcggcgccagaatcctgctgctgaaagtggccggctttaacctgctgatgaccctgcggctgtggtccagc

SEQ ID NO: 38247 - DNA, 1863 bp, synthetic construct
  source 1..1863: mol_type = other DNA
atggccttaccagtgaccgccttgctcctgccgctggccttgctgctccacgccgccaggccggacatcgtgatgacacagagccctgatagcctggccgtgtctctgggagagagagccaccattaactgcaaggccagccagagcgtggactacgacggcgacagcttcctgaactggtatcagcagaagcccggccagcctcctaagctgctgatctacgccgccagcaatctggaaagcggcgtgccaagcagattttccggctctggcagcggcaccgatttcaccctgacaatatccagcctccagcctgaggacgtggccgtgtactactgccagcagagcaacgacgaccctctgacctttggacagggcaccaaggtggaaatcaaactcgaggacctgaagaacgtgttcccacctgaggtggccgtgttcgagcctagcaaggccgagatcagcagaacccagaaagccaccctcgtgtgcctggctaccggcttctaccctcctcatgtggaactgtcttggtgggtcaacggcaaagaggtgcacgacggcgtgtgtaccgacccccagccactgaaagaacagcccgccctgaacgacagccggtactgcctgagcagcagactgagagtgtccgccaccttctggcagaacccccggaaccacttcagatgccaggtgcagttctacggcctgagcgagaacgacgagtggacccaggacagagccaagcccgtgacccagatcgtgtctgccgaagcctggggcagagccgattgcggctttaccagcgagagctaccagcagggcgtgctgagcgccaccatcctgtacgagatcctgctgggcaaggccaccctgtacgccgtgctggtgtctgccctggtgctgatggctatggtcaagcggaaggacagccggggaagggccaagcgatctggatctggagcaacaaacttctcactactcaaacaagcaggtgacgtggaggagaatcccgggcctactagtatggactggatttggcgcatccttttccttgtcggcgctgctaccggcgcgcattccttcgaacaagttcagctggttcagagcggagccgaagtgaagaaacctggggcctctgtgaaggtgtcctgcaaagccagcggctacacctttaccagctactggatcaactgggtccgacaggcccctggacaaggactggaatggatgggacagatccttccaggcggaggggacaccaactacaacggcaagttcaagggcagagtgaccatcaccgccgacaccagcacaagcaccgcctacatggaactgagcagcctgagaagcgaggacaccgccgtgtattattgcaccagacgggtgcccatccggctggattattggggacagggaaccctggtcaccgtgtctagtacgcgtatccagaaccctgatcctgccgtgtaccagctgcgggatagcaagagcagcgacaagttcgtgtgtctgttcaccgacttcgacagccagatcaacgtgtcccagagcaaggactccgacgtgtacatcaccgataagtgcgtgctggacatgcggagcatggacttcaagagcaactccgccgtggcctggtccaacaagtccgatttcacctgcgccaacgccttcaacaacagcattatccccgaggacacattcttcccaagccccgagagcagctgcgacgtgaagctggtggaaaagagcttcgagacagacaccaacctgaacttccagaacctgagcgtgatcggcttcagaatcctgctgctgaaagtggccggctttaacctgctgatgaccctgcggctgtggtccagc

SEQ ID NO: 38248 - DNA, 2289 bp, synthetic construct
  source 1..2289: mol_type = other DNA
atggccttaccagtgaccgccttgctcctgccgctggccttgctgctccacgccgccaggccggacatcgtgatgacacagagccctgatagcctggccgtgtctctgggagagagagccaccattaactgcaaggccagccagagcgtggactacgacggcgacagcttcctgaactggtatcagcagaagcccggccagcctcctaagctgctgatctacgccgccagcaatctggaaagcggcgtgccaagcagattttccggctctggcagcggcaccgatttcaccctgacaatatccagcctccagcctgaggacgtggccgtgtactactgccagcagagcaacgacgaccctctgacctttggacagggcaccaaggtggaaatcaaactcgaggacctgaagaacgtgttcccacctgaggtggccgtgttcgagcctagcgaggccgagatcagccacacccagaaagccaccctcgtgtgcctggctaccggcttctaccccgaccatgtggaactgtcttggtgggtcaacggcaaagaggtgcacagcggcgtgtgtaccgacccccagccactgaaagaacagcccgccctgaacgacagccggtactgcctgagcagcagactgagagtgtccgccaccttctggcagaacccccggaaccacttcagatgccaggtgcagttctacggcctgagcgagaacgacgagtggacccaggacagagccaagcccgtgacccagatcgtgtctgccgaagcctggggcagagccgattgcggctttaccagcgagagctaccagcagggcgtgctgagcgccaccatcctgtacgagatcctgctgggcaaggccaccctgtacgccgtgctggtgtctgccctggtgctgatggctatggtcaagcggaaggacagccggggaagggccaagcgatctggatctggagcaacaaacttctcactactcaaacaagcaggtgacgtggaggagaatcccgggcctactagtaccatggactggatttggcgcatccttttccttgtcggcgctgctaccggcgcccattccgggccccaggtgcagctccaagaaagcggacccggactggttaagccctctcagaccctgtctctgacctgcacagttagcggagccagcattaccacaggcgagtattattggaattggtttcggcagccaccaggcaaggggcttgagtggatgggtgctattgctgcctctggcagcaccacctactctcccagctttgagagcagaacctccatcagccgggacacctccaaaaaccagttctctctgaagctgtcctccgtgaccgctgctgacaccgccgtctattattgtggccggtctttcggcgtggcagctgtgaccacaggacagaacagaggccagggaacacttgtgaccgtgtcctctggatccggcggcggaggatctggcggaggcggatctgggggcggaggctctttcgaacaagttcagctggttcagagcggagccgaagtgaagaaacctggggcctctgtgaaggtgtcctgcaaagccagcggctacacctttaccagctactggatcaactgggtccgacaggcccctggacaaggactggaatggatgggacagatccttccaggcggaggggacaccaactacaacggcaagttcaagggcagagtgaccatcaccgccgacaccagcacaagcaccgcctacatggaactgagcagcctgagaagcgaggacaccgccgtgtattattgcaccagacgggtgcccatccggctggattattggggacagggaaccctggtcaccgtgtctagtacgcgtatccagaaccctgatcctgccgtgtaccagctgcgggatagcaagagcagcgacaagagcgtgtgtctgttcaccgacttcgacagccagaccaacgtgtcccagagcaaggactccgacgtgtacatcaccgataagtgcgtgctggacatgcggagcatggacttcaagagcaactccgccgtggcctggtccaacaagtccgatttcgcctgcgccaacgccttcaacaacagcattatccccgaggacacattcttcccaagccccgagagcagctgcgacgtgaagctggtggaaaagagcttcgagacagacaccaacctgaacttccagaacctgagcgtgatcggcttcagaatcctgctgctgaaagtggccggctttaacctgctgatgaccctgcggctgtggtccagc

SEQ ID NO: 38249 - DNA, 2712 bp, synthetic construct
  source 1..2712: mol_type = other DNA
atggccttaccagtgaccgccttgctcctgccgctggccttgctgctccacgccgccaggccgcaggttcagctgcaagagtctggccctggcctggtcaagcctagccaaacactgagcctgacctgtaccgtgtctggcggctctatcaccaccggcgagttctactggaactggttcagacagcctcctggcaaaggactggaatggatgggagccattgccgccagcggcagcacaacatacagccctagcttcgagagccggaccagcatcagcagagacaccagcaagaatcagttcagcctgaagctgagcagcgtgacagccgccgatacagccgtgtattactgcggcagatcctttggagtggccgccgtgacaaccggccagaatagaggacagggcaccctggtcacagtgtctagcggtaccggcggaggcggatctggcggcggaggtagcggtggcggaggatctgaattcgacatcgtgatgacacagagccctgatagcctggccgtgtctctgggagagagagccaccattaactgcaaggccagccagagcgtggactacgacggcgacagcttcctgaactggtatcagcagaagcccggccagcctcctaagctgctgatctacgccgccagcaatctggaaagcggcgtgccaagcagattttccggctctggcagcggcaccgatttcaccctgacaatatccagcctccagcctgaggacgtggccgtgtactactgccagcagagcaacgacgaccctctgacctttggacagggcaccaaggtggaaatcaaactcgagatccagaaccctgatcctgccgtgtaccagctgcgggatagcaagagcagcgacaagagcgtgtgtctgttcaccgacttcgacagccagaccaacgtgtcccagagcaaggactccgacgtgtacatcaccgataagtgcgtgctggacatgcggagcatggacttcaagagcaactccgccgtggcctggtccaacaagtccgatttcgcctgcgccaacgccttcaacaacagcattatccccgaggacacattcttcccaagcagcgacgtgccctgcgacgtgaagctggtggaaaagagcttcgagacagacaccaacctgaacttccagaacctgagcgtgatcggcttcagaatcctgctgctgaaagtggccggctttaacctgctgatgaccctgcggctgtggtccagccgcgccaagagaagcggatctggcgtgaagcagaccctgaatttcgacctgctgaagctggctggcgacgtggaatccaacccaggccctactagtaccatggactggatttggcgcatccttttccttgtcggcgctgctaccggcgcccattccgggcccgaagtgcaactggttgaatccggtggcggcctggtgcaacccggcggatctctcagacttagctgtgccgcctccggcagaaccttcacaatgggatggtacaggcaggctccagggaaagagagagagttcgtcgccgccatctctctgtctcccacactggcctactacgccgactctgtgaaaggccggttcaccatctccagagataatagcaagaacaccgtggtgctgcaaatgaactctctgagagccgaggatacagccctgtactattgtgccgctgaccggaagtccgtgatgagcatcagacccgattactggggacagggcacactggtcacagtgtctagtggatccggcggcggaggatctggcggaggcggatctgggggcggaggctctttcgaacaagttcagctggttcagagcggagccgaagtgaagaaacctggggcctctgtgaaggtgtcctgcaaagccagcggctacacctttaccagctactggatcaactgggtccgacaggcccctggacaaggactggaatggatgggacagatccttccaggcggaggggacaccaactacaacggcaagttcaagggcagagtgaccatcaccgccgacaccagcacaagcaccgcctacatggaactgagcagcctgagaagcgaggacaccgccgtgtattattgcaccagacgggtgcccatccggctggattattggggacagggaaccctggtcaccgtgtctagtacgcgtgaggacctgaagaacgtgttcccacctgaggtggccgtgttcgagcctagcaaggccgagatcgcccacacccagaaagccaccctcgtgtgcctggctaccggcttctaccccgaccatgtggaactgtcttggtgggtcaacggcaaagaggtgcacagcggcgtgtgtaccgacccccagccactgaaagaacagcccgccctgaacgacagccggtactgcctgagcagcagactgagagtgtccgccaccttctggcagaacccccggaaccacttcagatgccaggtgcagttctacggcctgagcgagaacgacgagtggacccaggacagagccaagcccgtgacccagatcgtgtctgccgaagcctggggcagagccgattgcggcatcaccagcgccagctaccaccagggcgtgctgagcgccaccatcctgtacgagatcctgctgggcaaggccaccctgtacgccgtgctggtgtctgccctggtgctgatggctatggtcaagcggaaggacagccgggga

SEQ ID NO: 38250 - DNA, 2301 bp, synthetic construct
  source 1..2301: mol_type = other DNA
atggccttaccagtgaccgccttgctcctgccgctggccttgctgctccacgccgccaggccgcaggttcagctgcaagagtctggccctggcctggtcaagcctagccaaacactgagcctgacctgtaccgtgtctggcggctctatcaccaccggcgagttctactggaactggttcagacagcctcctggcaaaggactggaatggatgggagccattgccgccagcggcagcacaacatacagccctagcttcgagagccggaccagcatcagcagagacaccagcaagaatcagttcagcctgaagctgagcagcgtgacagccgccgatacagccgtgtattactgcggcagatcctttggagtggccgccgtgacaaccggccagaatagaggacagggcaccctggtcacagtgtctagcggtaccggcggaggcggatctggcggcggaggtagcggtggcggaggatctgaattcgacatcgtgatgacacagagccctgatagcctggccgtgtctctgggagagagagccaccattaactgcaaggccagccagagcgtggactacgacggcgacagcttcctgaactggtatcagcagaagcccggccagcctcctaagctgctgatctacgccgccagcaatctggaaagcggcgtgccaagcagattttccggctctggcagcggcaccgatttcaccctgacaatatccagcctccagcctgaggacgtggccgtgtactactgccagcagagcaacgacgaccctctgacctttggacagggcaccaaggtggaaatcaaactcgagatccagaaccctgatcctgccgtgtaccagctgcgggatagcaagagcagcgacaagagcgtgtgtctgttcaccgacttcgacagccagaccaacgtgtcccagagcaaggactccgacgtgtacatcaccgataagtgcgtgctggacatgcggagcatggacttcaagagcaactccgccgtggcctggtccaacaagtccgatttcgcctgcgccaacgccttcaacaacagcattatccccgaggacacattcttcccaagcagcgacgtgccctgcgacgtgaagctggtggaaaagagcttcgagacagacaccaacctgaacttccagaacctgagcgtgatcggcttcagaatcctgctgctgaaagtggccggctttaacctgctgatgaccctgcggctgtggtccagccgcgccaagagaagcggatctggcgtgaagcagaccctgaatttcgacctgctgaagctggctggcgacgtggaatccaacccaggccctactagtaccatggactggatttggcgcatccttttccttgtcggcgctgctaccggcgcccattccttcgaacaagttcagctggttcagagcggagccgaagtgaagaaacctggggcctctgtgaaggtgtcctgcaaagccagcggctacacctttaccagctactggatcaactgggtccgacaggcccctggacaaggactggaatggatgggacagatccttccaggcggaggggacaccaactacaacggcaagttcaagggcagagtgaccatcaccgccgacaccagcacaagcaccgcctacatggaactgagcagcctgagaagcgaggacaccgccgtgtattattgcaccagacgggtgcccatccggctggattattggggacagggaaccctggtcaccgtgtctagtacgcgtgaggacctgaagaacgtgttcccacctgaggtggccgtgttcgagcctagcaaggccgagatcgcccacacccagaaagccaccctcgtgtgcctggctaccggcttctaccccgaccatgtggaactgtcttggtgggtcaacggcaaagaggtgcacagcggcgtgtgtaccgacccccagccactgaaagaacagcccgccctgaacgacagccggtactgcctgagcagcagactgagagtgtccgccaccttctggcagaacccccggaaccacttcagatgccaggtgcagttctacggcctgagcgagaacgacgagtggacccaggacagagccaagcccgtgacccagatcgtgtctgccgaagcctggggcagagccgattgcggcatcaccagcgccagctaccaccagggcgtgctgagcgccaccatcctgtacgagatcctgctgggcaaggccaccctgtacgccgtgctggtgtctgccctggtgctgatggctatggtcaagcggaaggacagccgggga

SEQ ID NO: 38251 - DNA, 2700 bp, synthetic construct
  source 1..2700: mol_type = other DNA
atggccttaccagtgaccgccttgctcctgccgctggccttgctgctccacgccgccaggccggaagtgcagctggttgaatctggcggaggactggttcaggctggcggatctctgagactgtcttgtgccgccagcggcagaacctttagcatgggctggtttagacaggcccctggcaaagagagagagttcgtcgccgccatcacatactctggcggcagcccttactacgccgactctgtgaagggcagattcaccatcagccgggacaacgccaagaacaccgtgtacctccagatgaacagcctgaagcctgaggacaccgccgtgtactactgcgccgccaatccaacatacggcagcgactggaacgccgagaattggggccagggaacccaagtgacagtgtctagcggtaccggcggaggcggatctggcggcggaggtagcggtggcggaggatctgaattcgacatcgtgatgacacagagccctgatagcctggccgtgtctctgggagagagagccaccattaactgcaaggccagccagagcgtggactacgacggcgacagcttcctgaactggtatcagcagaagcccggccagcctcctaagctgctgatctacgccgccagcaatctggaaagcggcgtgccaagcagattttccggctctggcagcggcaccgatttcaccctgacaatatccagcctccagcctgaggacgtggccgtgtactactgccagcagagcaacgacgaccctctgacctttggacagggcaccaaggtggaaatcaaactcgaggacctgaagaacgtgttcccacctgaggtggccgtgttcgagcctagcgaggccgagatcagccacacccagaaagccaccctcgtgtgcctggctaccggcttctaccccgaccatgtggaactgtcttggtgggtcaacggcaaagaggtgcacagcggcgtgtgtaccgacccccagccactgaaagaacagcccgccctgaacgacagccggtactgcctgagcagcagactgagagtgtccgccaccttctggcagaacccccggaaccacttcagatgccaggtgcagttctacggcctgagcgagaacgacgagtggacccaggacagagccaagcccgtgacccagatcgtgtctgccgaagcctggggcagagccgattgcggctttaccagcgagagctaccagcagggcgtgctgagcgccaccatcctgtacgagatcctgctgggcaaggccaccctgtacgccgtgctggtgtctgccctggtgctgatggctatggtcaagcggaaggacagccggggaagggccaagcgatctggatctggagcaacaaacttctcactactcaaacaagcaggtgacgtggaggagaatcccgggcctactagtaccatggactggatttggcgcatccttttccttgtcggcgctgctaccggcgcccattccgggccccaggtgcagctccaagaaagcggacccggactggttaagccctctcagaccctgtctctgacctgcacagttagcggagccagcattaccacaggcgagtattattggaattggtttcggcagccaccaggcaaggggcttgagtggatgggtgctattgctgcctctggcagcaccacctactctcccagctttgagagcagaacctccatcagccgggacacctccaaaaaccagttctctctgaagctgtcctccgtgaccgctgctgacaccgccgtctattattgtggccggtctttcggcgtggcagctgtgaccacaggacagaacagaggccagggaacacttgtgaccgtgtcctctggatccggcggcggaggatctggcggaggcggatctgggggcggaggctctttcgaacaagttcagctggttcagagcggagccgaagtgaagaaacctggggcctctgtgaaggtgtcctgcaaagccagcggctacacctttaccagctactggatcaactgggtccgacaggcccctggacaaggactggaatggatgggacagatccttccaggcggaggggacaccaactacaacggcaagttcaagggcagagtgaccatcaccgccgacaccagcacaagcaccgcctacatggaactgagcagcctgagaagcgaggacaccgccgtgtattattgcaccagacgggtgcccatccggctggattattggggacagggaaccctggtcaccgtgtctagtacgcgtatccagaaccctgatcctgccgtgtaccagctgcgggatagcaagagcagcgacaagagcgtgtgtctgttcaccgacttcgacagccagaccaacgtgtcccagagcaaggactccgacgtgtacatcaccgataagtgcgtgctggacatgcggagcatggacttcaagagcaactccgccgtggcctggtccaacaagtccgatttcgcctgcgccaacgccttcaacaacagcattatccccgaggacacattcttcccaagccccgagagcagctgcgacgtgaagctggtggaaaagagcttcgagacagacaccaacctgaacttccagaacctgagcgtgatcggcttcagaatcctgctgctgaaagtggccggctttaacctgctgatgaccctgcggctgtggtccagc

SEQ ID NO: 38252 - DNA, 2721 bp, synthetic construct
  source 1..2721: mol_type = other DNA
atggccttaccagtgaccgccttgctcctgccgctggccttgctgctccacgccgccaggccggaagtgcagctggttgaatctggcggaggactggttcaggctggcggatctctgagactgtcttgtgccgccagcggcagaacctttagcatgggctggtttagacaggcccctggcaaagagagagagttcgtcgccgccatcacatactctggcggcagcccttactacgccgactctgtgaagggcagattcaccatcagccgggacaacgccaagaacaccgtgtacctccagatgaacagcctgaagcctgaggacaccgccgtgtactactgcgccgccaatccaacatacggcagcgactggaacgccgagaattggggccagggaacccaagtgacagtgtctagcggtaccggcggaggcggatctggcggcggaggtagcggtggcggaggatctgaattcgacatcgtgatgacacagagccctgatagcctggccgtgtctctgggagagagagccaccattaactgcaaggccagccagagcgtggactacgacggcgacagcttcctgaactggtatcagcagaagcccggccagcctcctaagctgctgatctacgccgccagcaatctggaaagcggcgtgccaagcagattttccggctctggcagcggcaccgatttcaccctgacaatatccagcctccagcctgaggacgtggccgtgtactactgccagcagagcaacgacgaccctctgacctttggacagggcaccaaggtggaaatcaaactcgagatccagaaccctgatcctgccgtgtaccagctgcgggatagcaagagcagcgacaagagcgtgtgtctgttcaccgacttcgacagccagaccaacgtgtcccagagcaaggactccgacgtgtacatcaccgataagtgcgtgctggacatgcggagcatggacttcaagagcaactccgccgtggcctggtccaacaagtccgatttcgcctgcgccaacgccttcaacaacagcattatccccgaggacacattcttcccaagcagcgacgtgccctgcgacgtgaagctggtggaaaagagcttcgagacagacaccaacctgaacttccagaacctgagcgtgatcggcttcagaatcctgctgctgaaagtggccggctttaacctgctgatgaccctgcggctgtggtccagccgcgccaagagaagcggatctggcgtgaagcagaccctgaatttcgacctgctgaagctggctggcgacgtggaatccaacccaggccctactagtaccatggactggatttggcgcatccttttccttgtcggcgctgctaccggcgcccattccgggccccaggtgcagctggttgaatctggcggaggactggttcagcctggcggatctctgagactgtcttgtgccgccagcggcaacatcaacagcagaaactgcatgggctggttcagacaggcccctggcaagggaagagaaggcgtggcagctatcggccaagtgaccggcagaacctactacgtggacagcgtgaagggcagattcaccatcagcctggacaacagcaagaacaccctgtacctccagatgaacagcctgagagccgaggacaccgccgtgtactattgtgctgctgcccctggctgtctgctgtctgcacttagaagcgccgactacagaaactggggccagggcacactggtcaccgtttcttctggatccggcggcggaggatctggcggaggcggatctgggggcggaggctctttcgaacaagttcagctggttcagagcggagccgaagtgaagaaacctggggcctctgtgaaggtgtcctgcaaagccagcggctacacctttaccagctactggatcaactgggtccgacaggcccctggacaaggactggaatggatgggacagatccttccaggcggaggggacaccaactacaacggcaagttcaagggcagagtgaccatcaccgccgacaccagcacaagcaccgcctacatggaactgagcagcctgagaagcgaggacaccgccgtgtattattgcaccagacgggtgcccatccggctggattattggggacagggaaccctggtcaccgtgtctagtacgcgtgaggacctgaagaacgtgttcccacctgaggtggccgtgttcgagcctagcaaggccgagatcgcccacacccagaaagccaccctcgtgtgcctggctaccggcttctaccccgaccatgtggaactgtcttggtgggtcaacggcaaagaggtgcacagcggcgtgtgtaccgacccccagccactgaaagaacagcccgccctgaacgacagccggtactgcctgagcagcagactgagagtgtccgccaccttctggcagaacccccggaaccacttcagatgccaggtgcagttctacggcctgagcgagaacgacgagtggacccaggacagagccaagcccgtgacccagatcgtgtctgccgaagcctggggcagagccgattgcggcatcaccagcgccagctaccaccagggcgtgctgagcgccaccatcctgtacgagatcctgctgggcaaggccaccctgtacgccgtgctggtgtctgccctggtgctgatggctatggtcaagcggaaggacagccgggga

SEQ ID NO: 38253 - DNA, 2709 bp, synthetic construct
  source 1..2709: mol_type = other DNA
atggccttaccagtgaccgccttgctcctgccgctggccttgctgctccacgccgccaggccggaagtgcagctggttgaatctggcggaggactggttcaggctggcggatctctgagactgtcttgtgccgccagcggcagaacctttagcatgggctggtttagacaggcccctggcaaagagagagagttcgtcgccgccatcacatactctggcggcagcccttactacgccgactctgtgaagggcagattcaccatcagccgggacaacgccaagaacaccgtgtacctccagatgaacagcctgaagcctgaggacaccgccgtgtactactgcgccgccaatccaacatacggcagcgactggaacgccgagaattggggccagggaacccaagtgacagtgtctagcggtaccggcggaggcggatctggcggcggaggtagcggtggcggaggatctgaattcgacatcgtgatgacacagagccctgatagcctggccgtgtctctgggagagagagccaccattaactgcaaggccagccagagcgtggactacgacggcgacagcttcctgaactggtatcagcagaagcccggccagcctcctaagctgctgatctacgccgccagcaatctggaaagcggcgtgccaagcagattttccggctctggcagcggcaccgatttcaccctgacaatatccagcctccagcctgaggacgtggccgtgtactactgccagcagagcaacgacgaccctctgacctttggacagggcaccaaggtggaaatcaaactcgaggacctgaagaacgtgttcccacctgaggtggccgtgttcgagcctagcgaggccgagatcagccacacccagaaagccaccctcgtgtgcctggctaccggcttctaccccgaccatgtggaactgtcttggtgggtcaacggcaaagaggtgcacagcggcgtgtgtaccgacccccagccactgaaagaacagcccgccctgaacgacagccggtactgcctgagcagcagactgagagtgtccgccaccttctggcagaacccccggaaccacttcagatgccaggtgcagttctacggcctgagcgagaacgacgagtggacccaggacagagccaagcccgtgacccagatcgtgtctgccgaagcctggggcagagccgattgcggctttaccagcgagagctaccagcagggcgtgctgagcgccaccatcctgtacgagatcctgctgggcaaggccaccctgtacgccgtgctggtgtctgccctggtgctgatggctatggtcaagcggaaggacagccggggaagggccaagcgatctggatctggagcaacaaacttctcactactcaaacaagcaggtgacgtggaggagaatcccgggcctactagtaccatggactggatttggcgcatccttttccttgtcggcgctgctaccggcgcccattccgggccccaggtgcagctggttgaatctggcggaggactggttcagcctggcggatctctgagactgtcttgtgccgccagcggcaacatcaacagcagaaactgcatgggctggttcagacaggcccctggcaagggaagagaaggcgtggcagctatcggccaagtgaccggcagaacctactacgtggacagcgtgaagggcagattcaccatcagcctggacaacagcaagaacaccctgtacctccagatgaacagcctgagagccgaggacaccgccgtgtactattgtgctgctgcccctggctgtctgctgtctgcacttagaagcgccgactacagaaactggggccagggcacactggtcaccgtttcttctggatccggcggcggaggatctggcggaggcggatctgggggcggaggctctttcgaacaagttcagctggttcagagcggagccgaagtgaagaaacctggggcctctgtgaaggtgtcctgcaaagccagcggctacacctttaccagctactggatcaactgggtccgacaggcccctggacaaggactggaatggatgggacagatccttccaggcggaggggacaccaactacaacggcaagttcaagggcagagtgaccatcaccgccgacaccagcacaagcaccgcctacatggaactgagcagcctgagaagcgaggacaccgccgtgtattattgcaccagacgggtgcccatccggctggattattggggacagggaaccctggtcaccgtgtctagtacgcgtatccagaaccctgatcctgccgtgtaccagctgcgggatagcaagagcagcgacaagagcgtgtgtctgttcaccgacttcgacagccagaccaacgtgtcccagagcaaggactccgacgtgtacatcaccgataagtgcgtgctggacatgcggagcatggacttcaagagcaactccgccgtggcctggtccaacaagtccgatttcgcctgcgccaacgccttcaacaacagcattatccccgaggacacattcttcccaagccccgagagcagctgcgacgtgaagctggtggaaaagagcttcgagacagacaccaacctgaacttccagaacctgagcgtgatcggcttcagaatcctgctgctgaaagtggccggctttaacctgctgatgaccctgcggctgtggtccagc

SEQ ID NO: 38254 - DNA, 2709 bp, synthetic construct
  source 1..2709: mol_type = other DNA
atggccttaccagtgaccgccttgctcctgccgctggccttgctgctccacgccgccaggccggaagtgcaactggttgaatccggtggcggcctggtgcaagcaggcggatctctcagacttagctgtgccgcctccggcagaaccttcacaatgggatggtttaggcaggctccagggaaagagagagagttcgtcgccgccatctctctgtctcccacactggcctactacgccgactctgtgaaaggccggttcaccatctccagagataatgccaagaacaccgtggtgctgcaaatgaactctctgaaacccgaggatacagccctgtactattgtgccgctgaccggaagtccgtgatgagcatcagacccgattactggggacagggcacacaagtcacagtgtcctctggtaccggcggaggcggatctggcggcggaggtagcggtggcggaggatctgaattcgacatcgtgatgacacagagccctgatagcctggccgtgtctctgggagagagagccaccattaactgcaaggccagccagagcgtggactacgacggcgacagcttcctgaactggtatcagcagaagcccggccagcctcctaagctgctgatctacgccgccagcaatctggaaagcggcgtgccaagcagattttccggctctggcagcggcaccgatttcaccctgacaatatccagcctccagcctgaggacgtggccgtgtactactgccagcagagcaacgacgaccctctgacctttggacagggcaccaaggtggaaatcaaactcgaggacctgaagaacgtgttcccacctgaggtggccgtgttcgagcctagcgaggccgagatcagccacacccagaaagccaccctcgtgtgcctggctaccggcttctaccccgaccatgtggaactgtcttggtgggtcaacggcaaagaggtgcacagcggcgtgtgtaccgacccccagccactgaaagaacagcccgccctgaacgacagccggtactgcctgagcagcagactgagagtgtccgccaccttctggcagaacccccggaaccacttcagatgccaggtgcagttctacggcctgagcgagaacgacgagtggacccaggacagagccaagcccgtgacccagatcgtgtctgccgaagcctggggcagagccgattgcggctttaccagcgagagctaccagcagggcgtgctgagcgccaccatcctgtacgagatcctgctgggcaaggccaccctgtacgccgtgctggtgtctgccctggtgctgatggctatggtcaagcggaaggacagccggggaagggccaagcgatctggatctggagcaacaaacttctcactactcaaacaagcaggtgacgtggaggagaatcccgggcctactagtaccatggactggatttggcgcatccttttccttgtcggcgctgctaccggcgcccattccgggccccaggtgcagctggttgaatctggcggaggactggttcagcctggcggatctctgagactgtcttgtgccgccagcggcaacatcaacagcagaaactgcatgggctggttcagacaggcccctggcaagggaagagaaggcgtggcagctatcggccaagtgaccggcagaacctactacgtggacagcgtgaagggcagattcaccatcagcctggacaacagcaagaacaccctgtacctccagatgaacagcctgagagccgaggacaccgccgtgtactattgtgctgctgcccctggctgtctgctgtctgcacttagaagcgccgactacagaaactggggccagggcacactggtcaccgtttcttctggatccggcggcggaggatctggcggaggcggatctgggggcggaggctctttcgaacaagttcagctggttcagagcggagccgaagtgaagaaacctggggcctctgtgaaggtgtcctgcaaagccagcggctacacctttaccagctactggatcaactgggtccgacaggcccctggacaaggactggaatggatgggacagatccttccaggcggaggggacaccaactacaacggcaagttcaagggcagagtgaccatcaccgccgacaccagcacaagcaccgcctacatggaactgagcagcctgagaagcgaggacaccgccgtgtattattgcaccagacgggtgcccatccggctggattattggggacagggaaccctggtcaccgtgtctagtacgcgtatccagaaccctgatcctgccgtgtaccagctgcgggatagcaagagcagcgacaagagcgtgtgtctgttcaccgacttcgacagccagaccaacgtgtcccagagcaaggactccgacgtgtacatcaccgataagtgcgtgctggacatgcggagcatggacttcaagagcaactccgccgtggcctggtccaacaagtccgatttcgcctgcgccaacgccttcaacaacagcattatccccgaggacacattcttcccaagccccgagagcagctgcgacgtgaagctggtggaaaagagcttcgagacagacaccaacctgaacttccagaacctgagcgtgatcggcttcagaatcctgctgctgaaagtggccggctttaacctgctgatgaccctgcggctgtggtccagc

SEQ ID NO: 38255 - DNA, 2721 bp, synthetic construct
  source 1..2721: mol_type = other DNA
atggccttaccagtgaccgccttgctcctgccgctggccttgctgctccacgccgccaggccgcaggttcagctgcaagagtctggccctggcctggtcaagcctagccaaacactgagcctgacctgtaccgtgtctggcggctctatcaccaccggcgagttctactggaactggttcagacagcctcctggcaaaggactggaatggatgggagccattgccgccagcggcagcacaacatacagccctagcttcgagagccggaccagcatcagcagagacaccagcaagaatcagttcagcctgaagctgagcagcgtgacagccgccgatacagccgtgtattactgcggcagatcctttggagtggccgccgtgacaaccggccagaatagaggacagggcaccctggtcacagtgtctagcggtaccggcggaggcggatctggcggcggaggtagcggtggcggaggatctgaattcgacatcgtgatgacacagagccctgatagcctggccgtgtctctgggagagagagccaccattaactgcaaggccagccagagcgtggactacgacggcgacagcttcctgaactggtatcagcagaagcccggccagcctcctaagctgctgatctacgccgccagcaatctggaaagcggcgtgccaagcagattttccggctctggcagcggcaccgatttcaccctgacaatatccagcctccagcctgaggacgtggccgtgtactactgccagcagagcaacgacgaccctctgacctttggacagggcaccaaggtggaaatcaaactcgaggacctgaagaacgtgttcccacctgaggtggccgtgttcgagcctagcgaggccgagatcagccacacccagaaagccaccctcgtgtgcctggctaccggcttctaccccgaccatgtggaactgtcttggtgggtcaacggcaaagaggtgcacagcggcgtgtgtaccgacccccagccactgaaagaacagcccgccctgaacgacagccggtactgcctgagcagcagactgagagtgtccgccaccttctggcagaacccccggaaccacttcagatgccaggtgcagttctacggcctgagcgagaacgacgagtggacccaggacagagccaagcccgtgacccagatcgtgtctgccgaagcctggggcagagccgattgcggctttaccagcgagagctaccagcagggcgtgctgagcgccaccatcctgtacgagatcctgctgggcaaggccaccctgtacgccgtgctggtgtctgccctggtgctgatggctatggtcaagcggaaggacagccggggaagggccaagcgatctggatctggagcaacaaacttctcactactcaaacaagcaggtgacgtggaggagaatcccgggcctactagtaccatggactggatttggcgcatccttttccttgtcggcgctgctaccggcgcccattccgggccccaggtgcagctggttgaatctggcggaggactggttcagcctggcggatctctgagactgtcttgtgccgccagcggcaacatcaacagcagaaactgcatgggctggttcagacaggcccctggcaagggaagagaaggcgtggcagctatcggccaagtgaccggcagaacctactacgtggacagcgtgaagggcagattcaccatcagcctggacaacagcaagaacaccctgtacctccagatgaacagcctgagagccgaggacaccgccgtgtactattgtgctgctgcccctggctgtctgctgtctgcacttagaagcgccgactacagaaactggggccagggcacactggtcaccgtttcttctggatccggcggcggaggatctggcggaggcggatctgggggcggaggctctttcgaacaagttcagctggttcagagcggagccgaagtgaagaaacctggggcctctgtgaaggtgtcctgcaaagccagcggctacacctttaccagctactggatcaactgggtccgacaggcccctggacaaggactggaatggatgggacagatccttccaggcggaggggacaccaactacaacggcaagttcaagggcagagtgaccatcaccgccgacaccagcacaagcaccgcctacatggaactgagcagcctgagaagcgaggacaccgccgtgtattattgcaccagacgggtgcccatccggctggattattggggacagggaaccctggtcaccgtgtctagtacgcgtatccagaaccctgatcctgccgtgtaccagctgcgggatagcaagagcagcgacaagagcgtgtgtctgttcaccgacttcgacagccagaccaacgtgtcccagagcaaggactccgacgtgtacatcaccgataagtgcgtgctggacatgcggagcatggacttcaagagcaactccgccgtggcctggtccaacaagtccgatttcgcctgcgccaacgccttcaacaacagcattatccccgaggacacattcttcccaagccccgagagcagctgcgacgtgaagctggtggaaaagagcttcgagacagacaccaacctgaacttccagaacctgagcgtgatcggcttcagaatcctgctgctgaaagtggccggctttaacctgctgatgaccctgcggctgtggtccagc

SEQ ID NO: 38256 - DNA, 1458 bp, synthetic construct
  source 1..1458: mol_type = other DNA
atggccttaccagtgaccgccttgctcctgccgctggccttgctgctccacgccgccaggccggacatcgtgatgacacagagccctgatagcctggccgtgtctctgggagagagagccaccattaactgcaaggccagccagagcgtggactacgacggcgacagcttcctgaactggtatcagcagaagcccggccagcctcctaagctgctgatctacgccgccagcaatctggaaagcggcgtgccaagcagattttccggctctggcagcggcaccgatttcaccctgacaatatccagcctccagcctgaggacgtggccgtgtactactgccagcagagcaacgacgaccctctgacctttggacagggcaccaaggtggaaatcaaaggcggaggcggaagtggaggcggaggatctggcggcggaggctctgaagtccaacttgtggagtctggagggggcctggtgcagcccggcggctctctcagactgtcttgtgcggcaagcggctacaccttcacctcttactggatagaatgggtgaggcaggcacctggaaagggactggagtggattggagagattctgccaggagggggagatacaaattacaatgaaatcttcaaggggcgggccaccttttcagcggataccagcaagaatacagcttacctgcagatgaatagcctccgggcagaagataccgctgtttattattgcacgagacgggtgccaataagactggactattgggggcaagggactcttgtcaccgtcagttcaacgcgtaaaattgaagttatgtatcctcctccttacctagacaatgagaagagcaatggaaccattatccatgtgaaagggaaacacctttgtccaagtcccctatttcccggaccttctaagcccttttgggtgctggtggtggttgggggagtcctggcttgctatagcttgctagtaacagtggcctttattattttctgggtgaggagtaagaggagcaggctcctgcacagtgactacatgaacatgactccacgccgccccggacccacccgcaagcattaccagccctatgccccaccacgcgacttcgcagcctatcgctccagagtgaagttcagcaggagcgcagacgcccccgcgtaccagcagggccagaaccagctctataacgagctcaatctaggacgaagagaggagtacgatgttttggacaagagacgtggccgggaccctgagatggggggaaagccgagaaggaagaaccctcaggaaggcctgtacaatgaactgcagaaagataagatggcggaggcctacagtgagattgggatgaaaggcgagcgccggaggggcaaggggcacgatggcctttaccagggtctcagtacagccaccaaggacacctacgacgcccttcacatgcaggccctgccccctcgc

SEQ ID NO: 38257 - DNA, 1476 bp, synthetic construct
  source 1..1476: mol_type = other DNA
atggccttaccagtgaccgccttgctcctgccgctggccttgctgctccacgccgccaggccggacatcgtgatgacacagagccctgatagcctggccgtgtctctgggagagagagccaccattaactgcaaggccagccagagcgtggactacgacggcgacagcttcctgaactggtatcagcagaagcccggccagcctcctaagctgctgatctacgccgccagcaatctggaaagcggcgtgccaagcagattttccggctctggcagcggcaccgatttcaccctgacaatatccagcctccagcctgaggacgtggccgtgtactactgccagcagagcaacgacgaccctctgacctttggacagggcaccaaggtggaaatcaaaggcggaggcggaagtggaggcggaggatctggcggcggaggctctgaagtccaacttgtggagtctggagggggcctggtgcagcccggcggctctctcagactgtcttgtgcggcaagcggctacaccttcacctcttactggatagaatgggtgaggcaggcacctggaaagggactggagtggattggagagattctgccaggagggggagatacaaattacaatgaaatcttcaaggggcgggccaccttttcagcggataccagcaagaatacagcttacctgcagatgaatagcctccgggcagaagataccgctgtttattattgcacgagacgggtgccaataagactggactattgggggcaagggactcttgtcaccgtcagttcaacgcgtgcgaagcccaccacgacgccagcgccgcgaccaccaacaccggcgcccaccatcgcgtcgcagcccctgtccctgcgcccagaggcgtgccggccagcggcggggggcgcagtgcacacgagggggctggacttcgcctgtgacatctacatctgggcgcccttggccgggacttgtggggtccttctcctgtcactggttatcaccctttactgcaaacggggcagaaagaaactcctgtatatattcaaacaaccatttatgagaccagtacaaactactcaagaggaagatggctgtagctgccgatttccagaagaagaagaaggaggatgtgaactgagagtgaagttcagcaggagcgcagacgcccccgcgtaccagcagggccagaaccagctctataacgagctgaatctaggacgaagagaggagtacgatgttttggacaagagacgtggccgggaccctgagatggggggaaagccgagaaggaagaaccctcaggaaggcctgtacaatgaactgcagaaagataagatggcggaggcctacagtgagattgggatgaaaggcgagcgccggaggggcaaggggcacgatggcctttaccagggtctcagtacagccaccaaggacacctacgacgcccttcacatgcaggccctgccccctcgc

SEQ ID NO: 38258 - DNA, 1476 bp, synthetic construct
  source 1..1476: mol_type = other DNA
atggccttaccagtgaccgccttgctcctgccgctggccttgctgctccacgccgccaggccggaagtccaacttgtggagtctggagggggcctggtgcagcccggcggctctctcagactgtcttgtgcggcaagcggctacaccttcacctcttactggatagaatgggtgaggcaggcacctggaaagggactggagtggattggagagattctgccaggagggggagatacaaattacaatgaaatcttcaaggggcgggccaccttttcagcggataccagcaagaatacagcttacctgcagatgaatagcctccgggcagaagataccgctgtttattattgcacgagacgggtgccaataagactggactattgggggcaagggactcttgtcaccgtcagttcaggcggaggcggaagtggaggcggaggatctggcggcggaggctctgacatcgtgatgacacagagccctgatagcctggccgtgtctctgggagagagagccaccattaactgcaaggccagccagagcgtggactacgacggcgacagcttcctgaactggtatcagcagaagcccggccagcctcctaagctgctgatctacgccgccagcaatctggaaagcggcgtgccaagcagattttccggctctggcagcggcaccgatttcaccctgacaatatccagcctccagcctgaggacgtggccgtgtactactgccagcagagcaacgacgaccctctgacctttggacagggcaccaaggtggaaatcaaaacgcgtgcgaagcccaccacgacgccagcgccgcgaccaccaacaccggcgcccaccatcgcgtcgcagcccctgtccctgcgcccagaggcgtgccggccagcggcggggggcgcagtgcacacgagggggctggacttcgcctgtgacatctacatctgggcgcccttggccgggacttgtggggtccttctcctgtcactggttatcaccctttactgcaaacggggcagaaagaaactcctgtatatattcaaacaaccatttatgagaccagtacaaactactcaagaggaagatggctgtagctgccgatttccagaagaagaagaaggaggatgtgaactgagagtgaagttcagcaggagcgcagacgcccccgcgtaccagcagggccagaaccagctctataacgagctgaatctaggacgaagagaggagtacgatgttttggacaagagacgtggccgggaccctgagatggggggaaagccgagaaggaagaaccctcaggaaggcctgtacaatgaactgcagaaagataagatggcggaggcctacagtgagattgggatgaaaggcgagcgccggaggggcaaggggcacgatggcctttaccagggtctcagtacagccaccaaggacacctacgacgcccttcacatgcaggccctgccccctcgc

SEQ ID NO: 38259 - DNA, 1875 bp, synthetic construct
  source 1..1875: mol_type = other DNA
atggccttaccagtgaccgccttgctcctgccgctggccttgctgctccacgccgccaggccggacatcgtgatgacacagagccctgatagcctggccgtgtctctgggagagagagccaccattaactgcaaggccagccagagcgtggactacgacggcgacagcttcctgaactggtatcagcagaagcccggccagcctcctaagctgctgatctacgccgccagcaatctggaaagcggcgtgccaagcagattttccggctctggcagcggcaccgatttcaccctgacaatatccagcctccagcctgaggacgtggccgtgtactactgccagcagagcaacgacgaccctctgacctttggacagggcaccaaggtggaaatcaaactcgagatccagaaccctgatcctgccgtgtaccagctgcgggatagcaagagcagcgacaagagcgtgtgtctgttcaccgacttcgacagccagaccaacgtgtcccagagcaaggactccgacgtgtacatcaccgataagtgcgtgctggacatgcggagcatggacttcaagagcaactccgccgtggcctggtccaacaagtccgatttcgcctgcgccaacgccttcaacaacagcattatccccgaggacacattcttcccaagcagcgacgtgccctgcgacgtgaagctggtggaaaagagcttcgagacagacaccaacctgaacttccagaacctgagcgtgatcggcttcagaatcctgctgctgaaagtggccggctttaacctgctgatgaccctgcggctgtggtccagccgcgccaagagaagcggatctggcgtgaagcagaccctgaatttcgacctgctgaagctggctggcgacgtggaatccaacccaggccctactagtatggactggatttggcgcatccttttccttgtcggcgctgctaccggcgcgcattccttcgaagaagtccaacttgtggagtctggagggggcctggtgcagcccggcggctctctcagactgtcttgtgcggcaagcggctacaccttcacctcttactggatagaatgggtgaggcaggcacctggaaagggactggagtggattggagagattctgccaggagggggagatacaaattacaatgaaatcttcaaggggcgggccaccttttcagcggataccagcaagaatacagcttacctgcagatgaatagcctccgggcagaagataccgctgtttattattgcacgagacgggtgccaataagactggactattgggggcaagggactcttgtcaccgtcagttcaacgcgtgaggacctgaagaacgtgttcccacctgaggtggccgtgttcgagcctagcaaggccgagatcgcccacacccagaaagccaccctcgtgtgcctggctaccggcttctaccccgaccatgtggaactgtcttggtgggtcaacggcaaagaggtgcacagcggcgtgtgtaccgacccccagccactgaaagaacagcccgccctgaacgacagccggtactgcctgagcagcagactgagagtgtccgccaccttctggcagaacccccggaaccacttcagatgccaggtgcagttctacggcctgagcgagaacgacgagtggacccaggacagagccaagcccgtgacccagatcgtgtctgccgaagcctggggcagagccgattgcggcatcaccagcgccagctaccaccagggcgtgctgagcgccaccatcctgtacgagatcctgctgggcaaggccaccctgtacgccgtgctggtgtctgccctggtgctgatggctatggtcaagcggaaggacagccgggga

SEQ ID NO: 38260 - DNA, 1863 bp, synthetic construct
  source 1..1863: mol_type = other DNA
atggccttaccagtgaccgccttgctcctgccgctggccttgctgctccacgccgccaggccggacatcgtgatgacacagagccctgatagcctggccgtgtctctgggagagagagccaccattaactgcaaggccagccagagcgtggactacgacggcgacagcttcctgaactggtatcagcagaagcccggccagcctcctaagctgctgatctacgccgccagcaatctggaaagcggcgtgccaagcagattttccggctctggcagcggcaccgatttcaccctgacaatatccagcctccagcctgaggacgtggccgtgtactactgccagcagagcaacgacgaccctctgacctttggacagggcaccaaggtggaaatcaaactcgaggacctgaagaacgtgttcccacctgaggtggccgtgttcgagcctagcaaggccgagatcgcccacacccagaaagccaccctcgtgtgcctggctaccggcttctaccccgaccatgtggaactgtcttggtgggtcaacggcaaagaggtgcacagcggcgtgtgtaccgacccccagccactgaaagaacagcccgccctgaacgacagccggtactgcctgagcagcagactgagagtgtccgccaccttctggcagaacccccggaaccacttcagatgccaggtgcagttctacggcctgagcgagaacgacgagtggacccaggacagagccaagcccgtgacccagatcgtgtctgccgaagcctggggcagagccgattgcggcatcaccagcgccagctaccaccagggcgtgctgagcgccaccatcctgtacgagatcctgctgggcaaggccaccctgtacgccgtgctggtgtctgccctggtgctgatggctatggtcaagcggaaggacagccggggaagggccaagcgatctggatctggagcaacaaacttctcactactcaaacaagcaggtgacgtggaggagaatcccgggcctactagtatggactggatttggcgcatccttttccttgtcggcgctgctaccggcgcgcattccttcgaagaagtccaacttgtggagtctggagggggcctggtgcagcccggcggctctctcagactgtcttgtgcggcaagcggctacaccttcacctcttactggatagaatgggtgaggcaggcacctggaaagggactggagtggattggagagattctgccaggagggggagatacaaattacaatgaaatcttcaaggggcgggccaccttttcagcggataccagcaagaatacagcttacctgcagatgaatagcctccgggcagaagataccgctgtttattattgcacgagacgggtgccaataagactggactattgggggcaagggactcttgtcaccgtcagttcaacgcgtatccagaaccctgatcctgccgtgtaccagctgcgggatagcaagagcagcgacaagagcgtgtgtctgttcaccgacttcgacagccagaccaacgtgtcccagagcaaggactccgacgtgtacatcaccgataagtgcgtgctggacatgcggagcatggacttcaagagcaactccgccgtggcctggtccaacaagtccgatttcgcctgcgccaacgccttcaacaacagcattatccccgaggacacattcttcccaagcagcgacgtgccctgcgacgtgaagctggtggaaaagagcttcgagacagacaccaacctgaacttccagaacctgagcgtgatcggcttcagaatcctgctgctgaaagtggccggctttaacctgctgatgaccctgcggctgtggtccagc

SEQ ID NO: 38261 - DNA, 1863 bp, synthetic construct; identical to SEQ ID NO: 32426
  source 1..1863: mol_type = other DNA

SEQ ID NO: 38262 - DNA, 1875 bp, synthetic construct
  source 1..1875: mol_type = other DNA
atggccttaccagtgaccgccttgctcctgccgctggccttgctgctccacgccgccaggccggacatcgtgatgacacagagccctgatagcctggccgtgtctctgggagagagagccaccattaactgcaaggccagccagagcgtggactacgacggcgacagcttcctgaactggtatcagcagaagcccggccagcctcctaagctgctgatctacgccgccagcaatctggaaagcggcgtgccaagcagattttccggctctggcagcggcaccgatttcaccctgacaatatccagcctccagcctgaggacgtggccgtgtactactgccagcagagcaacgacgaccctctgacctttggacagggcaccaaggtggaaatcaaactcgagatccagaaccctgatcctgccgtgtaccagctgcgggatagcaagagcagcgacaagagcgtgtgtctgttcaccgacttcgacagccagaccaacgtgtcccagagcaaggactccgacgtgtacatcaccgataagtgcgtgctggacatgcggagcatggacttcaagagcaactccgccgtggcctggtccaacaagtccgatttcgcctgcgccaacgccttcaacaacagcattatccccgaggacacattcttcccaagccccgagagcagctgcgacgtgaagctggtggaaaagagcttcgagacagacaccaacctgaacttccagaacctgagcgtgatcggcttcagaatcctgctgctgaaagtggccggctttaacctgctgatgaccctgcggctgtggtccagccgcgccaagagaagcggatctggcgtgaagcagaccctgaatttcgacctgctgaagctggctggcgacgtggaatccaacccaggccctactagtatggactggatttggcgcatccttttccttgtcggcgctgctaccggcgcgcattccttcgaagaagtccaacttgtggagtctggagggggcctggtgcagcccggcggctctctcagactgtcttgtgcggcaagcggctacaccttcacctcttactggatagaatgggtgaggcaggcacctggaaagggactggagtggattggagagattctgccaggagggggagatacaaattacaatgaaatcttcaaggggcgggccaccttttcagcggataccagcaagaatacagcttacctgcagatgaatagcctccgggcagaagataccgctgtttattattgcacgagacgggtgccaataagactggactattgggggcaagggactcttgtcaccgtcagttcaacgcgtgaggacctgaagaacgtgttcccacctgaggtggccgtgttcgagcctagcgaggccgagatcagccacacccagaaagccaccctcgtgtgcctggctaccggcttctaccccgaccatgtggaactgtcttggtgggtcaacggcaaagaggtgcacagcggcgtgtgtaccgacccccagccactgaaagaacagcccgccctgaacgacagccggtactgcctgagcagcagactgagagtgtccgccaccttctggcagaacccccggaaccacttcagatgccaggtgcagttctacggcctgagcgagaacgacgagtggacccaggacagagccaagcccgtgacccagatcgtgtctgccgaagcctggggcagagccgattgcggctttaccagcgagagctaccagcagggcgtgctgagcgccaccatcctgtacgagatcctgctgggcaaggccaccctgtacgccgtgctggtgtctgccctggtgctgatggctatggtcaagcggaaggacagccgggga

SEQ ID NO: 38263 - DNA, 1911 bp, synthetic construct
  source 1..1911: mol_type = other DNA
atggccttaccagtgaccgccttgctcctgccgctggccttgctgctccacgccgccaggccgctcgaggaggacctgaagaacgtgttcccacctgaggtggccgtgttcgagcctagcaaggccgagatcgcccacacccagaaagccaccctcgtgtgcctggctaccggcttctaccccgaccatgtggaactgtcttggtgggtcaacggcaaagaggtgcacagcggcgtgtgtaccgacccccagccactgaaagaacagcccgccctgaacgacagccggtactgcctgagcagcagactgagagtgtccgccaccttctggcagaacccccggaaccacttcagatgccaggtgcagttctacggcctgagcgagaacgacgagtggacccaggacagagccaagcccgtgacccagatcgtgtctgccgaagcctggggcagagccgattgcggcatcaccagcgccagctaccaccagggcgtgctgagcgccaccatcctgtacgagatcctgctgggcaaggccaccctgtacgccgtgctggtgtctgccctggtgctgatggctatggtcaagcggaaggacagccggggaagggccaagcgatctggatctggagcaacaaacttctcactactcaaacaagcaggtgacgtggaggagaatcccgggcctactagcatggccttaccagtgaccgccttgctcctgccgctggccttgctgctccacgccgccaggccggacatcgtgatgacacagagccctgatagcctggccgtgtctctgggagagagagccaccattaactgcaaggccagccagagcgtggactacgacggcgacagcttcctgaactggtatcagcagaagcccggccagcctcctaagctgctgatctacgccgccagcaatctggaaagcggcgtgccaagcagattttccggctctggcagcggcaccgatttcaccctgacaatatccagcctccagcctgaggacgtggccgtgtactactgccagcagagcaacgacgaccctctgacctttggacagggcaccaaggtggaaatcaaaggcggaggcggaagtggaggcggaggatctggcggcggaggctctgaagtccaacttgtggagtctggagggggcctggtgcagcccggcggctctctcagactgtcttgtgcggcaagcggctacaccttcacctcttactggatagaatgggtgaggcaggcacctggaaagggactggagtggattggagagattctgccaggagggggagatacaaattacaatgaaatcttcaaggggcgggccaccttttcagcggataccagcaagaatacagcttacctgcagatgaatagcctccgggcagaagataccgctgtttattattgcacgagacgggtgccaataagactggactattgggggcaagggactcttgtcaccgtcagttcaacgcgtatccagaaccctgatcctgccgtgtaccagctgcgggatagcaagagcagcgacaagagcgtgtgtctgttcaccgacttcgacagccagaccaacgtgtcccagagcaaggactccgacgtgtacatcaccgataagtgcgtgctggacatgcggagcatggacttcaagagcaactccgccgtggcctggtccaacaagtccgatttcgcctgcgccaacgccttcaacaacagcattatccccgaggacacattcttcccaagcagcgacgtgccctgcgacgtgaagctggtggaaaagagcttcgagacagacaccaacctgaacttccagaacctgagcgtgatcggcttcagaatcctgctgctgaaagtggccggctttaacctgctgatgaccctgcggctgtggtccagc

SEQ ID NO: 38264 - DNA, 1932 bp, synthetic construct
  source 1..1932: mol_type = other DNA
atggccttaccagtgaccgccttgctcctgccgctggccttgctgctccacgccgccaggccgctcgagggctccggcgatcgccctgatcctgccgtgtaccagctgcgggatagcaagagcagcgacaagagcgtgtgtctgttcaccgacttcgacagccagaccaacgtgtcccagagcaaggactccgacgtgtacatcaccgataagtgcgtgctggacatgcggagcatggacttcaagagcaactccgccgtggcctggtccaacaagtccgatttcgcctgcgccaacgccttcaacaacagcattatccccgaggacacattcttcccaagccccgagagcagctgcgacgtgaagctggtggaaaagagcttcgagacagacaccaacctgaacttccagaacctgagcgtgatcggcttcagaatcctgctgctgaaagtggccggctttaacctgctgatgaccctgcggctgtggtccagctctagtcgcgccaagagaagcggatctggcgtgaagcagaccctgaatttcgacctgctgaagctggctggcgacgtggaatccaacccaggccccactagcatggccttaccagtgaccgccttgctcctgccgctggccttgctgctccacgccgccaggccggacatcgtgatgacacagagccctgatagcctggccgtgtctctgggagagagagccaccattaactgcaaggccagccagagcgtggactacgacggcgacagcttcctgaactggtatcagcagaagcccggccagcctcctaagctgctgatctacgccgccagcaatctggaaagcggcgtgccaagcagattttccggctctggcagcggcaccgatttcaccctgacaatatccagcctccagcctgaggacgtggccgtgtactactgccagcagagcaacgacgaccctctgacctttggacagggcaccaaggtggaaatcaaaggcggaggcggaagtggaggcggaggatctggcggcggaggctctgaagtccaacttgtggagtctggagggggcctggtgcagcccggcggctctctcagactgtcttgtgcggcaagcggctacaccttcacctcttactggatagaatgggtgaggcaggcacctggaaagggactggagtggattggagagattctgccaggagggggagatacaaattacaatgaaatcttcaaggggcgggccaccttttcagcggataccagcaagaatacagcttacctgcagatgaatagcctccgggcagaagataccgctgtttattattgcacgagacgggtgccaataagactggactattgggggcaagggactcttgtcaccgtcagttcaacgcgtgaggacctgaagaacgtgttcccacctgaggtggccgtgttcgagcctagcgaggccgagatcagccacacccagaaagccaccctcgtgtgcctggctaccggcttctaccccgaccatgtggaactgtcttggtgggtcaacggcaaagaggtgcacagcggcgtgtgtaccgacccccagccactgaaagaacagcccgccctgaacgacagccggtactgcctgagcagcagactgagagtgtccgccaccttctggcagaacccccggaaccacttcagatgccaggtgcagttctacggcctgagcgagaacgacgagtggacccaggacagagccaagcccgtgacccagatcgtgtctgccgaagcctggggcagagccgattgcggctttaccagcgagagctaccagcagggcgtgctgagcgccaccatcctgtacgagatcctgctgggcaaggccaccctgtacgccgtgctggtgtctgccctggtgctgatggctatggtcaagcggaaggacagccgggga

SEQ ID NO: 38265 - DNA, 1863 bp, synthetic construct
  source 1..1863: mol_type = other DNA
atggccttaccagtgaccgccttgctcctgccgctggccttgctgctccacgccgccaggccggacatcgtgatgacacagagccctgatagcctggccgtgtctctgggagagagagccaccattaactgcaaggccagccagagcgtggactacgacggcgacagcttcctgaactggtatcagcagaagcccggccagcctcctaagctgctgatctacgccgccagcaatctggaaagcggcgtgccaagcagattttccggctctggcagcggcaccgatttcaccctgacaatatccagcctccagcctgaggacgtggccgtgtactactgccagcagagcaacgacgaccctctgacctttggacagggcaccaaggtggaaatcaaactcgaggacctgaagaacgtgttcccacctgaggtggccgtgttcgagcctagcgaggccgagatcagccacacccagaaagccaccctcgtgtgcctggctaccggcttctaccccgaccatgtggaactgtcttggtgggtcaacggcaaagaggtgcacagcggcgtgtctaccgacccccagccactgaaagaacagcccgccctgaacgacagccggtactgcctgagcagcagactgagagtgtccgccaccttctggcagaacccccggaaccacttcagatgccaggtgcagttctacggcctgagcgagaacgacgagtggacccaggacagagccaagcccgtgacccagatcgtgtctgccgaagcctggggcagagccgattgcggctttaccagcgagagctaccagcagggcgtgctgagcgccaccatcctgtacgagatcctgctgggcaaggccaccctgtacgccgtgctggtgtctgccctggtgctgatggctatggtcaagcggaaggacagccggggaagggccaagcgatctggatctggagcaacaaacttctcactactcaaacaagcaggtgacgtggaggagaatcccgggcctactagtatggactggatttggcgcatccttttccttgtcggcgctgctaccggcgcgcattccttcgaagaagtccaacttgtggagtctggagggggcctggtgcagcccggcggctctctcagactgtcttgtgcggcaagcggctacaccttcacctcttactggatagaatgggtgaggcaggcacctggaaagggactggagtggattggagagattctgccaggagggggagatacaaattacaatgaaatcttcaaggggcgggccaccttttcagcggataccagcaagaatacagcttacctgcagatgaatagcctccgggcagaagataccgctgtttattattgcacgagacgggtgccaataagactggactattgggggcaagggactcttgtcaccgtcagttcaacgcgtatccagaaccctgatcctgccgtgtaccagctgcgggatagcaagagcagcgacaagagcgtgtgtctgttcaccgacttcgacagccagaccaacgtgtcccagagcaaggactccgacgtgtacatcaccgataagaccgtgctggacatgcggagcatggacttcaagagcaactccgccgtggcctggtccaacaagtccgatttcgcctgcgccaacgccttcaacaacagcattatccccgaggacacattcttcccaagccccgagagcagctgcgacgtgaagctggtggaaaagagcttcgagacagacaccaacctgaacttccagaacctgagcgtgatcggcttcagaatcctgctgctgaaagtggccggctttaacctgctgatgaccctgcggctgtggtccagc

SEQ ID NO: 38266 - DNA, 1887 bp, synthetic construct
  source 1..1887: mol_type = other DNA
atggccttaccagtgaccgccttgctcctgccgctggccttgctgctccacgccgccaggccggacatcgtgatgacacagagccctgatagcctggccgtgtctctgggagagagagccaccattaactgcaaggccagccagagcgtggactacgacggcgacagcttcctgaactggtatcagcagaagcccggccagcctcctaagctgctgatctacgccgccagcaatctggaaagcggcgtgccaagcagattttccggctctggcagcggcaccgatttcaccctgacaatatccagcctccagcctgaggacgtggccgtgtactactgccagcagagcaacgacgaccctctgacctttggacagggcaccaaggtggaaatcaaactcgaggacaagcagctggacgccgacgtgtcccccaagcctaccatcttcctgccctctatcgccgagacaaagctccagaaggccggcacctacctgtgcctgctggaaaagttcttcccagatgtgattaagatccactggcaggaaaagaagtccaacaccatcctgggcagccaggaaggcaacaccatgaagaccaacgacacctacatgaagttcagctggctgaccgtgcccgagaagtccctggacaaagaacacagatgcatcgtgcggcacgaaaacaacaagaacggcgtggaccaggaaatcatcttcccacccatcaagaccgatgtgattacaatggaccccaaggacaactgctccaaggacgccaacgataccctgctgctccagctgaccaacaccagcgcctactacatgtacttgttgctgctgctgaagtccgtggtgtacttcgccatcatcacatgctgcctgctgcggagaaccgccttctgctgcaacggcgagaagtctagggccaagcgatctggatctggagcaacaaacttctcactactcaaacaagcaggtgacgtggaggagaatcccgggcctactagtatggactggatttggcgcatccttttccttgtcggcgctgctaccggcgcgcattccttcgaagaagtccaacttgtggagtctggagggggcctggtgcagcccggcggctctctcagactgtcttgtgcggcaagcggctacaccttcacctcttactggatagaatgggtgaggcaggcacctggaaagggactggagtggattggagagattctgccaggagggggagatacaaattacaatgaaatcttcaaggggcgggccaccttttcagcggataccagcaagaatacagcttacctgcagatgaatagcctccgggcagaagataccgctgtttattattgcacgagacgggtgccaataagactggactattgggggcaagggactcttgtcaccgtcagttcaacgcgtagccagcctcacaccaagcccagcgtgttcgtgatgaagaacggcaccaacgtggcctgcctcgtgaaagagttctaccccaaggacatcaggatcaacctggtgtccagcaagaagatcaccgagttcgaccccgccatcgtgatctcccccagcggcaagtacaacgccgtgaagctggggaagtacgaggacagcaacagcgtgacctgctccgtgcagcacgacaacaagaccgtgcacagcaccgactttgaagtgaaaaccgactccaccgaccacgtgaagcccaaagagacagagaacaccaagcagcccagcaagagctgccacaagcccaaggccatcgtgcacaccgagaaagtgaacatgatgagcctgaccgtgctgggcctgcggatgctgttcgccaaaaccgtggccgtgaacttcctgctgaccgccaagctgttcttcctc

SEQ ID NO: 38267 - DNA, 1887 bp, synthetic construct
  source 1..1887: mol_type = other DNA
atggccttaccagtgaccgccttgctcctgccgctggccttgctgctccacgccgccaggccggacatcgtgatgacacagagccctgatagcctggccgtgtctctgggagagagagccaccattaactgcaaggccagccagagcgtggactacgacggcgacagcttcctgaactggtatcagcagaagcccggccagcctcctaagctgctgatctacgccgccagcaatctggaaagcggcgtgccaagcagattttccggctctggcagcggcaccgatttcaccctgacaatatccagcctccagcctgaggacgtggccgtgtactactgccagcagagcaacgacgaccctctgacctttggacagggcaccaaggtggaaatcaaactcgagagccagcctcacaccaagcccagcgtgttcgtgatgaagaacggcaccaacgtggcctgcctcgtgaaagagttctaccccaaggacatcaggatcaacctggtgtccagcaagaagatcaccgagttcgaccccgccatcgtgatctcccccagcggcaagtacaacgccgtgaagctggggaagtacgaggacagcaacagcgtgacctgctccgtgcagcacgacaacaagaccgtgcacagcaccgactttgaagtgaaaaccgactccaccgaccacgtgaagcccaaagagacagagaacaccaagcagcccagcaagagctgccacaagcccaaggccatcgtgcacaccgagaaagtgaacatgatgagcctgaccgtgctgggcctgcggatgctgttcgccaaaaccgtggccgtgaacttcctgctgaccgccaagctgttcttcctcagggccaagcgatctggatctggagcaacaaacttctcactactcaaacaagcaggtgacgtggaggagaatcccgggcctactagtatggactggatttggcgcatccttttccttgtcggcgctgctaccggcgcgcattccttcgaagaagtccaacttgtggagtctggagggggcctggtgcagcccggcggctctctcagactgtcttgtgcggcaagcggctacaccttcacctcttactggatagaatgggtgaggcaggcacctggaaagggactggagtggattggagagattctgccaggagggggagatacaaattacaatgaaatcttcaaggggcgggccaccttttcagcggataccagcaagaatacagcttacctgcagatgaatagcctccgggcagaagataccgctgtttattattgcacgagacgggtgccaataagactggactattgggggcaagggactcttgtcaccgtcagttcaacgcgtgacaagcagctggacgccgacgtgtcccccaagcctaccatcttcctgccctctatcgccgagacaaagctccagaaggccggcacctacctgtgcctgctggaaaagttcttcccagatgtgattaagatccactggcaggaaaagaagtccaacaccatcctgggcagccaggaaggcaacaccatgaagaccaacgacacctacatgaagttcagctggctgaccgtgcccgagaagtccctggacaaagaacacagatgcatcgtgcggcacgaaaacaacaagaacggcgtggaccaggaaatcatcttcccacccatcaagaccgatgtgattacaatggaccccaaggacaactgctccaaggacgccaacgataccctgctgctccagctgaccaacaccagcgcctactacatgtacttgttgctgctgctgaagtccgtggtgtacttcgccatcatcacatgctgcctgctgcggagaaccgccttctgctgcaacggcgagaagtct

SEQ ID NO: 38268 - DNA, 1932 bp, synthetic construct
  source 1..1932: mol_type = other DNA
atggccttaccagtgaccgccttgctcctgccgctggccttgctgctccacgccgccaggccgctcgaggacaagcagctggacgccgacgtgtcccccaagcctaccatcttcctgccctctatcgccgagacaaagctccagaaggccggcacctacctgtgcctgctggaaaagttcttcccagatgtgattaagatccactggcaggaaaagaagtccaacaccatcctgggcagccaggaaggcaacaccatgaagaccaacgacacctacatgaagttcagctggctgaccgtgcccgagaagtccctggacaaagaacacagatgcatcgtgcggcacgaaaacaacaagaacggcgtggaccaggaaatcatcttcccacccatcaagaccgatgtgattacaatggaccccaaggacaactgctccaaggacgccaacgataccctgctgctccagctgaccaacaccagcgcctactacatgtacttgttgctgctgctgaagtccgtggtgtacttcgccatcatcacatgctgcctgctgcggagaaccgccttctgctgcaacggcgagaagtctagggccaagcgatctggatctggagcaacaaacttctcactactcaaacaagcaggtgacgtggaggagaatcccgggcctactagcatggccttaccagtgaccgccttgctcctgccgctggccttgctgctccacgccgccaggccggacatcgtgatgacacagagccctgatagcctggccgtgtctctgggagagagagccaccattaactgcaaggccagccagagcgtggactacgacggcgacagcttcctgaactggtatcagcagaagcccggccagcctcctaagctgctgatctacgccgccagcaatctggaaagcggcgtgccaagcagattttccggctctggcagcggcaccgatttcaccctgacaatatccagcctccagcctgaggacgtggccgtgtactactgccagcagagcaacgacgaccctctgacctttggacagggcaccaaggtggaaatcaaaggcggaggcggaagtggaggcggaggatctggcggcggaggctctgaagtccaacttgtggagtctggagggggcctggtgcagcccggcggctctctcagactgtcttgtgcggcaagcggctacaccttcacctcttactggatagaatgggtgaggcaggcacctggaaagggactggagtggattggagagattctgccaggagggggagatacaaattacaatgaaatcttcaaggggcgggccaccttttcagcggataccagcaagaatacagcttacctgcagatgaatagcctccgggcagaagataccgctgtttattattgcacgagacgggtgccaataagactggactattgggggcaagggactcttgtcaccgtcagttcaacgcgtagccagcctcacaccaagcccagcgtgttcgtgatgaagaacggcaccaacgtggcctgcctcgtgaaagagttctaccccaaggacatcaggatcaacctggtgtccagcaagaagatcaccgagttcgaccccgccatcgtgatctcccccagcggcaagtacaacgccgtgaagctggggaagtacgaggacagcaacagcgtgacctgctccgtgcagcacgacaacaagaccgtgcacagcaccgactttgaagtgaaaaccgactccaccgaccacgtgaagcccaaagagacagagaacaccaagcagcccagcaagagctgccacaagcccaaggccatcgtgcacaccgagaaagtgaacatgatgagcctgaccgtgctgggcctgcggatgctgttcgccaaaaccgtggccgtgaacttcctgctgaccgccaagctgttcttcctc

SEQ ID NO: 38269 - DNA, 2394 bp, synthetic construct
  source 1..2394: mol_type = other DNA
atggccttaccagtgaccgccttgctcctgccgctggccttgctgctccacgccgccaggccggacatcgtgatgacacagagccctgatagcctggccgtgtctctgggagagagagccaccattaactgcaaggccagccagagcgtggactacgacggcgacagcttcctgaactggtatcagcagaagcccggccagcctcctaagctgctgatctacgccgccagcaatctggaaagcggcgtgccaagcagattttccggctctggcagcggcaccgatttcaccctgacaatatccagcctccagcctgaggacgtggccgtgtactactgccagcagagcaacgacgaccctctgacctttggacagggcaccaaggtggaaatcaaaggacagcctaaggccaatcctaccgtgacactgttccctccaagcagcgaagaactccaggccaacaaggccacacttgtgtgcctgatctccgacttctaccctggggctgtgacagtggcttggaaggccgatggatctcctgtgaaagccggcgtggaaaccaccaagccatccaagcagagcaacaacaaatacgccgccagctcctacctgagcctgacacctgagcagtggaagtcccacagatcctacagctgccaagtgacccacgaaggcagcaccgtggaaaagacagtggcccctacagagtgcagcggatcccagagcttcggcctgctggaccccaagctgtgctacctgctggatggcatcctgttcatctacggcgtgatcctgaccgccctgttcctgagagtgaagttcagcagaagcgccgacgcccctgcctaccagcagggacagaaccaactgtacaacgagctgaacctgggcagacgggaagagtacgacgtgctggacaagcggagaggcagggaccctgagatgggcggaaagccccagcggagaaagaacccccaggaaggactgtataacgaactccagaaagacaagatggccgaagcctacagcgagatcggcatgaagggcgagcggagaagaggcaagggccacgatggcctgtaccagggcctgagcaccgccaccaaggacacctatgacgccctgcacatgcaggccctgcctccaagaagggccaagcgatctggatctggagcaacaaacttctcactactcaaacaagcaggtgacgtggaggagaatcccgggcctactagtatggactggatttggcgcatccttttccttgtcggcgctgctaccggcgcgcattccttcgaagaagtccaacttgtggagtctggagggggcctggtgcagcccggcggctctctcagactgtcttgtgcggcaagcggctacaccttcacctcttactggatagaatgggtgaggcaggcacctggaaagggactggagtggattggagagattctgccaggagggggagatacaaattacaatgaaatcttcaaggggcgggccaccttttcagcggataccagcaagaatacagcttacctgcagatgaatagcctccgggcagaagataccgctgtttattattgcacgagacgggtgccaataagactggactattgggggcaagggactcttgtcaccgtcagttcagcctctacaaagggaccctccgtgtttcctctggctcccagcagcaagtctacaagcggaggaacagccgctctgggctgcctggtcaaggattactttcccgagcctgtgaccgtgtcctggaatagcggagcactgacaagcggcgtgcacacctttccagccgtgctgcaaagcagcggcctgtactctctgagcagcgtggtcacagtgcctagctctagcctgggcacccagacctacatctgcaatgtgaaccacaagcctagcaacaccaaggtggacaagagagtggaacccaagagctgtggtacccagagttttgggttgttggaccctaaattgtgctatctgttggacggaatcctgttcatttacggagtgatcctgaccgcattgttcctgcgggttaagttttccagatccgcagacgcacccgcttaccaacaagggcagaaccaactctacaatgaacttaatttggggcggagggaagagtacgacgttctggacaaaaggaggggacgagatcccgagatgggcggaaagcctcagcgaaggaagaatccgcaagaggggctttataacgaactccagaaagataaaatggcagaagcctatagtgagattgggatgaagggagaaaggaggaggggtaaaggtcacgatgggttgtaccaaggattgagcacagccactaaagatacctatgatgcgctccacatgcaggccctgccgccaaga

SEQ ID NO: 38270 - DNA, 2451 bp, synthetic construct
  source 1..2451: mol_type = other DNA
atggccttaccagtgaccgccttgctcctgccgctggccttgctgctccacgccgccaggccggacatcgtgatgacacagagccctgatagcctggccgtgtctctgggagagagagccaccattaactgcaaggccagccagagcgtggactacgacggcgacagcttcctgaactggtatcagcagaagcccggccagcctcctaagctgctgatctacgccgccagcaatctggaaagcggcgtgccaagcagattttccggctctggcagcggcaccgatttcaccctgacaatatccagcctccagcctgaggacgtggccgtgtactactgccagcagagcaacgacgaccctctgacctttggacagggcaccaaggtggaaatcaaactcgaggacctgaagaacgtgttcccacctgaggtggccgtgttcgagcctagcgaggccgagatcagccacacccagaaagccaccctcgtgtgcctggctaccggcttctaccccgaccatgtggaactgtcttggtgggtcaacggcaaagaggtgcacagcggcgtgtctaccgacccccagccactgaaagaacagcccgccctgaacgacagccggtactgcctgagcagcagactgagagtgtccgccaccttctggcagaacccccggaaccacttcagatgccaggtgcagttctacggcctgagcgagaacgacgagtggacccaggacagagccaagcccgtgacccagatcgtgtctgccgaagcctggggcagagccgattgcggatcccagagcttcggcctgctggaccccaagctgtgctacctgctggatggcatcctgttcatctacggcgtgatcctgaccgccctgttcctgagagtgaagttcagcagaagcgccgacgcccctgcctaccagcagggacagaaccaactgtacaacgagctgaacctgggcagacgggaagagtacgacgtgctggacaagcggagaggcagggaccctgagatgggcggaaagccccagcggagaaagaacccccaggaaggactgtataacgaactccagaaagacaagatggccgaagcctacagcgagatcggcatgaagggcgagcggagaagaggcaagggccacgatggcctgtaccagggcctgagcaccgccaccaaggacacctatgacgccctgcacatgcaggccctgcctccaagaagggccaagcgatctggatctggagcaacaaacttctcactactcaaacaagcaggtgacgtggaggagaatcccgggcctactagtatggactggatttggcgcatccttttccttgtcggcgctgctaccggcgcgcattccttcgaagaagtccaacttgtggagtctggagggggcctggtgcagcccggcggctctctcagactgtcttgtgcggcaagcggctacaccttcacctcttactggatagaatgggtgaggcaggcacctggaaagggactggagtggattggagagattctgccaggagggggagatacaaattacaatgaaatcttcaaggggcgggccaccttttcagcggataccagcaagaatacagcttacctgcagatgaatagcctccgggcagaagataccgctgtttattattgcacgagacgggtgccaataagactggactattgggggcaagggactcttgtcaccgtcagttcaacgcgtatccagaaccctgatcctgccgtgtaccagctgcgggatagcaagagcagcgacaagagcgtgtgtctgttcaccgacttcgacagccagaccaacgtgtcccagagcaaggactccgacgtgtacatcaccgataagaccgtgctggacatgcggagcatggacttcaagagcaactccgccgtggcctggtccaacaagtccgatttcgcctgcgccaacgccttcaacaacagcattatccccgaggacacattcttcccaagccccgagagcagctgcggtacccagagttttgggttgttggaccctaaattgtgctatctgttggacggaatcctgttcatttacggagtgatcctgaccgcattgttcctgcgggttaagttttccagatccgcagacgcacccgcttaccaacaagggcagaaccaactctacaatgaacttaatttggggcggagggaagagtacgacgttctggacaaaaggaggggacgagatcccgagatgggcggaaagcctcagcgaaggaagaatccgcaagaggggctttataacgaactccagaaagataaaatggcagaagcctatagtgagattgggatgaagggagaaaggaggaggggtaaaggtcacgatgggttgtaccaaggattgagcacagccactaaagatacctatgatgcgctccacatgcaggccctgccgccaaga

SEQ ID NO: 38271 - DNA, 2577 bp, synthetic construct
  source 1..2577: mol_type = other DNA
atggccttaccagtgaccgccttgctcctgccgctggccttgctgctccacgccgccaggccggacatcgtgatgacacagagccctgatagcctggccgtgtctctgggagagagagccaccattaactgcaaggccagccagagcgtggactacgacggcgacagcttcctgaactggtatcagcagaagcccggccagcctcctaagctgctgatctacgccgccagcaatctggaaagcggcgtgccaagcagattttccggctctggcagcggcaccgatttcaccctgacaatatccagcctccagcctgaggacgtggccgtgtactactgccagcagagcaacgacgaccctctgacctttggacagggcaccaaggtggaaatcaaactcgaggaggacctgaagaacgtgttcccacctgaggtggccgtgttcgagcctagcgaggccgagatcagccacacccagaaagccaccctcgtgtgcctggctaccggcttctaccccgaccatgtggaactgtcttggtgggtcaacggcaaagaggtgcacagcggcgtgtctaccgacccccagccactgaaagaacagcccgccctgaacgacagccggtactgcctgagcagcagactgagagtgtccgccaccttctggcagaacccccggaaccacttcagatgccaggtgcagttctacggcctgagcgagaacgacgagtggacccaggacagagccaagcccgtgacccagatcgtgtctgccgaagcctggggcagagccgattgcggatcccagagcttcggcctgctggaccccaagctgtgctacctgctggatggcatcctgttcatctacggcgtgatcctgaccgccctgttcctgagagtgaagttcagcagaagcgccgacgcccctgcctaccagcagggacagaaccaactgtacaacgagctgaacctgggcagacgggaagagtacgacgtgctggacaagcggagaggcagggaccctgagatgggcggaaagccccagcggagaaagaacccccaggaaggactgtataacgaactccagaaagacaagatggccgaagcctacagcgagatcggcatgaagggcgagcggagaagaggcaagggccacgatggcctgtaccagggcctgagcaccgccaccaaggacacctatgacgccctgcacatgcaggccctgcctccaagaagggccaagcgatctggatctggagcaacaaacttctcactactcaaacaagcaggtgacgtggaggagaatcccgggcctactagtatggactggatttggcgcatccttttccttgtcggcgctgctaccggcgcgcattccttcgaagaagtccaacttgtggagtctggagggggcctggtgcagcccggcggctctctcagactgtcttgtgcggcaagcggctacaccttcacctcttactggatagaatgggtgaggcaggcacctggaaagggactggagtggattggagagattctgccaggagggggagatacaaattacaatgaaatcttcaaggggcgggccaccttttcagcggataccagcaagaatacagcttacctgcagatgaatagcctccgggcagaagataccgctgtttattattgcacgagacgggtgccaataagactggactattgggggcaagggactcttgtcaccgtcagttcaacgcgtatccagaaccctgatcctgccgtgtaccagctgcgggatagcaagagcagcgacaagagcgtgtgtctgttcaccgacttcgacagccagaccaacgtgtcccagagcaaggactccgacgtgtacatcaccgataagaccgtgctggacatgcggagcatggacttcaagagcaactccgccgtggcctggtccaacaagtccgatttcgcctgcgccaacgccttcaacaacagcattatccccgaggacacattcttcccaagccccgagagcagctgcggtacccagagttttgggttgttggaccctaaattgtgctatctgttggacggaatcctgttcatttacggagtgatcctgaccgcattgttcctgaggagcaagcggtcacggctgctccacagcgattacatgaatatgacaccacgaagaccgggtcctactcgcaaacactaccaaccctacgcacctccccgcgactttgcagcgtaccgatctcgggttaagttttccagatccgcagacgcacccgcttaccaacaagggcagaaccaactctacaatgaacttaatttggggcggagggaagagtacgacgttctggacaaaaggaggggacgagatcccgagatgggcggaaagcctcagcgaaggaagaatccgcaagaggggctttataacgaactccagaaagataaaatggcagaagcctatagtgagattgggatgaagggagaaaggaggaggggtaaaggtcacgatgggttgtaccaaggattgagcacagccactaaagatacctatgatgcgctccacatgcaggccctgccgccaaga

SEQ ID NO: 38272 - DNA, 2706 bp, synthetic construct
  source 1..2706: mol_type = other DNA
atggccttaccagtgaccgccttgctcctgccgctggccttgctgctccacgccgccaggccggacatcgtgatgacacagagccctgatagcctggccgtgtctctgggagagagagccaccattaactgcaaggccagccagagcgtggactacgacggcgacagcttcctgaactggtatcagcagaagcccggccagcctcctaagctgctgatctacgccgccagcaatctggaaagcggcgtgccaagcagattttccggctctggcagcggcaccgatttcaccctgacaatatccagcctccagcctgaggacgtggccgtgtactactgccagcagagcaacgacgaccctctgacctttggacagggcaccaaggtggaaatcaaactcgaggaggacctgaagaacgtgttcccacctgaggtggccgtgttcgagcctagcgaggccgagatcagccacacccagaaagccaccctcgtgtgcctggctaccggcttctaccccgaccatgtggaactgtcttggtgggtcaacggcaaagaggtgcacagcggcgtgtctaccgacccccagccactgaaagaacagcccgccctgaacgacagccggtactgcctgagcagcagactgagagtgtccgccaccttctggcagaacccccggaaccacttcagatgccaggtgcagttctacggcctgagcgagaacgacgagtggacccaggacagagccaagcccgtgacccagatcgtgtctgccgaagcctggggcagagccgattgcggatcccagagcttcggcctgctggaccccaagctgtgctacctgctggatggcatcctgttcatctacggcgtgatcctgaccgccctgttcctgaaacggggcagaaagaaactcctgtatatattcaaacaaccatttatgagaccagtacaaactactcaagaggaagatggctgtagctgccgatttccagaagaagaagaaggaggatgtgaactgagagtgaagttcagcagaagcgccgacgcccctgcctaccagcagggacagaaccaactgtacaacgagctgaacctgggcagacgggaagagtacgacgtgctggacaagcggagaggcagggaccctgagatgggcggaaagccccagcggagaaagaacccccaggaaggactgtataacgaactccagaaagacaagatggccgaagcctacagcgagatcggcatgaagggcgagcggagaagaggcaagggccacgatggcctgtaccagggcctgagcaccgccaccaaggacacctatgacgccctgcacatgcaggccctgcctccaagaagggccaagcgatctggatctggagcaacaaacttctcactactcaaacaagcaggtgacgtggaggagaatcccgggcctactagtatggactggatttggcgcatccttttccttgtcggcgctgctaccggcgcgcattccttcgaagaagtccaacttgtggagtctggagggggcctggtgcagcccggcggctctctcagactgtcttgtgcggcaagcggctacaccttcacctcttactggatagaatgggtgaggcaggcacctggaaagggactggagtggattggagagattctgccaggagggggagatacaaattacaatgaaatcttcaaggggcgggccaccttttcagcggataccagcaagaatacagcttacctgcagatgaatagcctccgggcagaagataccgctgtttattattgcacgagacgggtgccaataagactggactattgggggcaagggactcttgtcaccgtcagttcaacgcgtatccagaaccctgatcctgccgtgtaccagctgcgggatagcaagagcagcgacaagagcgtgtgtctgttcaccgacttcgacagccagaccaacgtgtcccagagcaaggactccgacgtgtacatcaccgataagaccgtgctggacatgcggagcatggacttcaagagcaactccgccgtggcctggtccaacaagtccgatttcgcctgcgccaacgccttcaacaacagcattatccccgaggacacattcttcccaagccccgagagcagctgcggtacccagagttttgggttgttggaccctaaattgtgctatctgttggacggaatcctgttcatttacggagtgatcctgaccgcattgttcctgaagagaggccggaagaagctgctgtacatcttcaagcagcctttcatgcggcccgtgcagaccacccaggaagaggacggctgctcctgccggttccccgaggaagaagaaggcggctgcgagctgcgggttaagttttccagatccgcagacgcacccgcttaccaacaagggcagaaccaactctacaatgaacttaatttggggcggagggaagagtacgacgttctggacaaaaggaggggacgagatcccgagatgggcggaaagcctcagcgaaggaagaatccgcaagaggggctttataacgaactccagaaagataaaatggcagaagcctatagtgagattgggatgaagggagaaaggaggaggggtaaaggtcacgatgggttgtaccaaggattgagcacagccactaaagatacctatgatgcgctccacatgcaggccctgccgccaaga

SEQ ID NO: 38273 - DNA, 1767 bp, synthetic construct
  source 1..1767: mol_type = other DNA
atggccttaccagtgaccgccttgctcctgccgctggccttgctgctccacgccgccaggccggacatcgtgatgacacagagccctgatagcctggccgtgtctctgggagagagagccaccattaactgcaaggccagccagagcgtggactacgacggcgacagcttcctgaactggtatcagcagaagcccggccagcctcctaagctgctgatctacgccgccagcaatctggaaagcggcgtgccaagcagattttccggctctggcagcggcaccgatttcaccctgacaatatccagcctccagcctgaggacgtggccgtgtactactgccagcagagcaacgacgaccctctgacctttggacagggcaccaaggtggaaatcaaactcgagcagagcttcggcctgctggaccccaagctgtgctacctgctggatggcatcctgttcatctacggcgtgatcctgaccgccctgttcctgagagtgaagttcagcagaagcgccgacgcccctgcctaccagcagggacagaaccaactgtacaacgagctgaacctgggcagacgggaagagtacgacgtgctggacaagcggagaggcagggaccctgagatgggcggaaagccccagcggagaaagaacccccaggaaggactgtataacgaactccagaaagacaagatggccgaagcctacagcgagatcggcatgaagggcgagcggagaagaggcaagggccacgatggcctgtaccagggcctgagcaccgccaccaaggacacctatgacgccctgcacatgcaggccctgcctccaagaagggccaagcgatctggatctggagcaacaaacttctcactactcaaacaagcaggtgacgtggaggagaatcccgggcctactagtatggactggatttggcgcatccttttccttgtcggcgctgctaccggcgcgcattccttcgaagaagtccaacttgtggagtctggagggggcctggtgcagcccggcggctctctcagactgtcttgtgcggcaagcggctacaccttcacctcttactggatagaatgggtgaggcaggcacctggaaagggactggagtggattggagagattctgccaggagggggagatacaaattacaatgaaatcttcaaggggcgggccaccttttcagcggataccagcaagaatacagcttacctgcagatgaatagcctccgggcagaagataccgctgtttattattgcacgagacgggtgccaataagactggactattgggggcaagggactcttgtcaccgtcagttcaacgcgtcagagttttgggttgttggaccctaaattgtgctatctgttggacggaatcctgttcatttacggagtgatcctgaccgcattgttcctgcgggttaagttttccagatccgcagacgcacccgcttaccaacaagggcagaaccaactctacaatgaacttaatttggggcggagggaagagtacgacgttctggacaaaaggaggggacgagatcccgagatgggcggaaagcctcagcgaaggaagaatccgcaagaggggctttataacgaactccagaaagataaaatggcagaagcctatagtgagattgggatgaagggagaaaggaggaggggtaaaggtcacgatgggttgtaccaaggattgagcacagccactaaagatacctatgatgcgctccacatgcaggccctgccgccaaga

SEQ ID NO: 38274 - DNA, 1941 bp, synthetic construct
  source 1..1941: mol_type = other DNA
atggccttaccagtgaccgccttgctcctgccgctggccttgctgctccacgccgccaggccggacatcgtgatgacacagagccctgatagcctggccgtgtctctgggagagagagccaccattaactgcaaggccagccagagcgtggactacgacggcgacagcttcctgaactggtatcagcagaagcccggccagcctcctaagctgctgatctacgccgccagcaatctggaaagcggcgtgccaagcagattttccggctctggcagcggcaccgatttcaccctgacaatatccagcctccagcctgaggacgtggccgtgtactactgccagcagagcaacgacgaccctctgacctttggacagggcaccaaggtggaaatcaaactcgagggacagcctaaggccaatcctaccgtgacactgttccctccaagcagcgaagaactccaggccaacaaggccacacttgtgtgcctgatctccgacttctaccctggggctgtgacagtggcttggaaggccgatggatctcctgtgaaagccggcgtggaaaccaccaagccatccaagcagagcaacaacaaatacgccgccagctcctacctgagcctgacacctgagcagtggaagtcccacagatcctacagctgccaagtgacccacgaaggcagcaccgtggaaaagacagtggcccctacagagtgcagccccatcaagaccgatgtgattacaatggaccccaaggacaactgctccaaggacgccaacgataccctgctgctccagctgaccaacaccagcgcctactacatgtacttgttgctgctgctgaagtccgtggtgtacttcgccatcatcacatgctgcctgctgcggagaaccgccttctgctgcaacggcgagaagtctagggccaagcgatctggatctggagcaacaaacttctcactactcaaacaagcaggtgacgtggaggagaatcccgggcctactagtatggactggatttggcgcatccttttccttgtcggcgctgctaccggcgcgcattccttcgaagaagtccaacttgtggagtctggagggggcctggtgcagcccggcggctctctcagactgtcttgtgcggcaagcggctacaccttcacctcttactggatagaatgggtgaggcaggcacctggaaagggactggagtggattggagagattctgccaggagggggagatacaaattacaatgaaatcttcaaggggcgggccaccttttcagcggataccagcaagaatacagcttacctgcagatgaatagcctccgggcagaagataccgctgtttattattgcacgagacgggtgccaataagactggactattgggggcaagggactcttgtcaccgtcagttcaacgcgtgcctctacaaagggaccctccgtgtttcctctggctcccagcagcaagtctacaagcggaggaacagccgctctgggctgcctggtcaaggattactttcccgagcctgtgaccgtgtcctggaatagcggagcactgacaagcggcgtgcacacctttccagccgtgctgcaaagcagcggcctgtactctctgagcagcgtggtcacagtgcctagctctagcctgggcacccagacctacatctgcaatgtgaaccacaagcctagcaacaccaaggtggacaagagagtggaacccaagagctgtgaagtgaaaaccgactccaccgaccacgtgaagcccaaagagacagagaacaccaagcagcccagcaagagctgccacaagcccaaggccatcgtgcacaccgagaaagtgaacatgatgagcctgaccgtgctgggcctgcggatgctgttcgccaaaaccgtggccgtgaacttcctgctgaccgccaagctgttcttcctc

SEQ ID NO: 38275 - DNA, 1875 bp, synthetic construct
  source 1..1875: mol_type = other DNA
atggccttaccagtgaccgccttgctcctgccgctggccttgctgctccacgccgccaggccggacatcgtgatgacacagagccctgatagcctggccgtgtctctgggagagagagccaccattaactgcaaggccagccagagcgtggactacgacggcgacagcttcctgaactggtatcagcagaagcccggccagcctcctaagctgctgatctacgccgccagcaatctggaaagcggcgtgccaagcagattttccggctctggcagcggcaccgatttcaccctgacaatatccagcctccagcctgaggacgtggccgtgtactactgccagcagagcaacgacgaccctctgacctttggacagggcaccaaggtggaaatcaaactcgagggacagcctaaggccaatcctaccgtgacactgttccctccaagcagcgaagaactccaggccaacaaggccacacttgtgtgcctgatctccgacttctaccctggggctgtgacagtggcttggaaggccgatggatctcctgtgaaagccggcgtggaaaccaccaagccatccaagcagagcaacaacaaatacgccgccagctcctacctgagcctgacacctgagcagtggaagtcccacagatcctacagctgccaagtgacccacgaaggcagcaccgtggaaaagacagtggcccctacagagtgcagcggcagagccgattgcggcatcaccagcgccagctaccaccagggcgtgctgagcgccaccatcctgtacgagatcctgctgggcaaggccaccctgtacgccgtgctggtgtctgccctggtgctgatggctatggtcaagcggaaggacagccggggaagggccaagcgatctggatctggagcaacaaacttctcactactcaaacaagcaggtgacgtggaggagaatcccgggcctactagtatggactggatttggcgcatccttttccttgtcggcgctgctaccggcgcgcattccttcgaagaagtccaacttgtggagtctggagggggcctggtgcagcccggcggctctctcagactgtcttgtgcggcaagcggctacaccttcacctcttactggatagaatgggtgaggcaggcacctggaaagggactggagtggattggagagattctgccaggagggggagatacaaattacaatgaaatcttcaaggggcgggccaccttttcagcggataccagcaagaatacagcttacctgcagatgaatagcctccgggcagaagataccgctgtttattattgcacgagacgggtgccaataagactggactattgggggcaagggactcttgtcaccgtcagttcaacgcgtgcctctacaaagggaccctccgtgtttcctctggctcccagcagcaagtctacaagcggaggaacagccgctctgggctgcctggtcaaggattactttcccgagcctgtgaccgtgtcctggaatagcggagcactgacaagcggcgtgcacacctttccagccgtgctgcaaagcagcggcctgtactctctgagcagcgtggtcacagtgcctagctctagcctgggcacccagacctacatctgcaatgtgaaccacaagcctagcaacaccaaggtggacaagagagtggaacccaagagctgtatccccgaggacacattcttcccaagcagcgacgtgccctgcgacgtgaagctggtggaaaagagcttcgagacagacaccaacctgaacttccagaacctgagcgtgatcggcttcagaatcctgctgctgaaagtggccggctttaacctgctgatgaccctgcggctgtggtccagc

SEQ ID NO: 38276 - DNA, 1875 bp, synthetic construct
  source 1..1875: mol_type = other DNA
atggccttaccagtgaccgccttgctcctgccgctggccttgctgctccacgccgccaggccggacatcgtgatgacacagagccctgatagcctggccgtgtctctgggagagagagccaccattaactgcaaggccagccagagcgtggactacgacggcgacagcttcctgaactggtatcagcagaagcccggccagcctcctaagctgctgatctacgccgccagcaatctggaaagcggcgtgccaagcagattttccggctctggcagcggcaccgatttcaccctgacaatatccagcctccagcctgaggacgtggccgtgtactactgccagcagagcaacgacgaccctctgacctttggacagggcaccaaggtggaaatcaaactcgagggacagcctaaggccaatcctaccgtgacactgttccctccaagcagcgaagaactccaggccaacaaggccacacttgtgtgcctgatctccgacttctaccctggggctgtgacagtggcttggaaggccgatggatctcctgtgaaagccggcgtggaaaccaccaagccatccaagcagagcaacaacaaatacgccgccagctcctacctgagcctgacacctgagcagtggaagtcccacagatcctacagctgccaagtgacccacgaaggcagcaccgtggaaaagacagtggcccctacagagtgcagcggcagagccgattgcggctttaccagcgagagctaccagcagggcgtgctgagcgccaccatcctgtacgagatcctgctgggcaaggccaccctgtacgccgtgctggtgtctgccctggtgctgatggctatggtcaagcggaaggacagccggggaagggccaagcgatctggatctggagcaacaaacttctcactactcaaacaagcaggtgacgtggaggagaatcccgggcctactagtatggactggatttggcgcatccttttccttgtcggcgctgctaccggcgcgcattccttcgaagaagtccaacttgtggagtctggagggggcctggtgcagcccggcggctctctcagactgtcttgtgcggcaagcggctacaccttcacctcttactggatagaatgggtgaggcaggcacctggaaagggactggagtggattggagagattctgccaggagggggagatacaaattacaatgaaatcttcaaggggcgggccaccttttcagcggataccagcaagaatacagcttacctgcagatgaatagcctccgggcagaagataccgctgtttattattgcacgagacgggtgccaataagactggactattgggggcaagggactcttgtcaccgtcagttcaacgcgtgcctctacaaagggaccctccgtgtttcctctggctcccagcagcaagtctacaagcggaggaacagccgctctgggctgcctggtcaaggattactttcccgagcctgtgaccgtgtcctggaatagcggagcactgacaagcggcgtgcacacctttccagccgtgctgcaaagcagcggcctgtactctctgagcagcgtggtcacagtgcctagctctagcctgggcacccagacctacatctgcaatgtgaaccacaagcctagcaacaccaaggtggacaagagagtggaacccaagagctgtatccccgaggacacattcttcccaagccccgagagcagctgcgacgtgaagctggtggaaaagagcttcgagacagacaccaacctgaacttccagaacctgagcgtgatcggcttcagaatcctgctgctgaaagtggccggctttaacctgctgatgaccctgcggctgtggtccagc

SEQ ID NO: 38277 - DNA, 1353 bp, synthetic construct
  source 1..1353: mol_type = other DNA
atggccttaccagtgaccgccttgctcctgccgctggccttgctgctccacgccgccaggccggacatcgtgatgacacagagccctgatagcctggccgtgtctctgggagagagagccaccattaactgcaaggccagccagagcgtggactacgacggcgacagcttcctgaactggtatcagcagaagcccggccagcctcctaagctgctgatctacgccgccagcaatctggaaagcggcgtgccaagcagattttccggctctggcagcggcaccgatttcaccctgacaatatccagcctccagcctgaggacgtggccgtgtactactgccagcagagcaacgacgaccctctgacctttggacagggcaccaaggtggaaatcaaaggcggaggcggaagtggaggcggaggatctggcggcggaggctctgaagtccaacttgtggagtctggagggggcctggtgcagcccggcggctctctcagactgtcttgtgcggcaagcggctacaccttcacctcttactggatagaatgggtgaggcaggcacctggaaagggactggagtggattggagagattctgccaggagggggagatacaaattacaatgaaatcttcaaggggcgggccaccttttcagcggataccagcaagaatacagcttacctgcagatgaatagcctccgggcagaagataccgctgtttattattgcacgagacgggtgccaataagactggactattgggggcaagggactcttgtcaccgtcagttcaacgcgtgacggtaacgaggagatgggaggaatcactcaaaccccttacaaagtctcaatttcaggaacaactgttatccttacatgtccccagtatcctggcagcgagatcctttggcagcataacgacaagaatatagggggagatgaagacgataagaatatcggatctgacgaggatcacttgagcctgaaagagttctccgagcttgaacaaagcggatattatgtgtgctatccgcgcgggtcaaagccggaagacgctaacttttacctttatctccgagccagagtgtgcgaaaattgcatggaaatggacgttatgtccgttgctacaatagttatcgtagatatatgcatcacgggtggactgcttctgctggtttattattggtccaagaatagaaaggccaaagctaaacccgtgaccagaggcgctggcgcaggcggaaggcaaaggggacaaaacaaagaacggccaccaccagtgccaaatccagattatgagcctattcggaaaggacagagggacctgtactctggcctgaatcagagaagaatc

SEQ ID NO: 38278 - DNA, 1248 bp, synthetic construct
  source 1..1248: mol_type = other DNA
atggccttaccagtgaccgccttgctcctgccgctggccttgctgctccacgccgccaggccggacatcgtgatgacacagagccctgatagcctggccgtgtctctgggagagagagccaccattaactgcaaggccagccagagcgtggactacgacggcgacagcttcctgaactggtatcagcagaagcccggccagcctcctaagctgctgatctacgccgccagcaatctggaaagcggcgtgccaagcagattttccggctctggcagcggcaccgatttcaccctgacaatatccagcctccagcctgaggacgtggccgtgtactactgccagcagagcaacgacgaccctctgacctttggacagggcaccaaggtggaaatcaaaggcggaggcggaagtggaggcggaggatctggcggcggaggctctgaagtccaacttgtggagtctggagggggcctggtgcagcccggcggctctctcagactgtcttgtgcggcaagcggctacaccttcacctcttactggatagaatgggtgaggcaggcacctggaaagggactggagtggattggagagattctgccaggagggggagatacaaattacaatgaaatcttcaaggggcgggccaccttttcagcggataccagcaagaatacagcttacctgcagatgaatagcctccgggcagaagataccgctgtttattattgcacgagacgggtgccaataagactggactattgggggcaagggactcttgtcaccgtcagttcaacgcgtttcaagatccccatcgaggaactggaagatcgggtgttcgtgaactgcaacacctctatcacctgggtggaaggcaccgtgggaacactgctgagcgacatcaccagactggacctcggcaagcggattctggaccctcggggcatctacagatgcaacggcaccgacatctacaaggacaaagaaagcaccgtgcaggtccactacagaatgtgccagtcctgcgtggaactggaccctgctacagtggccggcatcatcgtgaccgatgtgatcgctactctgctgctggctctgggagtgttctgcttcgccggacacgaaacaggcagactgtctggcgctgccgatacacaggccctgctgagaaacgaccaagtgtatcagcccctgcgcgacagagatgatgcccagtattctcacctcggcggcaactgggctagaaacaag

SEQ ID NO: 38279 - DNA, 1278 bp, synthetic construct
  source 1..1278: mol_type = other DNA
atggccttaccagtgaccgccttgctcctgccgctggccttgctgctccacgccgccaggccggacatcgtgatgacacagagccctgatagcctggccgtgtctctgggagagagagccaccattaactgcaaggccagccagagcgtggactacgacggcgacagcttcctgaactggtatcagcagaagcccggccagcctcctaagctgctgatctacgccgccagcaatctggaaagcggcgtgccaagcagattttccggctctggcagcggcaccgatttcaccctgacaatatccagcctccagcctgaggacgtggccgtgtactactgccagcagagcaacgacgaccctctgacctttggacagggcaccaaggtggaaatcaaaggcggaggcggaagtggaggcggaggatctggcggcggaggctctgaagtccaacttgtggagtctggagggggcctggtgcagcccggcggctctctcagactgtcttgtgcggcaagcggctacaccttcacctcttactggatagaatgggtgaggcaggcacctggaaagggactggagtggattggagagattctgccaggagggggagatacaaattacaatgaaatcttcaaggggcgggccaccttttcagcggataccagcaagaatacagcttacctgcagatgaatagcctccgggcagaagataccgctgtttattattgcacgagacgggtgccaataagactggactattgggggcaagggactcttgtcaccgtcagttcaacgcgtcagagcatcaagggcaaccacctggtcaaggtgtacgactaccaagaggacggcagcgtgctgctgacatgtgatgccgaggccaagaacatcacctggtttaaggacggcaagatgatcggcttcctgaccgaggacaagaagaagtggaacctgggcagcaacgctaaggaccccagaggcatgtatcagtgcaagggcagccagaacaagagcaagcccctccaggtgtactaccggatgtgccagaactgcatcgagctgaacgccgctaccatcagcggctttctgttcgccgagatcgtgtccatcttcgtgctggccgtgggcgtgtactttatcgctggacaggatggcgtgcggcagagcagagcttccgataagcaaaccctgctgcctaacgaccagctgtaccagcctctgaaggacagagaggacgaccagtacagccacctccagggcaatcagctgagaagaaac

SEQ ID NO: 38280 - DNA, 1227 bp, synthetic construct
  source 1..1227: mol_type = other DNA
atggccttaccagtgaccgccttgctcctgccgctggccttgctgctccacgccgccaggccggacatcgtgatgacacagagccctgatagcctggccgtgtctctgggagagagagccaccattaactgcaaggccagccagagcgtggactacgacggcgacagcttcctgaactggtatcagcagaagcccggccagcctcctaagctgctgatctacgccgccagcaatctggaaagcggcgtgccaagcagattttccggctctggcagcggcaccgatttcaccctgacaatatccagcctccagcctgaggacgtggccgtgtactactgccagcagagcaacgacgaccctctgacctttggacagggcaccaaggtggaaatcaaaggcggaggcggaagtggaggcggaggatctggcggcggaggctctgaagtccaacttgtggagtctggagggggcctggtgcagcccggcggctctctcagactgtcttgtgcggcaagcggctacaccttcacctcttactggatagaatgggtgaggcaggcacctggaaagggactggagtggattggagagattctgccaggagggggagatacaaattacaatgaaatcttcaaggggcgggccaccttttcagcggataccagcaagaatacagcttacctgcagatgaatagcctccgggcagaagataccgctgtttattattgcacgagacgggtgccaataagactggactattgggggcaagggactcttgtcaccgtcagttcaacgcgtcagagttttgggttgttggaccctaaattgtgctatctgttggacggaatcctgttcatttacggagtgatcctgaccgcattgttcctgcgggttaagttttccagatccgcagacgcacccgcttaccaacaagggcagaaccaactctacaatgaacttaatttggggcggagggaagagtacgacgttctggacaaaaggaggggacgagatcccgagatgggcggaaagcctcagcgaaggaagaatccgcaagaggggctttataacgaactccagaaagataaaatggcagaagcctatagtgagattgggatgaagggagaaaggaggaggggtaaaggtcacgatgggttgtaccaaggattgagcacagccactaaagatacctatgatgcgctccacatgcaggccctgccgccaaga

SEQ ID NO: 38281 - DNA, 1512 bp, synthetic construct
  source 1..1512: mol_type = other DNA
atggccttaccagtgaccgccttgctcctgccgctggccttgctgctccacgccgccaggccggacatcgtgatgacacagagccctgatagcctggccgtgtctctgggagagagagccaccattaactgcaaggccagccagagcgtggactacgacggcgacagcttcctgaactggtatcagcagaagcccggccagcctcctaagctgctgatctacgccgccagcaatctggaaagcggcgtgccaagcagattttccggctctggcagcggcaccgatttcaccctgacaatatccagcctccagcctgaggacgtggccgtgtactactgccagcagagcaacgacgaccctctgacctttggacagggcaccaaggtggaaatcaaaggcggaggcggaagtggaggcggaggatctggcggcggaggctctgaagtccaacttgtggagtctggagggggcctggtgcagcccggcggctctctcagactgtcttgtgcggcaagcggctacaccttcacctcttactggatagaatgggtgaggcaggcacctggaaagggactggagtggattggagagattctgccaggagggggagatacaaattacaatgaaatcttcaaggggcgggccaccttttcagcggataccagcaagaatacagcttacctgcagatgaatagcctccgggcagaagataccgctgtttattattgcacgagacgggtgccaataagactggactattgggggcaagggactcttgtcaccgtcagttcaacgcgtggaatgaggactgaggatcttcccaaagctgtcgtctttctcgaaccccaatggtatcgggtgctcgaaaaagactctgtgacactgaaatgccaaggggcctactctcccgaggacaactccacacagtggtttcataatgagtccctcatcagctctcaggccagctcttatttcattgatgccgctacagtggacgactccggcgagtatcggtgtcagaccaatctgtctacactgtctgaccccgtgcagcttgaggtccacattggatggttgctcttgcaagccccacgctgggttttcaaagaggaagatccaatccatctgcggtgccacagctggaaaaacaccgctctccacaaagtcacatacctgcaaaatggcaaaggacgcaaatacttccatcacaattccgatttttacattccgaaggctaccctgaaagacagcggcagctatttctgccggggactcgtcggctccaagaatgtgtcctccgaaaccgtgaatatcacgattacccaaggactggctgtgcctacaatctctagcttctttccgcctggataccaagtctccttctgtcttgtgatggtcctcctgtttgctgtggacacaggactgtacttttccgtgaaaacgaacatccgcagctccacacgcgattggaaagatcacaagtttaaatggcgcaaagatccccaggacaag

SEQ ID NO: 38282 - DNA, 1437 bp, synthetic construct
  source 1..1437: mol_type = other DNA
atggccttaccagtgaccgccttgctcctgccgctggccttgctgctccacgccgccaggccggacatcgtgatgacacagagccctgatagcctggccgtgtctctgggagagagagccaccattaactgcaaggccagccagagcgtggactacgacggcgacagcttcctgaactggtatcagcagaagcccggccagcctcctaagctgctgatctacgccgccagcaatctggaaagcggcgtgccaagcagattttccggctctggcagcggcaccgatttcaccctgacaatatccagcctccagcctgaggacgtggccgtgtactactgccagcagagcaacgacgaccctctgacctttggacagggcaccaaggtggaaatcaaaggcggaggcggaagtggaggcggaggatctggcggcggaggctctgaagtccaacttgtggagtctggagggggcctggtgcagcccggcggctctctcagactgtcttgtgcggcaagcggctacaccttcacctcttactggatagaatgggtgaggcaggcacctggaaagggactggagtggattggagagattctgccaggagggggagatacaaattacaatgaaatcttcaaggggcgggccaccttttcagcggataccagcaagaatacagcttacctgcagatgaatagcctccgggcagaagataccgctgtttattattgcacgagacgggtgccaataagactggactattgggggcaagggactcttgtcaccgtcagttcaacgcgtggaatgaggactgaggatcttcccaaagctgtcgtctttctcgaaccccaatggtatcgggtgctcgaaaaagactctgtgacactgaaatgccaaggggcctactctcccgaggacaactccacacagtggtttcataatgagtccctcatcagctctcaggccagctcttatttcattgatgccgctacagtggacgactccggcgagtatcggtgtcagaccaatctgtctacactgtctgaccccgtgcagcttgaggtccacattggatggttgctcttgcaagccccacgctgggttttcaaagaggaagatccaatccatctgcggtgccacagctggaaaaacaccgctctccacaaagtcacatacctgcaaaatggcaaaggacgcaaatacttccatcacaattccgatttttacattccgaaggctaccctgaaagacagcggcagctatttctgccggggactcgtcggctccaagaatgtgtcctccgaaaccgtgaatatcacgattacccaaggactggctgtgcctacaatctctagcttctttccgcctggataccaagtctccttctgtcttgtgatggtcctcctgtttgctgtggacacaggactgtacttttccgtg

SEQ ID NO: 38283 - DNA, 1440 bp, synthetic construct
  source 1..1440: mol_type = other DNA
atggccttaccagtgaccgccttgctcctgccgctggccttgctgctccacgccgccaggccggacatcgtgatgacacagagccctgatagcctggccgtgtctctgggagagagagccaccattaactgcaaggccagccagagcgtggactacgacggcgacagcttcctgaactggtatcagcagaagcccggccagcctcctaagctgctgatctacgccgccagcaatctggaaagcggcgtgccaagcagattttccggctctggcagcggcaccgatttcaccctgacaatatccagcctccagcctgaggacgtggccgtgtactactgccagcagagcaacgacgaccctctgacctttggacagggcaccaaggtggaaatcaaaggcggaggcggaagtggaggcggaggatctggcggcggaggctctgaagtccaacttgtggagtctggagggggcctggtgcagcccggcggctctctcagactgtcttgtgcggcaagcggctacaccttcacctcttactggatagaatgggtgaggcaggcacctggaaagggactggagtggattggagagattctgccaggagggggagatacaaattacaatgaaatcttcaaggggcgggccaccttttcagcggataccagcaagaatacagcttacctgcagatgaatagcctccgggcagaagataccgctgtttattattgcacgagacgggtgccaataagactggactattgggggcaagggactcttgtcaccgtcagttcaacgcgtggaatgaggactgaggatcttcccaaagctgtcgtctttctcgaaccccaatggtatcgggtgctcgaaaaagactctgtgacactgaaatgccaaggggcctactctcccgaggacaactccacacagtggtttcataatgagtccctcatcagctctcaggccagctcttatttcattgatgccgctacagtggacgactccggcgagtatcggtgtcagaccaatctgtctacactgtctgaccccgtgcagcttgaggtccacattggatggttgctcttgcaagccccacgctgggttttcaaagaggaagatccaatccatctgcggtgccacagctggaaaaacaccgctctccacaaagtcacatacctgcaaaatggcaaaggacgcaaatacttccatcacaattccgatttttacattccgaaggctaccctgaaagacagcggcagctatttctgccggggactcgtcggctccaagaatgtgtcctccgaaaccgtgaatatcacgattacccaaggactggctgtgcctacaatctctagcttctttccgcctggataccaagtctccttctgtcttgtgatggtcctcctgtttgctgtggacacaggactgtacttttccgtgaaa

SEQ ID NO: 38284 - DNA, 2172 bp, synthetic construct
  source 1..2172: mol_type = other DNA
atggccttaccagtgaccgccttgctcctgccgctggccttgctgctccacgccgccaggccggacatcgtgatgacacagagccctgatagcctggccgtgtctctgggagagagagccaccattaactgcaaggccagccagagcgtggactacgacggcgacagcttcctgaactggtatcagcagaagcccggccagcctcctaagctgctgatctacgccgccagcaatctggaaagcggcgtgccaagcagattttccggctctggcagcggcaccgatttcaccctgacaatatccagcctccagcctgaggacgtggccgtgtactactgccagcagagcaacgacgaccctctgacctttggacagggcaccaaggtggaaatcaaactcgagggacagcctaaggccaatcctaccgtgacactgttccctccaagcagcgaagaactccaggccaacaaggccacacttgtgtgcctgatctccgacttctaccctggggctgtgacagtggcttggaaggccgatggatctcctgtgaaagccggcgtggaaaccaccaagccatccaagcagagcaacaacaaatacgccgccagctcctacctgagcctgacacctgagcagtggaagtcccacagatcctacagctgccaagtgacccacgaaggcagcaccgtggaaaagacagtggcccctacagagtgcagcggatcccagagcttcggcctgctggaccccaagctgtgctacctgctggatggcatcctgttcatctacggcgtgatcctgaccgccctgttcctgagagtgaagttcagcagaagcgccgacgcccctgcctaccagcagggacagaaccaactgtacaacgagctgaacctgggcagacgggaagagtacgacgtgctggacaagcggagaggcagggaccctgagatgggcggaaagccccagcggagaaagaacccccaggaaggactgtataacgaactccagaaagacaagatggccgaagcctacagcgagatcggcatgaagggcgagcggagaagaggcaagggccacgatggcctgtaccagggcctgagcaccgccaccaaggacacctatgacgccctgcacatgcaggccctgcctccaagaagggccaagcgatctggatctggagcaacaaacttctcactactcaaacaagcaggtgacgtggaggagaatcccgggcctactagtatggactggatttggcgcatccttttccttgtcggcgctgctaccggcgcgcattccttcgaagaagtccaacttgtggagtctggagggggcctggtgcagcccggcggctctctcagactgtcttgtgcggcaagcggctacaccttcacctcttactggatagaatgggtgaggcaggcacctggaaagggactggagtggattggagagattctgccaggagggggagatacaaattacaatgaaatcttcaaggggcgggccaccttttcagcggataccagcaagaatacagcttacctgcagatgaatagcctccgggcagaagataccgctgtttattattgcacgagacgggtgccaataagactggactattgggggcaagggactcttgtcaccgtcagttcaacgcgtgcctctacaaagggaccctccgtgtttcctctggctcccagcagcaagtctacaagcggaggaacagccgctctgggctgcctggtcaaggattactttcccgagcctgtgaccgtgtcctggaatagcggagcactgacaagcggcgtgcacacctttccagccgtgctgcaaagcagcggcctgtactctctgagcagcgtggtcacagtgcctagctctagcctgggcacccagacctacatctgcaatgtgaaccacaagcctagcaacaccaaggtggacaagagagtggaacccaagagctgtggtaccatcactcaaggtttggcagtgtcaaccatctcatcattctttccacctggctaccaagtgtccttctgcctggtcatggtgctgctgttcgccgtggataccggcctgtacttcagcgtcaagaccaacatccggtccagcaccagagactggaaggaccacaagttcaagtggcggaaggaccctcaggacaag

SEQ ID NO: 38285 - DNA, 2217 bp, synthetic construct
  source 1..2217: mol_type = other DNA
atggccttaccagtgaccgccttgctcctgccgctggccttgctgctccacgccgccaggccggacatcgtgatgacacagagccctgatagcctggccgtgtctctgggagagagagccaccattaactgcaaggccagccagagcgtggactacgacggcgacagcttcctgaactggtatcagcagaagcccggccagcctcctaagctgctgatctacgccgccagcaatctggaaagcggcgtgccaagcagattttccggctctggcagcggcaccgatttcaccctgacaatatccagcctccagcctgaggacgtggccgtgtactactgccagcagagcaacgacgaccctctgacctttggacagggcaccaaggtggaaatcaaactcgaggacctgaagaacgtgttcccacctgaggtggccgtgttcgagcctagcgaggccgagatcagccacacccagaaagccaccctcgtgtgcctggctaccggcttctaccccgaccatgtggaactgtcttggtgggtcaacggcaaagaggtgcacagcggcgtgtctaccgacccccagccactgaaagaacagcccgccctgaacgacagccggtactgcctgagcagcagactgagagtgtccgccaccttctggcagaacccccggaaccacttcagatgccaggtgcagttctacggcctgagcgagaacgacgagtggacccaggacagagccaagcccgtgacccagatcgtgtctgccgaagcctggggcagagccgattgcggatcccagagcttcggcctgctggaccccaagctgtgctacctgctggatggcatcctgttcatctacggcgtgatcctgaccgccctgttcctgagagtgaagttcagcagaagcgccgacgcccctgcctaccagcagggacagaaccaactgtacaacgagctgaacctgggcagacgggaagagtacgacgtgctggacaagcggagaggcagggaccctgagatgggcggaaagccccagcggagaaagaacccccaggaaggactgtataacgaactccagaaagacaagatggccgaagcctacagcgagatcggcatgaagggcgagcggagaagaggcaagggccacgatggcctgtaccagggcctgagcaccgccaccaaggacacctatgacgccctgcacatgcaggccctgcctccaagaagggccaagcgatctggatctggagcaacaaacttctcactactcaaacaagcaggtgacgtggaggagaatcccgggcctactagtatggactggatttggcgcatccttttccttgtcggcgctgctaccggcgcgcattccttcgaagaagtccaacttgtggagtctggagggggcctggtgcagcccggcggctctctcagactgtcttgtgcggcaagcggctacaccttcacctcttactggatagaatgggtgaggcaggcacctggaaagggactggagtggattggagagattctgccaggagggggagatacaaattacaatgaaatcttcaaggggcgggccaccttttcagcggataccagcaagaatacagcttacctgcagatgaatagcctccgggcagaagataccgctgtttattattgcacgagacgggtgccaataagactggactattgggggcaagggactcttgtcaccgtcagttcaacgcgtatccagaaccctgatcctgccgtgtaccagctgcgggatagcaagagcagcgacaagagcgtgtgtctgttcaccgacttcgacagccagaccaacgtgtcccagagcaaggactccgacgtgtacatcaccgataagaccgtgctggacatgcggagcatggacttcaagagcaactccgccgtggcctggtccaacaagtccgatttcgcctgcgccaacgccttcaacaacagcattatccccgaggacacattcttcccaagccccgagagcagctgcggtaccatcactcaaggtttggcagtgtcaaccatctcatcattctttccacctggctaccaagtgtccttctgcctggtcatggtgctgctgttcgccgtggataccggcctgtacttcagcgtcaagaccaacatccggtccagcaccagagactggaaggaccacaagttcaagtggcggaaggaccctcaggacaag

SEQ ID NO: 38286 - DNA, 2142 bp, synthetic construct
  source 1..2142: mol_type = other DNA
atggccttaccagtgaccgccttgctcctgccgctggccttgctgctccacgccgccaggccggacatcgtgatgacacagagccctgatagcctggccgtgtctctgggagagagagccaccattaactgcaaggccagccagagcgtggactacgacggcgacagcttcctgaactggtatcagcagaagcccggccagcctcctaagctgctgatctacgccgccagcaatctggaaagcggcgtgccaagcagattttccggctctggcagcggcaccgatttcaccctgacaatatccagcctccagcctgaggacgtggccgtgtactactgccagcagagcaacgacgaccctctgacctttggacagggcaccaaggtggaaatcaaactcgaggacctgaagaacgtgttcccacctgaggtggccgtgttcgagcctagcgaggccgagatcagccacacccagaaagccaccctcgtgtgcctggctaccggcttctaccccgaccatgtggaactgtcttggtgggtcaacggcaaagaggtgcacagcggcgtgtctaccgacccccagccactgaaagaacagcccgccctgaacgacagccggtactgcctgagcagcagactgagagtgtccgccaccttctggcagaacccccggaaccacttcagatgccaggtgcagttctacggcctgagcgagaacgacgagtggacccaggacagagccaagcccgtgacccagatcgtgtctgccgaagcctggggcagagccgattgcggatcccagagcttcggcctgctggaccccaagctgtgctacctgctggatggcatcctgttcatctacggcgtgatcctgaccgccctgttcctgagagtgaagttcagcagaagcgccgacgcccctgcctaccagcagggacagaaccaactgtacaacgagctgaacctgggcagacgggaagagtacgacgtgctggacaagcggagaggcagggaccctgagatgggcggaaagccccagcggagaaagaacccccaggaaggactgtataacgaactccagaaagacaagatggccgaagcctacagcgagatcggcatgaagggcgagcggagaagaggcaagggccacgatggcctgtaccagggcctgagcaccgccaccaaggacacctatgacgccctgcacatgcaggccctgcctccaagaagggccaagcgatctggatctggagcaacaaacttctcactactcaaacaagcaggtgacgtggaggagaatcccgggcctactagtatggactggatttggcgcatccttttccttgtcggcgctgctaccggcgcgcattccttcgaagaagtccaacttgtggagtctggagggggcctggtgcagcccggcggctctctcagactgtcttgtgcggcaagcggctacaccttcacctcttactggatagaatgggtgaggcaggcacctggaaagggactggagtggattggagagattctgccaggagggggagatacaaattacaatgaaatcttcaaggggcgggccaccttttcagcggataccagcaagaatacagcttacctgcagatgaatagcctccgggcagaagataccgctgtttattattgcacgagacgggtgccaataagactggactattgggggcaagggactcttgtcaccgtcagttcaacgcgtatccagaaccctgatcctgccgtgtaccagctgcgggatagcaagagcagcgacaagagcgtgtgtctgttcaccgacttcgacagccagaccaacgtgtcccagagcaaggactccgacgtgtacatcaccgataagaccgtgctggacatgcggagcatggacttcaagagcaactccgccgtggcctggtccaacaagtccgatttcgcctgcgccaacgccttcaacaacagcattatccccgaggacacattcttcccaagccccgagagcagctgcggtaccatcactcaaggtttggcagtgtcaaccatctcatcattctttccacctggctaccaagtgtccttctgcctggtcatggtgctgctgttcgccgtggataccggcctgtacttcagcgtc

SEQ ID NO: 38287 - DNA, 2145 bp, synthetic construct
  source 1..2145: mol_type = other DNA
atggccttaccagtgaccgccttgctcctgccgctggccttgctgctccacgccgccaggccggacatcgtgatgacacagagccctgatagcctggccgtgtctctgggagagagagccaccattaactgcaaggccagccagagcgtggactacgacggcgacagcttcctgaactggtatcagcagaagcccggccagcctcctaagctgctgatctacgccgccagcaatctggaaagcggcgtgccaagcagattttccggctctggcagcggcaccgatttcaccctgacaatatccagcctccagcctgaggacgtggccgtgtactactgccagcagagcaacgacgaccctctgacctttggacagggcaccaaggtggaaatcaaactcgaggacctgaagaacgtgttcccacctgaggtggccgtgttcgagcctagcgaggccgagatcagccacacccagaaagccaccctcgtgtgcctggctaccggcttctaccccgaccatgtggaactgtcttggtgggtcaacggcaaagaggtgcacagcggcgtgtctaccgacccccagccactgaaagaacagcccgccctgaacgacagccggtactgcctgagcagcagactgagagtgtccgccaccttctggcagaacccccggaaccacttcagatgccaggtgcagttctacggcctgagcgagaacgacgagtggacccaggacagagccaagcccgtgacccagatcgtgtctgccgaagcctggggcagagccgattgcggatcccagagcttcggcctgctggaccccaagctgtgctacctgctggatggcatcctgttcatctacggcgtgatcctgaccgccctgttcctgagagtgaagttcagcagaagcgccgacgcccctgcctaccagcagggacagaaccaactgtacaacgagctgaacctgggcagacgggaagagtacgacgtgctggacaagcggagaggcagggaccctgagatgggcggaaagccccagcggagaaagaacccccaggaaggactgtataacgaactccagaaagacaagatggccgaagcctacagcgagatcggcatgaagggcgagcggagaagaggcaagggccacgatggcctgtaccagggcctgagcaccgccaccaaggacacctatgacgccctgcacatgcaggccctgcctccaagaagggccaagcgatctggatctggagcaacaaacttctcactactcaaacaagcaggtgacgtggaggagaatcccgggcctactagtatggactggatttggcgcatccttttccttgtcggcgctgctaccggcgcgcattccttcgaagaagtccaacttgtggagtctggagggggcctggtgcagcccggcggctctctcagactgtcttgtgcggcaagcggctacaccttcacctcttactggatagaatgggtgaggcaggcacctggaaagggactggagtggattggagagattctgccaggagggggagatacaaattacaatgaaatcttcaaggggcgggccaccttttcagcggataccagcaagaatacagcttacctgcagatgaatagcctccgggcagaagataccgctgtttattattgcacgagacgggtgccaataagactggactattgggggcaagggactcttgtcaccgtcagttcaacgcgtatccagaaccctgatcctgccgtgtaccagctgcgggatagcaagagcagcgacaagagcgtgtgtctgttcaccgacttcgacagccagaccaacgtgtcccagagcaaggactccgacgtgtacatcaccgataagaccgtgctggacatgcggagcatggacttcaagagcaactccgccgtggcctggtccaacaagtccgatttcgcctgcgccaacgccttcaacaacagcattatccccgaggacacattcttcccaagccccgagagcagctgcggtaccatcactcaaggtttggcagtgtcaaccatctcatcattctttccacctggctaccaagtgtccttctgcctggtcatggtgctgctgttcgccgtggataccggcctgtacttcagcgtcaag

SEQ ID NO: 38288 - DNA, 2148 bp, synthetic construct
  source 1..2148: mol_type = other DNA
atggccttaccagtgaccgccttgctcctgccgctggccttgctgctccacgccgccaggccggacatcgtgatgacacagagccctgatagcctggccgtgtctctgggagagagagccaccattaactgcaaggccagccagagcgtggactacgacggcgacagcttcctgaactggtatcagcagaagcccggccagcctcctaagctgctgatctacgccgccagcaatctggaaagcggcgtgccaagcagattttccggctctggcagcggcaccgatttcaccctgacaatatccagcctccagcctgaggacgtggccgtgtactactgccagcagagcaacgacgaccctctgacctttggacagggcaccaaggtggaaatcaaactcgaggacctgaagaacgtgttcccacctgaggtggccgtgttcgagcctagcgaggccgagatcagccacacccagaaagccaccctcgtgtgcctggctaccggcttctaccccgaccatgtggaactgtcttggtgggtcaacggcaaagaggtgcacagcggcgtgtctaccgacccccagccactgaaagaacagcccgccctgaacgacagccggtactgcctgagcagcagactgagagtgtccgccaccttctggcagaacccccggaaccacttcagatgccaggtgcagttctacggcctgagcgagaacgacgagtggacccaggacagagccaagcccgtgacccagatcgtgtctgccgaagcctggggcagagccgattgcggatcccagagcttcggcctgctggaccccaagctgtgctacctgctggatggcatcctgttcatctacggcgtgatcctgaccgccctgttcctgagagtgaagttcagcagaagcgccgacgcccctgcctaccagcagggacagaaccaactgtacaacgagctgaacctgggcagacgggaagagtacgacgtgctggacaagcggagaggcagggaccctgagatgggcggaaagccccagcggagaaagaacccccaggaaggactgtataacgaactccagaaagacaagatggccgaagcctacagcgagatcggcatgaagggcgagcggagaagaggcaagggccacgatggcctgtaccagggcctgagcaccgccaccaaggacacctatgacgccctgcacatgcaggccctgcctccaagaagggccaagcgatctggatctggagcaacaaacttctcactactcaaacaagcaggtgacgtggaggagaatcccgggcctactagtatggactggatttggcgcatccttttccttgtcggcgctgctaccggcgcgcattccttcgaagaagtccaacttgtggagtctggagggggcctggtgcagcccggcggctctctcagactgtcttgtgcggcaagcggctacaccttcacctcttactggatagaatgggtgaggcaggcacctggaaagggactggagtggattggagagattctgccaggagggggagatacaaattacaatgaaatcttcaaggggcgggccaccttttcagcggataccagcaagaatacagcttacctgcagatgaatagcctccgggcagaagataccgctgtttattattgcacgagacgggtgccaataagactggactattgggggcaagggactcttgtcaccgtcagttcaacgcgtatccagaaccctgatcctgccgtgtaccagctgcgggatagcaagagcagcgacaagagcgtgtgtctgttcaccgacttcgacagccagaccaacgtgtcccagagcaaggactccgacgtgtacatcaccgataagaccgtgctggacatgcggagcatggacttcaagagcaactccgccgtggcctggtccaacaagtccgatttcgcctgcgccaacgccttcaacaacagcattatccccgaggacacattcttcccaagccccgagagcagctgcggtaccatcactcaaggtttggcagtgtcaaccatctcatcattctttccacctggctaccaagtgtccttctgcctggtcatggtgctgctgttcgccgtggataccggcctgtacttcagcgtcaagacc

SEQ ID NO: 38289 - DNA, 1959 bp, synthetic construct
  source 1..1959: mol_type = other DNA
atggccttaccagtgaccgccttgctcctgccgctggccttgctgctccacgccgccaggccggacatcgtgatgacacagagccctgatagcctggccgtgtctctgggagagagagccaccattaactgcaaggccagccagagcgtggactacgacggcgacagcttcctgaactggtatcagcagaagcccggccagcctcctaagctgctgatctacgccgccagcaatctggaaagcggcgtgccaagcagattttccggctctggcagcggcaccgatttcaccctgacaatatccagcctccagcctgaggacgtggccgtgtactactgccagcagagcaacgacgaccctctgacctttggacagggcaccaaggtggaaatcaaactcgagggacagcctaaggccaatcctaccgtgacactgttccctccaagcagcgaagaactccaggccaacaaggccacacttgtgtgcctgatctccgacttctaccctggggctgtgacagtggcttggaaggccgatggatctcctgtgaaagccggcgtggaaaccaccaagccatccaagcagagcaacaacaaatacgccgccagctcctacctgagcctgacacctgagcagtggaagtcccacagatcctacagctgccaagtgacccacgaaggcagcaccgtggaaaagacagtggcccctacagagtgcagcggatccctgggagagcctcagctgtgctatatcctggacgccatcctgtttctgtacggcatcgtgctgaccctgctgtactgccggctgaagatccaagtgcggaaggccgccatcaccagctacgagaaatccgacggcgtgtacaccggcctgagcaccagaaatcaagagacatacgagacactgaagcacgaaaagcctccacaaagggccaagcgatctggatctggagcaacaaacttctcactactcaaacaagcaggtgacgtggaggagaatcccgggcctactagtatggactggatttggcgcatccttttccttgtcggcgctgctaccggcgcgcattccttcgaagaagtccaacttgtggagtctggagggggcctggtgcagcccggcggctctctcagactgtcttgtgcggcaagcggctacaccttcacctcttactggatagaatgggtgaggcaggcacctggaaagggactggagtggattggagagattctgccaggagggggagatacaaattacaatgaaatcttcaaggggcgggccaccttttcagcggataccagcaagaatacagcttacctgcagatgaatagcctccgggcagaagataccgctgtttattattgcacgagacgggtgccaataagactggactattgggggcaagggactcttgtcaccgtcagttcaacgcgtgcctctacaaagggaccctccgtgtttcctctggctcccagcagcaagtctacaagcggaggaacagccgctctgggctgcctggtcaaggattactttcccgagcctgtgaccgtgtcctggaatagcggagcactgacaagcggcgtgcacacctttccagccgtgctgcaaagcagcggcctgtactctctgagcagcgtggtcacagtgcctagctctagcctgggcacccagacctacatctgcaatgtgaaccacaagcctagcaacaccaaggtggacaagagagtggaacccaagagctgtggtaccctcggagaaccacagctctgttacattctggatgctatcctgttcctctatgggatcgtcctgacactcctgtattgcagactcaaaattcaagttcgcaaagccgccattacctcttacgagaagagtgatggggtgtacacaggactgtctacccggaatcaagaaacctacgaaaccctcaaacatgagaagccacctcagtaa

SEQ ID NO: 38290 - DNA, 1866 bp, synthetic construct
  source 1..1866: mol_type = other DNA
atggccttaccagtgaccgccttgctcctgccgctggccttgctgctccacgccgccaggccggacatcgtgatgacacagagccctgatagcctggccgtgtctctgggagagagagccaccattaactgcaaggccagccagagcgtggactacgacggcgacagcttcctgaactggtatcagcagaagcccggccagcctcctaagctgctgatctacgccgccagcaatctggaaagcggcgtgccaagcagattttccggctctggcagcggcaccgatttcaccctgacaatatccagcctccagcctgaggacgtggccgtgtactactgccagcagagcaacgacgaccctctgacctttggacagggcaccaaggtggaaatcaaactcgaggacctgaagaacgtgttcccacctgaggtggccgtgttcgagcctagcgaggccgagatcagccacacccagaaagccaccctcgtgtgcctggctaccggcttctaccccgaccatgtggaactgtcttggtgggtcaacggcaaagaggtgcacagcggcgtgtgtaccgacccccagccactgaaagaacagcccgccctgaacgacagccggtactgcctgagcagcagactgagagtgtccgccaccttctggcagaacccccggaaccacttcagatgccaggtgcagttctacggcctgagcgagaacgacgagtggacccaggacagagccaagcccgtgacccagatcgtgtctgccgaagcctggggcagagccgattgcggctttaccagcgagagctaccagcagggcgtgctgagcgcctactacatgtacttgttgctgctgctgaagtccgtggtgtacttcgccatcatcacatgctgcctgctgcggagaaccgccttctgctgcaacggcgagaagtctagggccaagcgatctggatctggagcaacaaacttctcactactcaaacaagcaggtgacgtggaggagaatcccgggcctactagtatggactggatttggcgcatccttttccttgtcggcgctgctaccggcgcgcattccttcgaagaagtccaacttgtggagtctggagggggcctggtgcagcccggcggctctctcagactgtcttgtgcggcaagcggctacaccttcacctcttactggatagaatgggtgaggcaggcacctggaaagggactggagtggattggagagattctgccaggagggggagatacaaattacaatgaaatcttcaaggggcgggccaccttttcagcggataccagcaagaatacagcttacctgcagatgaatagcctccgggcagaagataccgctgtttattattgcacgagacgggtgccaataagactggactattgggggcaagggactcttgtcaccgtcagttcaacgcgtatccagaaccctgatcctgccgtgtaccagctgcgggatagcaagagcagcgacaagagcgtgtgtctgttcaccgacttcgacagccagaccaacgtgtcccagagcaaggactccgacgtgtacatcaccgataagtgcgtgctggacatgcggagcatggacttcaagagcaactccgccgtggcctggtccaacaagtccgatttcgcctgcgccaacgccttcaacaacagcattatccccgaggacacattcttcccaagccccgagagcagctgcgacgtgaagctggtggaaaagagcttcgagacagacaccaacctgaacttccagaacctgagcgtgatcggcttcagaatcctgctgctgaaagtggccggctttaacctgctgatgaccctgcggctgtggtccagc

SEQ ID NO: 38291 - DNA, 1887 bp, synthetic construct
  source 1..1887: mol_type = other DNA
atggccttaccagtgaccgccttgctcctgccgctggccttgctgctccacgccgccaggccggacatcgtgatgacacagagccctgatagcctggccgtgtctctgggagagagagccaccattaactgcaaggccagccagagcgtggactacgacggcgacagcttcctgaactggtatcagcagaagcccggccagcctcctaagctgctgatctacgccgccagcaatctggaaagcggcgtgccaagcagattttccggctctggcagcggcaccgatttcaccctgacaatatccagcctccagcctgaggacgtggccgtgtactactgccagcagagcaacgacgaccctctgacctttggacagggcaccaaggtggaaatcaaactcgaggacaagcagctggacgccgacgtgtcccccaagcctaccatcttcctgccctctatcgccgagacaaagctccagaaggccggcacctacctgtgcctgctggaaaagttcttcccagatgtgattaagatccactggcaggaaaagaagtccaacaccatcctgggcagccaggaaggcaacaccatgaagaccaacgacacctacatgaagttcagctggctgaccgtgcccgagaagtccctggacaaagaacacagatgcatcgtgcggcacgaaaacaacaagaacggcgtggaccaggaaatcatcttcccacccatcaagaccgatgtgattacaatggaccccaaggacaactgctccaaggacgccaacgataccctgctgctccagctgaccaacaccagcgcctactacatgtacgagatcctgctgggcaaggccaccctgtacgccgtgctggtgtctgccctggtgctgatggctatggtcaagcggaaggacagccggggaagggccaagcgatctggatctggagcaacaaacttctcactactcaaacaagcaggtgacgtggaggagaatcccgggcctactagtatggactggatttggcgcatccttttccttgtcggcgctgctaccggcgcgcattccttcgaagaagtccaacttgtggagtctggagggggcctggtgcagcccggcggctctctcagactgtcttgtgcggcaagcggctacaccttcacctcttactggatagaatgggtgaggcaggcacctggaaagggactggagtggattggagagattctgccaggagggggagatacaaattacaatgaaatcttcaaggggcgggccaccttttcagcggataccagcaagaatacagcttacctgcagatgaatagcctccgggcagaagataccgctgtttattattgcacgagacgggtgccaataagactggactattgggggcaagggactcttgtcaccgtcagttcaacgcgtagccagcctcacaccaagcccagcgtgttcgtgatgaagaacggcaccaacgtggcctgcctcgtgaaagagttctaccccaaggacatcaggatcaacctggtgtccagcaagaagatcaccgagttcgaccccgccatcgtgatctcccccagcggcaagtacaacgccgtgaagctggggaagtatgaggacagcaacagcgtgacctgctccgtgcagcacgacaacaagaccgtgcacagcaccgactttgaagtgaaaaccgactccaccgaccacgtgaagcccaaagagacagagaacaccaagcagcccagcaagagctgccacaagcccaaggccatcgtgcacaccgagaaagtgaacatgatgagcctgaccgtgatcggcttcagaatcctgctgctgaaagtggccggctttaacctgctgatgaccctgcggctgtggtccagctaa

SEQ ID NO: 38292 - DNA, 1887 bp, synthetic construct
  source 1..1887: mol_type = other DNA
atggccttaccagtgaccgccttgctcctgccgctggccttgctgctccacgccgccaggccggacatcgtgatgacacagagccctgatagcctggccgtgtctctgggagagagagccaccattaactgcaaggccagccagagcgtggactacgacggcgacagcttcctgaactggtatcagcagaagcccggccagcctcctaagctgctgatctacgccgccagcaatctggaaagcggcgtgccaagcagattttccggctctggcagcggcaccgatttcaccctgacaatatccagcctccagcctgaggacgtggccgtgtactactgccagcagagcaacgacgaccctctgacctttggacagggcaccaaggtggaaatcaaactcgaggacaagcagctggacgccgacgtgtcccccaagcctaccatcttcctgccctctatcgccgagacaaagctccagaaggccggcacctacctgtgcctgctggaaaagttcttcccagatgtgattaagatccactggcaggaaaagaagtccaacaccatcctgggcagccaggaaggcaacaccatgaagaccaacgacacctacatgaagttcagctggctgaccgtgcccgagaagtccctggacaaagaacacagatgcatcgtgcggcacgaaaacaacaagaacggcgtggaccaggaaatcatcttcccacccatcaagaccgatgtgattacaatggaccccaaggacaactgctccaaggacgccaacgataccctgctgctccagctgaccaacaccagcgccaccatcctgtacgagatcctgctgggcaaggccaccctgtacgccgtgctggtgtctgccctggtgctgatggctatggtcaagcggaaggacagccggggaagggccaagcgatctggatctggagcaacaaacttctcactactcaaacaagcaggtgacgtggaggagaatcccgggcctactagtatggactggatttggcgcatccttttccttgtcggcgctgctaccggcgcgcattccttcgaagaagtccaacttgtggagtctggagggggcctggtgcagcccggcggctctctcagactgtcttgtgcggcaagcggctacaccttcacctcttactggatagaatgggtgaggcaggcacctggaaagggactggagtggattggagagattctgccaggagggggagatacaaattacaatgaaatcttcaaggggcgggccaccttttcagcggataccagcaagaatacagcttacctgcagatgaatagcctccgggcagaagataccgctgtttattattgcacgagacgggtgccaataagactggactattgggggcaagggactcttgtcaccgtcagttcaacgcgtagccagcctcacaccaagcccagcgtgttcgtgatgaagaacggcaccaacgtggcctgcctcgtgaaagagttctaccccaaggacatcaggatcaacctggtgtccagcaagaagatcaccgagttcgaccccgccatcgtgatctcccccagcggcaagtacaacgccgtgaagctggggaagtatgaggacagcaacagcgtgacctgctccgtgcagcacgacaacaagaccgtgcacagcaccgactttgaagtgaaaaccgactccaccgaccacgtgaagcccaaagagacagagaacaccaagcagcccagcaagagctgccacaagcccaaggccatcgtgcacaccgagaaagtgaacatgatgagcctgaccgtgatcggcttcagaatcctgctgctgaaagtggccggctttaacctgctgatgaccctgcggctgtggtccagctaa

SEQ ID NO: 38293 - DNA, 1887 bp, synthetic construct
  source 1..1887: mol_type = other DNA
atggccttaccagtgaccgccttgctcctgccgctggccttgctgctccacgccgccaggccggacatcgtgatgacacagagccctgatagcctggccgtgtctctgggagagagagccaccattaactgcaaggccagccagagcgtggactacgacggcgacagcttcctgaactggtatcagcagaagcccggccagcctcctaagctgctgatctacgccgccagcaatctggaaagcggcgtgccaagcagattttccggctctggcagcggcaccgatttcaccctgacaatatccagcctccagcctgaggacgtggccgtgtactactgccagcagagcaacgacgaccctctgacctttggacagggcaccaaggtggaaatcaaactcgaggacaagcagctggacgccgacgtgtcccccaagcctaccatcttcctgccctctatcgccgagacaaagctccagaaggccggcacctacctgtgcctgctggaaaagttcttcccagatgtgattaagatccactggcaggaaaagaagtccaacaccatcctgggcagccaggaaggcaacaccatgaagaccaacgacacctacatgaagttcagctggctgaccgtgcccgagaagtccctggacaaagaacacagatgcatcgtgcggcacgaaaacaacaagaacggcgtggaccaggaaatcatcttcccacccatcaagaccgatgtgattacaatggaccccaaggacaactgctccaaggacgccaacgataccctgctgctccagctgaccaacaccagcgcctactacatgtacgagatcctgctgggcaaggccaccctgtacgccgtgctggtgtctgccctggtgctgatggctatggtcaagcggaaggacagccggggaagggccaagcgatctggatctggagcaacaaacttctcactactcaaacaagcaggtgacgtggaggagaatcccgggcctactagtatggactggatttggcgcatccttttccttgtcggcgctgctaccggcgcgcattccttcgaagaagtccaacttgtggagtctggagggggcctggtgcagcccggcggctctctcagactgtcttgtgcggcaagcggctacaccttcacctcttactggatagaatgggtgaggcaggcacctggaaagggactggagtggattggagagattctgccaggagggggagatacaaattacaatgaaatcttcaaggggcgggccaccttttcagcggataccagcaagaatacagcttacctgcagatgaatagcctccgggcagaagataccgctgtttattattgcacgagacgggtgccaataagactggactattgggggcaagggactcttgtcaccgtcagttcaacgcgtagccagcctcacaccaagcccagcgtgttcgtgatgaagaacggcaccaacgtggcctgcctcgtgaaagagttctaccccaaggacatcaggatcaacctggtgtccagcaagaagatcaccgagttcgaccccgccatcgtgatctcccccagcggcaagtacaacgccgtgaagctggggaagtacgaggacagcaacagcgtgacctgctccgtgcagcacgacaacaagaccgtgcacagcaccgactttgaagtgaaaaccgactccaccgaccacgtgaagcccaaagagacagagaacaccaagcagcccagcaagagctgccacaagcccaaggccatcgtgcacaccgagaaagtgaacatgatgagcctgaccgtgctgggcttcagaatcctgctgctgaaagtggccggctttaacctgctgatgaccctgcggctgtggtccagctaa

SEQ ID NO: 38294 - DNA, 1887 bp, synthetic construct
  source 1..1887: mol_type = other DNA
atggccttaccagtgaccgccttgctcctgccgctggccttgctgctccacgccgccaggccggacatcgtgatgacacagagccctgatagcctggccgtgtctctgggagagagagccaccattaactgcaaggccagccagagcgtggactacgacggcgacagcttcctgaactggtatcagcagaagcccggccagcctcctaagctgctgatctacgccgccagcaatctggaaagcggcgtgccaagcagattttccggctctggcagcggcaccgatttcaccctgacaatatccagcctccagcctgaggacgtggccgtgtactactgccagcagagcaacgacgaccctctgacctttggacagggcaccaaggtggaaatcaaactcgaggacaagcagctggacgccgacgtgtcccccaagcctaccatcttcctgccctctatcgccgagacaaagctccagaaggccggcacctacctgtgcctgctggaaaagttcttcccagatgtgattaagatccactggcaggaaaagaagtccaacaccatcctgggcagccaggaaggcaacaccatgaagaccaacgacacctacatgaagttcagctggctgaccgtgcccgagaagtccctggacaaagaacacagatgcatcgtgcggcacgaaaacaacaagaacggcgtggaccaggaaatcatcttcccacccatcaagaccgatgtgattacaatggaccccaaggacaactgctccaaggacgccaacgataccctgctgctccagctgaccaacaccagcgccaccatcctgtacgagatcctgctgggcaaggccaccctgtacgccgtgctggtgtctgccctggtgctgatggctatggtcaagcggaaggacagccggggaagggccaagcgatctggatctggagcaacaaacttctcactactcaaacaagcaggtgacgtggaggagaatcccgggcctactagtatggactggatttggcgcatccttttccttgtcggcgctgctaccggcgcgcattccttcgaagaagtccaacttgtggagtctggagggggcctggtgcagcccggcggctctctcagactgtcttgtgcggcaagcggctacaccttcacctcttactggatagaatgggtgaggcaggcacctggaaagggactggagtggattggagagattctgccaggagggggagatacaaattacaatgaaatcttcaaggggcgggccaccttttcagcggataccagcaagaatacagcttacctgcagatgaatagcctccgggcagaagataccgctgtttattattgcacgagacgggtgccaataagactggactattgggggcaagggactcttgtcaccgtcagttcaacgcgtagccagcctcacaccaagcccagcgtgttcgtgatgaagaacggcaccaacgtggcctgcctcgtgaaagagttctaccccaaggacatcaggatcaacctggtgtccagcaagaagatcaccgagttcgaccccgccatcgtgatctcccccagcggcaagtacaacgccgtgaagctggggaagtacgaggacagcaacagcgtgacctgctccgtgcagcacgacaacaagaccgtgcacagcaccgactttgaagtgaaaaccgactccaccgaccacgtgaagcccaaagagacagagaacaccaagcagcccagcaagagctgccacaagcccaaggccatcgtgcacaccgagaaagtgaacatgatgagcctgaccgtgctgggcttcagaatcctgctgctgaaagtggccggctttaacctgctgatgaccctgcggctgtggtccagctaa

SEQ ID NO: 38295 - DNA, 1869 bp, synthetic construct
  source 1..1869: mol_type = other DNA
atggccttaccagtgaccgccttgctcctgccgctggccttgctgctccacgccgccaggccggacatcgtgatgacacagagccctgatagcctggccgtgtctctgggagagagagccaccattaactgcaaggccagccagagcgtggactacgacggcgacagcttcctgaactggtatcagcagaagcccggccagcctcctaagctgctgatctacgccgccagcaatctggaaagcggcgtgccaagcagattttccggctctggcagcggcaccgatttcaccctgacaatatccagcctccagcctgaggacgtggccgtgtactactgccagcagagcaacgacgaccctctgacctttggacagggcaccaaggtggaaatcaaactcgaggacctgaagaacgtgttcccacctgaggtggccgtgttcgagcctagcgaggccgagatcagccacacccagaaagccaccctcgtgtgcctggctaccggcttctaccccgaccatgtggaactgtcttggtgggtcaacggcaaagaggtgcacagcggcgtgtgtaccgacccccagccactgaaagaacagcccgccctgaacgacagccggtactgcctgagcagcagactgagagtgtccgccaccttctggcagaacccccggaaccacttcagatgccaggtgcagttctacggcctgagcgagaacgacgagtggacccaggacagagccaagcccgtgacccagatcgtgtctgccgaagcctggggcagagccgattgcggctttaccagcgagagctaccagcagggcgtgctgagcgccaccatcctgtacttgttgctgctgctgaagtccgtggtgtacttcgccatcatcacatgctgcctgctgcggagaaccgccttctgctgcaacggcgagaagtctagggccaagcgatctggatctggagcaacaaacttctcactactcaaacaagcaggtgacgtggaggagaatcccgggcctactagtatggactggatttggcgcatccttttccttgtcggcgctgctaccggcgcgcattccttcgaagaagtccaacttgtggagtctggagggggcctggtgcagcccggcggctctctcagactgtcttgtgcggcaagcggctacaccttcacctcttactggatagaatgggtgaggcaggcacctggaaagggactggagtggattggagagattctgccaggagggggagatacaaattacaatgaaatcttcaaggggcgggccaccttttcagcggataccagcaagaatacagcttacctgcagatgaatagcctccgggcagaagataccgctgtttattattgcacgagacgggtgccaataagactggactattgggggcaagggactcttgtcaccgtcagttcaacgcgtatccagaaccctgatcctgccgtgtaccagctgcgggatagcaagagcagcgacaagagcgtgtgtctgttcaccgacttcgacagccagaccaacgtgtcccagagcaaggactccgacgtgtacatcaccgataagtgcgtgctggacatgcggagcatggacttcaagagcaactccgccgtggcctggtccaacaagtccgatttcgcctgcgccaacgccttcaacaacagcattatccccgaggacacattcttcccaagccccgagagcagctgcgacgtgaagctggtggaaaagagcttcgagacagacaccaacctgaacttccagaacctgagcgtgatcggcctgcggatgctgttcgccaaaaccgtggccgtgaacttcctgctgaccgccaagctgttcttcctctaa

SEQ ID NO: 38296 - DNA, 1956 bp, synthetic construct
  source 1..1956: mol_type = other DNA
atggccttaccagtgaccgccttgctcctgccgctggccttgctgctccacgccgccaggccggacatcgtgatgacacagagccctgatagcctggccgtgtctctgggagagagagccaccattaactgcaaggccagccagagcgtggactacgacggcgacagcttcctgaactggtatcagcagaagcccggccagcctcctaagctgctgatctacgccgccagcaatctggaaagcggcgtgccaagcagattttccggctctggcagcggcaccgatttcaccctgacaatatccagcctccagcctgaggacgtggccgtgtactactgccagcagagcaacgacgaccctctgacctttggacagggcaccaaggtggaaatcaaactcgaggacctgaagaacgtgttcccacctgaggtggccgtgttcgagcctagcgaggccgagatcagccacacccagaaagccaccctcgtgtgcctggctaccggcttctaccccgaccatgtggaactgtcttggtgggtcaacggcaaagaggtgcacagcggcgtgtctaccgacccccagccactgaaagaacagcccgccctgaacgacagccggtactgcctgagcagcagactgagagtgtccgccaccttctggcagaacccccggaaccacttcagatgccaggtgcagttctacggcctgagcgagaacgacgagtggacccaggacagagccaagcccgtgacccagatcgtgtctgccgaagcctggggcagagccgattgcggatcctccaaggacgccaacgataccctgctgctccagctgaccaacaccagcgcctactacatgtacttgttgctgctgctgaagtccgtggtgtacttcgccatcatcacatgctgcctgctgcggagaaccgccttctgctgcaacggcgagaagtctagggccaagcgatctggatctggagcaacaaacttctcactactcaaacaagcaggtgacgtggaggagaatcccgggcctactagtatggactggatttggcgcatccttttccttgtcggcgctgctaccggcgcgcattccttcgaagaagtccaacttgtggagtctggagggggcctggtgcagcccggcggctctctcagactgtcttgtgcggcaagcggctacaccttcacctcttactggatagaatgggtgaggcaggcacctggaaagggactggagtggattggagagattctgccaggagggggagatacaaattacaatgaaatcttcaaggggcgggccaccttttcagcggataccagcaagaatacagcttacctgcagatgaatagcctccgggcagaagataccgctgtttattattgcacgagacgggtgccaataagactggactattgggggcaagggactcttgtcaccgtcagttcaacgcgtatccagaaccctgatcctgccgtgtaccagctgcgggatagcaagagcagcgacaagagcgtgtgtctgttcaccgacttcgacagccagaccaacgtgtcccagagcaaggactccgacgtgtacatcaccgataagaccgtgctggacatgcggagcatggacttcaagagcaactccgccgtggcctggtccaacaagtccgatttcgcctgcgccaacgccttcaacaacagcattatccccgaggacacattcttcccaagccccgagagcagctgcggtaccgaagtgaaaaccgactccaccgaccacgtgaagcccaaagagacagagaacaccaagcagcccagcaagagctgccacaagcccaaggccatcgtgcacaccgagaaagtgaacatgatgagcctgaccgtgctgggcctgcggatgctgttcgccaaaaccgtggccgtgaacttcctgctgaccgccaagctgttcttcctctaa

SEQ ID NO: 38297 - DNA, 1866 bp, synthetic construct
  source 1..1866: mol_type = other DNA
atggccttaccagtgaccgccttgctcctgccgctggccttgctgctccacgccgccaggccggacatcgtgatgacacagagccctgatagcctggccgtgtctctgggagagagagccaccattaactgcaaggccagccagagcgtggactacgacggcgacagcttcctgaactggtatcagcagaagcccggccagcctcctaagctgctgatctacgccgccagcaatctggaaagcggcgtgccaagcagattttccggctctggcagcggcaccgatttcaccctgacaatatccagcctccagcctgaggacgtggccgtgtactactgccagcagagcaacgacgaccctctgacctttggacagggcaccaaggtggaaatcaaactcgaggacctgaagaacgtgttcccacctgaggtggccgtgttcgagcctagcgaggccgagatcagccacacccagaaagccaccctcgtgtgcctggctaccggcttctaccccgaccatgtggaactgtcttggtgggtcaacggcaaagaggtgcacagcggcgtgtgtaccgacccccagccactgaaagaacagcccgccctgaacgacagccggtactgcctgagcagcagactgagagtgtccgccaccttctggcagaacccccggaaccacttcagatgccaggtgcagttctacggcctgagcgagaacgacgagtggacccaggacagagccaagcccgtgacccagatcgtgtctgccgaagcctggggcagagccgattgcgacgtgaagctggtggaaaagagcttcgagacagacaccaacctgaacttccagaacctgagcgtgatcggcttcagaatcctgctgctgaaagtggccggctttaacctgctgatgaccctgcggctgtggtccagcagggccaagcgatctggatctggagcaacaaacttctcactactcaaacaagcaggtgacgtggaggagaatcccgggcctactagtatggactggatttggcgcatccttttccttgtcggcgctgctaccggcgcgcattccttcgaagaagtccaacttgtggagtctggagggggcctggtgcagcccggcggctctctcagactgtcttgtgcggcaagcggctacaccttcacctcttactggatagaatgggtgaggcaggcacctggaaagggactggagtggattggagagattctgccaggagggggagatacaaattacaatgaaatcttcaaggggcgggccaccttttcagcggataccagcaagaatacagcttacctgcagatgaatagcctccgggcagaagataccgctgtttattattgcacgagacgggtgccaataagactggactattgggggcaagggactcttgtcaccgtcagttcaacgcgtatccagaaccctgatcctgccgtgtaccagctgcgggatagcaagagcagcgacaagagcgtgtgtctgttcaccgacttcgacagccagaccaacgtgtcccagagcaaggactccgacgtgtacatcaccgataagtgcgtgctggacatgcggagcatggacttcaagagcaactccgccgtggcctggtccaacaagtccgatttcgcctgcgccaacgccttcaacaacagcattatccccgaggacacattcttcccaagccccgagagcagctgcggctttaccagcgagagctaccagcagggcgtgctgagcgccaccatcctgtacgagatcctgctgggcaaggccaccctgtacgccgtgctggtgtctgccctggtgctgatggctatggtcaagcggaaggacagccggggataa

SEQ ID NO: 38298 - DNA, 1866 bp, synthetic construct
  source 1..1866: mol_type = other DNA
atggccttaccagtgaccgccttgctcctgccgctggccttgctgctccacgccgccaggccggacatcgtgatgacacagagccctgatagcctggccgtgtctctgggagagagagccaccattaactgcaaggccagccagagcgtggactacgacggcgacagcttcctgaactggtatcagcagaagcccggccagcctcctaagctgctgatctacgccgccagcaatctggaaagcggcgtgccaagcagattttccggctctggcagcggcaccgatttcaccctgacaatatccagcctccagcctgaggacgtggccgtgtactactgccagcagagcaacgacgaccctctgacctttggacagggcaccaaggtggaaatcaaactcgaggacctgaagaacgtgttcccacctgaggtggccgtgttcgagcctagcgaggccgagatcagccacacccagaaagccaccctcgtgtgcctggctaccggcttctaccccgaccatgtggaactgtcttggtgggtcaacggcaaagaggtgcacagcggcgtgtgtaccgacccccagccactgaaagaacagcccgccctgaacgacagccggtactgcctgagcagcagactgagagtgtccgccaccttctggcagaacccccggaaccacttcagatgccaggtgcagttctacggcctgagcgagaacgacgagtggacccaggacagagccaagcccgtgacccagatcgtgtctgccgaagcctggggcagagccgattgcggctttaccagcgagagctaccagcagggcgtgctgagcgccaccaacctgagcgtgatcggcttcagaatcctgctgctgaaagtggccggctttaacctgctgatgaccctgcggctgtggtccagcagggccaagcgatctggatctggagcaacaaacttctcactactcaaacaagcaggtgacgtggaggagaatcccgggcctactagtatggactggatttggcgcatccttttccttgtcggcgctgctaccggcgcgcattccttcgaagaagtccaacttgtggagtctggagggggcctggtgcagcccggcggctctctcagactgtcttgtgcggcaagcggctacaccttcacctcttactggatagaatgggtgaggcaggcacctggaaagggactggagtggattggagagattctgccaggagggggagatacaaattacaatgaaatcttcaaggggcgggccaccttttcagcggataccagcaagaatacagcttacctgcagatgaatagcctccgggcagaagataccgctgtttattattgcacgagacgggtgccaataagactggactattgggggcaagggactcttgtcaccgtcagttcaacgcgtatccagaaccctgatcctgccgtgtaccagctgcgggatagcaagagcagcgacaagagcgtgtgtctgttcaccgacttcgacagccagaccaacgtgtcccagagcaaggactccgacgtgtacatcaccgataagtgcgtgctggacatgcggagcatggacttcaagagcaactccgccgtggcctggtccaacaagtccgatttcgcctgcgccaacgccttcaacaacagcattatccccgaggacacattcttcccaagccccgagagcagctgcgacgtgaagctggtggaaaagagcttcgagacagacaccaacctgaacttccagatcctgtacgagatcctgctgggcaaggccaccctgtacgccgtgctggtgtctgccctggtgctgatggctatggtcaagcggaaggacagccggggataa

SEQ ID NO: 38299 - DNA, 1866 bp, synthetic construct; identical to SEQ ID NO: 38297
  source 1..1866: mol_type = other DNA

SEQ ID NO: 38300 - DNA, 1866 bp, synthetic construct; identical to SEQ ID NO: 38298
  source 1..1866: mol_type = other DNA

SEQ ID NO: 38301 - DNA, 1863 bp, synthetic construct
  source 1..1863: mol_type = other DNA
atggccttaccagtgaccgccttgctcctgccgctggccttgctgctccacgccgccaggccggacatcgtgatgacacagagccctgatagcctggccgtgtctctgggagagagagccaccattaactgcaaggccagccagagcgtggactacgacggcgacagcttcctgaactggtatcagcagaagcccggccagcctcctaagctgctgatctacgccgccagcaatctggaaagcggcgtgccaagcagattttccggctctggcagcggcaccgatttcaccctgacaatatccagcctccagcctgaggacgtggccgtgtactactgccagcagagcaacgacgaccctctgacctttggacagggcaccaaggtggaaatcaaactcgaggacctgaagaacgtgttcccacctgaggtggccgtgttcgagcctagcgaggccgagatcagccacacccagaaagccaccctcgtgtgcctggctaccggcttctaccccgaccatgtggaactgtcttggtgggtcaacggcaaagaggtgcacagcggcgtgtgtaccgacccccagccactgaaagaacagcccgccctgaacgacagccggtactgcctgagcagcagactgagagtgtccgccaccttctggcagaacccccggaaccacttcagatgccaggtgcagttctacggcctgagcgagaacgacgagtggacccaggacagagccaagcccgtgacccagatcgtgtctgccgaagcctggggcagagccgattgcgacgtgaagctggtggaaaagagcttcgagacagacaccaacctgaacttccagaacctgagcgtgatcggcttcagaatcctgctgctgaaagtggccggctttaacctgctgatgaccctgcggctgtggtccagcagggccaagcgatctggatctggagcaacaaacttctcactactcaaacaagcaggtgacgtggaggagaatcccgggcctactagtatggactggatttggcgcatccttttccttgtcggcgctgctaccggcgcgcattccttcgaagaagtccaacttgtggagtctggagggggcctggtgcagcccggcggctctctcagactgtcttgtgcggcaagcggctacaccttcacctcttactggatagaatgggtgaggcaggcacctggaaagggactggagtggattggagagattctgccaggagggggagatacaaattacaatgaaatcttcaaggggcgggccaccttttcagcggataccagcaagaatacagcttacctgcagatgaatagcctccgggcagaagataccgctgtttattattgcacgagacgggtgccaataagactggactattgggggcaagggactcttgtcaccgtcagttcaacgcgtatccagaaccctgatcctgccgtgtaccagctgcgggatagcaagagcagcgacaagagcgtgtgtctgttcaccgacttcgacagccagaccaacgtgtcccagagcaaggactccgacgtgtacatcaccgataagtgcgtgctggacatgcggagcatggacttcaagagcaactccgccgtggcctggtccaacaagtccgatttcgcctgcgccaacgccttcaacaacagcattatccccgaggacacattcttcccaagccccgagagcagctgcggctttaccagcgagagctaccagcagggcgtgctgagcgccaccatcctgtacgagatcctgctgggcaaggccaccctgtacgccgtgctggtgtctgccctggtgctgatggctatggtcaagcggaaggacagccgggga

SEQ ID NO: 38302 - DNA, 1875 bp, synthetic construct
  source 1..1875: mol_type = other DNA
atggccttaccagtgaccgccttgctcctgccgctggccttgctgctccacgccgccaggccggacatcgtgatgacacagagccctgatagcctggccgtgtctctgggagagagagccaccattaactgcaaggccagccagagcgtggactacgacggcgacagcttcctgaactggtatcagcagaagcccggccagcctcctaagctgctgatctacgccgccagcaatctggaaagcggcgtgccaagcagattttccggctctggcagcggcaccgatttcaccctgacaatatccagcctccagcctgaggacgtggccgtgtactactgccagcagagcaacgacgaccctctgacctttggacagggcaccaaggtggaaatcaaactcgaggccgacgtgtcccccaagcctaccatcttcctgccctctatcgccgagacaaagctccagaaggccggcacctacctgtgcctgctggaaaagttcttcccagatgtgattaagatccactggcaggaaaagaagtccaacaccatcctgggcagccaggaaggcaacaccatgaagaccaacgacacctacatgaagttcagctggctgaccgtgcccgagaagtccctggacaaagaacacagatgcatcgtgcggcacgaaaacaacaagaacggcgtggaccaggaaatcatcttcccacccatcaagaccgatgtgattacaatggaccccaaggacaactgctccaaggacgccaacgataccctgctgctccagctgaccaacaccagcgcctactacatgtacttgttgctgctgctgaagtccgtggtgtacttcgccatcatcacatgctgcctgctgcggagaaccgccttctgctgcaacggcgagaagtctagggccaagcgatctggatctggagcaacaaacttctcactactcaaacaagcaggtgacgtggaggagaatcccgggcctactagtatggactggatttggcgcatccttttccttgtcggcgctgctaccggcgcgcattccttcgaagaagtccaacttgtggagtctggagggggcctggtgcagcccggcggctctctcagactgtcttgtgcggcaagcggctacaccttcacctcttactggatagaatgggtgaggcaggcacctggaaagggactggagtggattggagagattctgccaggagggggagatacaaattacaatgaaatcttcaaggggcgggccaccttttcagcggataccagcaagaatacagcttacctgcagatgaatagcctccgggcagaagataccgctgtttattattgcacgagacgggtgccaataagactggactattgggggcaagggactcttgtcaccgtcagttcaacgcgtagccagcctcacaccaagcccagcgtgttcgtgatgaagaacggcaccaacgtggcctgcctcgtgaaagagttctaccccaaggacatcaggatcaacctggtgtccagcaagaagatcaccgagttcgaccccgccatcgtgatctcccccagcggcaagtacaacgccgtgaagctggggaagtatgaggacagcaacagcgtgacctgctccgtgcagcacgacaacaagaccgtgcacagcaccgactttgaagtgaaaaccgactccaccgaccacgtgaagcccaaagagacagagaacaccaagcagcccagcaagagctgccacaagcccaaggccatcgtgcacaccgagaaagtgaacatgatgagcctgaccgtgatcggcttcagaatcctgctgctgaaagtggccggctttaacctgctgatgaccctgcggctgtggtccagctaa

SEQ ID NO: 38303 - DNA, 1875 bp, synthetic construct
  source 1..1875: mol_type = other DNA
atggccttaccagtgaccgccttgctcctgccgctggccttgctgctccacgccgccaggccggacatcgtgatgacacagagccctgatagcctggccgtgtctctgggagagagagccaccattaactgcaaggccagccagagcgtggactacgacggcgacagcttcctgaactggtatcagcagaagcccggccagcctcctaagctgctgatctacgccgccagcaatctggaaagcggcgtgccaagcagattttccggctctggcagcggcaccgatttcaccctgacaatatccagcctccagcctgaggacgtggccgtgtactactgccagcagagcaacgacgaccctctgacctttggacagggcaccaaggtggaaatcaaactcgaggccgacgtgtcccccaagcctaccatcttcctgccctctatcgccgagacaaagctccagaaggccggcacctacctgtgcctgctggaaaagttcttcccagatgtgattaagatccactggcaggaaaagaagtccaacaccatcctgggcagccaggaaggcaacaccatgaagaccaacgacacctacatgaagttcagctggctgaccgtgcccgagaagtccctggacaaagaacacagatgcatcgtgcggcacgaaaacaacaagaacggcgtggaccaggaaatcatcttcccacccatcaagaccgatgtgattacaatggaccccaaggacaactgctccaaggacgccaacgataccctgctgctccagctgaccaacaccagcgcctactacatgtacttgttgctgctgctgaagtccgtggtgtacttcgccatcatcacatgctgcctgctgcggagaaccgccttctgctgcaacggcgagaagtctagggccaagcgatctggatctggagcaacaaacttctcactactcaaacaagcaggtgacgtggaggagaatcccgggcctactagtatggactggatttggcgcatccttttccttgtcggcgctgctaccggcgcgcattccttcgaagaagtccaacttgtggagtctggagggggcctggtgcagcccggcggctctctcagactgtcttgtgcggcaagcggctacaccttcacctcttactggatagaatgggtgaggcaggcacctggaaagggactggagtggattggagagattctgccaggagggggagatacaaattacaatgaaatcttcaaggggcgggccaccttttcagcggataccagcaagaatacagcttacctgcagatgaatagcctccgggcagaagataccgctgtttattattgcacgagacgggtgccaataagactggactattgggggcaagggactcttgtcaccgtcagttcaacgcgtagccagcctcacaccaagcccagcgtgttcgtgatgaagaacggcaccaacgtggcctgcctcgtgaaagagttctaccccaaggacatcaggatcaacctggtgtccagcaagaagatcaccgagttcgaccccgccatcgtgatctcccccagcggcaagtacaacgccgtgaagctggggaagtacgaggacagcaacagcgtgacctgctccgtgcagcacgacaacaagaccgtgcacagcaccgactttgaagtgaaaaccgactccaccgaccacgtgaagcccaaagagacagagaacaccaagcagcccagcaagagctgccacaagcccaaggccatcgtgcacaccgagaaagtgaacatgatgagcctgaccgtgctgggcttcagaatcctgctgctgaaagtggccggctttaacctgctgatgaccctgcggctgtggtccagctaa

SEQ ID NO: 38304 - DNA, 1863 bp, synthetic construct; identical to SEQ ID NO: 38301
  source 1..1863: mol_type = other DNA

SEQ ID NO: 38305 - DNA, 1875 bp, synthetic construct
  source 1..1875: mol_type = other DNA
atggccttaccagtgaccgccttgctcctgccgctggccttgctgctccacgccgccaggccggacatcgtgatgacacagagccctgatagcctggccgtgtctctgggagagagagccaccattaactgcaaggccagccagagcgtggactacgacggcgacagcttcctgaactggtatcagcagaagcccggccagcctcctaagctgctgatctacgccgccagcaatctggaaagcggcgtgccaagcagattttccggctctggcagcggcaccgatttcaccctgacaatatccagcctccagcctgaggacgtggccgtgtactactgccagcagagcaacgacgaccctctgacctttggacagggcaccaaggtggaaatcaaactcgagatccagaaccctgatcctgccgtgtaccagctgcgggatagcaagagcagcgacaagagcgtgtgtctgttcaccgacttcgacagccagaccaacgtgtcccagagcaaggactccgacgtgtacatcaccgataagtgcgtgctggacatgcggagcatggacttcaagagcaactccgccgtggcctggtccaacaagtccgatttcgcctgcgccaacgccttcaacaacagcattatccccgaggacacattcttcccaagccccgagagcagctgcggctttaccagcgagagctaccagcagggcgtgctgagcgccaccatcctgtacgagatcctgctgggcaaggccaccctgtacgccgtgctggtgtctgccctggtgctgatggctatggtcaagcggaaggacagccggggacgcgccaagagaagcggatctggcgtgaagcagaccctgaatttcgacctgctgaagctggctggcgacgtggaatccaacccaggccctactagtatggactggatttggcgcatccttttccttgtcggcgctgctaccggcgcgcattccttcgaagaagtccaacttgtggagtctggagggggcctggtgcagcccggcggctctctcagactgtcttgtgcggcaagcggctacaccttcacctcttactggatagaatgggtgaggcaggcacctggaaagggactggagtggattggagagattctgccaggagggggagatacaaattacaatgaaatcttcaaggggcgggccaccttttcagcggataccagcaagaatacagcttacctgcagatgaatagcctccgggcagaagataccgctgtttattattgcacgagacgggtgccaataagactggactattgggggcaagggactcttgtcaccgtcagttcaacgcgtgaggacctgaagaacgtgttcccacctgaggtggccgtgttcgagcctagcgaggccgagatcagccacacccagaaagccaccctcgtgtgcctggctaccggcttctaccccgaccatgtggaactgtcttggtgggtcaacggcaaagaggtgcacagcggcgtgtgtaccgacccccagccactgaaagaacagcccgccctgaacgacagccggtactgcctgagcagcagactgagagtgtccgccaccttctggcagaacccccggaaccacttcagatgccaggtgcagttctacggcctgagcgagaacgacgagtggacccaggacagagccaagcccgtgacccagatcgtgtctgccgaagcctggggcagagccgattgcgacgtgaagctggtggaaaagagcttcgagacagacaccaacctgaacttccagaacctgagcgtgatcggcttcagaatcctgctgctgaaagtggccggctttaacctgctgatgaccctgcggctgtggtccagc

SEQ ID NO: 38306 - DNA, 2268 bp, synthetic construct
  source 1..2268: mol_type = other DNA
atggccttaccagtgaccgccttgctcctgccgctggccttgctgctccacgccgccaggccggaagtgcagctggttgaatctggcggaggactggttcagcctggcggatctctgagactgtcttgtgccgccagcggcttcagcttcagcgacttttggatgagctgggtccgacaggcccctggcaaaggacttgaatgggtcgccacaatcagccaggccggcagcgagaaggactacgtggactctgtgaagggcagattcaccatcagccgggacaacgccaagaagtccctgtacctccagatgaacagcctgagagccgaggacaccgccgtgtactattgtgcctctggcgtgtacagcttcgactacagaggccagggcaccctggtcacagtctcttctggtaccggcggaggcggatctggcggcggaggtagcggtggcggaggatctgaattcgacatcgtgatgacacagagccctgatagcctggccgtgtctctgggagagagagccaccattaactgcaaggccagccagagcgtggactacgacggcgacagcttcctgaactggtatcagcagaagcccggccagcctcctaagctgctgatctacgccgccagcaatctggaaagcggcgtgccaagcagattttccggctctggcagcggcaccgatttcaccctgacaatatccagcctccagcctgaggacgtggccgtgtactactgccagcagagcaacgacgaccctctgacctttggacagggcaccaaggtggaaatcaaactcgaggacctgaagaacgtgttcccacctgaggtggccgtgttcgagcctagcgaggccgagatcagccacacccagaaagccaccctcgtgtgcctggctaccggcttctaccccgaccatgtggaactgtcttggtgggtcaacggcaaagaggtgcacagcggcgtgtgtaccgacccccagccactgaaagaacagcccgccctgaacgacagccggtactgcctgagcagcagactgagagtgtccgccaccttctggcagaacccccggaaccacttcagatgccaggtgcagttctacggcctgagcgagaacgacgagtggacccaggacagagccaagcccgtgacccagatcgtgtctgccgaagcctggggcagagccgattgcgacgtgaagctggtggaaaagagcttcgagacagacaccaacctgaacttccagaacctgagcgtgatcggcttcagaatcctgctgctgaaagtggccggctttaacctgctgatgaccctgcggctgtggtccagcagggccaagcgatctggatctggagcaacaaacttctcactactcaaacaagcaggtgacgtggaggagaatcccgggcctactagtatggactggatttggcgcatccttttccttgtcggcgctgctaccggcgcgcattccttcgaagaagtccaacttgtggagtctggagggggcctggtgcagcccggcggctctctcagactgtcttgtgcggcaagcggctacaccttcacctcttactggatagaatgggtgaggcaggcacctggaaagggactggagtggattggagagattctgccaggagggggagatacaaattacaatgaaatcttcaaggggcgggccaccttttcagcggataccagcaagaatacagcttacctgcagatgaatagcctccgggcagaagataccgctgtttattattgcacgagacgggtgccaataagactggactattgggggcaagggactcttgtcaccgtcagttcaacgcgtatccagaaccctgatcctgccgtgtaccagctgcgggatagcaagagcagcgacaagagcgtgtgtctgttcaccgacttcgacagccagaccaacgtgtcccagagcaaggactccgacgtgtacatcaccgataagtgcgtgctggacatgcggagcatggacttcaagagcaactccgccgtggcctggtccaacaagtccgatttcgcctgcgccaacgccttcaacaacagcattatccccgaggacacattcttcccaagccccgagagcagctgcggctttaccagcgagagctaccagcagggcgtgctgagcgccaccatcctgtacgagatcctgctgggcaaggccaccctgtacgccgtgctggtgtctgccctggtgctgatggctatggtcaagcggaaggacagccgggga

SEQ ID NO: 38307 - DNA, 2280 bp, synthetic construct
  source 1..2280: mol_type = other DNA
atggccttaccagtgaccgccttgctcctgccgctggccttgctgctccacgccgccaggccggaagtgcagctggttgaatctggcggaggactggttcagcctggcggatctctgagactgtcttgtgccgccagcggcttcagcttcagcgacttttggatgagctgggtccgacaggcccctggcaaaggacttgaatgggtcgccacaatcagccaggccggcagcgagaaggactacgtggactctgtgaagggcagattcaccatcagccgggacaacgccaagaagtccctgtacctccagatgaacagcctgagagccgaggacaccgccgtgtactattgtgcctctggcgtgtacagcttcgactacagaggccagggcaccctggtcacagtctcttctggtaccggcggaggcggatctggcggcggaggtagcggtggcggaggatctgaattcgacatcgtgatgacacagagccctgatagcctggccgtgtctctgggagagagagccaccattaactgcaaggccagccagagcgtggactacgacggcgacagcttcctgaactggtatcagcagaagcccggccagcctcctaagctgctgatctacgccgccagcaatctggaaagcggcgtgccaagcagattttccggctctggcagcggcaccgatttcaccctgacaatatccagcctccagcctgaggacgtggccgtgtactactgccagcagagcaacgacgaccctctgacctttggacagggcaccaaggtggaaatcaaactcgagatccagaaccctgatcctgccgtgtaccagctgcgggatagcaagagcagcgacaagagcgtgtgtctgttcaccgacttcgacagccagaccaacgtgtcccagagcaaggactccgacgtgtacatcaccgataagtgcgtgctggacatgcggagcatggacttcaagagcaactccgccgtggcctggtccaacaagtccgatttcgcctgcgccaacgccttcaacaacagcattatccccgaggacacattcttcccaagccccgagagcagctgcggctttaccagcgagagctaccagcagggcgtgctgagcgccaccatcctgtacgagatcctgctgggcaaggccaccctgtacgccgtgctggtgtctgccctggtgctgatggctatggtcaagcggaaggacagccggggacgcgccaagagaagcggatctggcgtgaagcagaccctgaatttcgacctgctgaagctggctggcgacgtggaatccaacccaggccctactagtatggactggatttggcgcatccttttccttgtcggcgctgctaccggcgcgcattccttcgaagaagtccaacttgtggagtctggagggggcctggtgcagcccggcggctctctcagactgtcttgtgcggcaagcggctacaccttcacctcttactggatagaatgggtgaggcaggcacctggaaagggactggagtggattggagagattctgccaggagggggagatacaaattacaatgaaatcttcaaggggcgggccaccttttcagcggataccagcaagaatacagcttacctgcagatgaatagcctccgggcagaagataccgctgtttattattgcacgagacgggtgccaataagactggactattgggggcaagggactcttgtcaccgtcagttcaacgcgtgaggacctgaagaacgtgttcccacctgaggtggccgtgttcgagcctagcgaggccgagatcagccacacccagaaagccaccctcgtgtgcctggctaccggcttctaccccgaccatgtggaactgtcttggtgggtcaacggcaaagaggtgcacagcggcgtgtgtaccgacccccagccactgaaagaacagcccgccctgaacgacagccggtactgcctgagcagcagactgagagtgtccgccaccttctggcagaacccccggaaccacttcagatgccaggtgcagttctacggcctgagcgagaacgacgagtggacccaggacagagccaagcccgtgacccagatcgtgtctgccgaagcctggggcagagccgattgcgacgtgaagctggtggaaaagagcttcgagacagacaccaacctgaacttccagaacctgagcgtgatcggcttcagaatcctgctgctgaaagtggccggctttaacctgctgatgaccctgcggctgtggtccagc

SEQ ID NO: 38308 - DNA, 2679 bp, synthetic construct
  source 1..2679: mol_type = other DNA
atggccttaccagtgaccgccttgctcctgccgctggccttgctgctccacgccgccaggccggaagtgcagctggttgaatctggcggaggactggttcagcctggcggatctctgagactgtcttgtgccgccagcggcttcagcttcagcgacttttggatgagctgggtccgacaggcccctggcaaaggacttgaatgggtcgccacaatcagccaggccggcagcgagaaggactacgtggactctgtgaagggcagattcaccatcagccgggacaacgccaagaagtccctgtacctccagatgaacagcctgagagccgaggacaccgccgtgtactattgtgcctctggcgtgtacagcttcgactacagaggccagggcaccctggtcacagtctcttctggtaccggcggaggcggatctggcggcggaggtagcggtggcggaggatctgaattcgacatcgtgatgacacagagccctgatagcctggccgtgtctctgggagagagagccaccattaactgcaaggccagccagagcgtggactacgacggcgacagcttcctgaactggtatcagcagaagcccggccagcctcctaagctgctgatctacgccgccagcaatctggaaagcggcgtgccaagcagattttccggctctggcagcggcaccgatttcaccctgacaatatccagcctccagcctgaggacgtggccgtgtactactgccagcagagcaacgacgaccctctgacctttggacagggcaccaaggtggaaatcaaactcgaggacctgaagaacgtgttcccacctgaggtggccgtgttcgagcctagcgaggccgagatcagccacacccagaaagccaccctcgtgtgcctggctaccggcttctaccccgaccatgtggaactgtcttggtgggtcaacggcaaagaggtgcacagcggcgtgtgtaccgacccccagccactgaaagaacagcccgccctgaacgacagccggtactgcctgagcagcagactgagagtgtccgccaccttctggcagaacccccggaaccacttcagatgccaggtgcagttctacggcctgagcgagaacgacgagtggacccaggacagagccaagcccgtgacccagatcgtgtctgccgaagcctggggcagagccgattgcgacgtgaagctggtggaaaagagcttcgagacagacaccaacctgaacttccagaacctgagcgtgatcggcttcagaatcctgctgctgaaagtggccggctttaacctgctgatgaccctgcggctgtggtccagcagggccaagcgatctggatctggagcaacaaacttctcactactcaaacaagcaggtgacgtggaggagaatcccgggcctactagtatggactggatttggcgcatccttttccttgtcggcgctgctaccggcgcgcattccgggccccagctccagctgcaagagtctggacctggcctggtcaagcctagcgagacactgagcctgacctgtaccgtgtccggcgatagcatcagcagcggcgattactactggggctggatcagacagcctcctggcaaaggactggaatggatcggccacatctactacagcggcgtgacctactacaaccccagcctgaagtccagagtgaccatcagcgtggacaccagccggaaccagttctccctgaagctgtctagcgtgacagccgccgataccgccgtgtactactgcaccagagaggacagcagcaactggcggagtagaggccagggaacactggtcacagttagctctggatccggcggaggcggaagtggaggcggaggatctggcggcggaggctctttcgaagaagtccaacttgtggagtctggagggggcctggtgcagcccggcggctctctcagactgtcttgtgcggcaagcggctacaccttcacctcttactggatagaatgggtgaggcaggcacctggaaagggactggagtggattggagagattctgccaggagggggagatacaaattacaatgaaatcttcaaggggcgggccaccttttcagcggataccagcaagaatacagcttacctgcagatgaatagcctccgggcagaagataccgctgtttattattgcacgagacgggtgccaataagactggactattgggggcaagggactcttgtcaccgtcagttcaacgcgtatccagaaccctgatcctgccgtgtaccagctgcgggatagcaagagcagcgacaagagcgtgtgtctgttcaccgacttcgacagccagaccaacgtgtcccagagcaaggactccgacgtgtacatcaccgataagtgcgtgctggacatgcggagcatggacttcaagagcaactccgccgtggcctggtccaacaagtccgatttcgcctgcgccaacgccttcaacaacagcattatccccgaggacacattcttcccaagccccgagagcagctgcggctttaccagcgagagctaccagcagggcgtgctgagcgccaccatcctgtacgagatcctgctgggcaaggccaccctgtacgccgtgctggtgtctgccctggtgctgatggctatggtcaagcggaaggacagccgggga

SEQ ID NO: 38309 - DNA, 2691 bp, synthetic construct
  source 1..2691: mol_type = other DNA
atggccttaccagtgaccgccttgctcctgccgctggccttgctgctccacgccgccaggccggaagtgcagctggttgaatctggcggaggactggttcagcctggcggatctctgagactgtcttgtgccgccagcggcttcagcttcagcgacttttggatgagctgggtccgacaggcccctggcaaaggacttgaatgggtcgccacaatcagccaggccggcagcgagaaggactacgtggactctgtgaagggcagattcaccatcagccgggacaacgccaagaagtccctgtacctccagatgaacagcctgagagccgaggacaccgccgtgtactattgtgcctctggcgtgtacagcttcgactacagaggccagggcaccctggtcacagtctcttctggtaccggcggaggcggatctggcggcggaggtagcggtggcggaggatctgaattcgacatcgtgatgacacagagccctgatagcctggccgtgtctctgggagagagagccaccattaactgcaaggccagccagagcgtggactacgacggcgacagcttcctgaactggtatcagcagaagcccggccagcctcctaagctgctgatctacgccgccagcaatctggaaagcggcgtgccaagcagattttccggctctggcagcggcaccgatttcaccctgacaatatccagcctccagcctgaggacgtggccgtgtactactgccagcagagcaacgacgaccctctgacctttggacagggcaccaaggtggaaatcaaactcgagatccagaaccctgatcctgccgtgtaccagctgcgggatagcaagagcagcgacaagagcgtgtgtctgttcaccgacttcgacagccagaccaacgtgtcccagagcaaggactccgacgtgtacatcaccgataagtgcgtgctggacatgcggagcatggacttcaagagcaactccgccgtggcctggtccaacaagtccgatttcgcctgcgccaacgccttcaacaacagcattatccccgaggacacattcttcccaagccccgagagcagctgcggctttaccagcgagagctaccagcagggcgtgctgagcgccaccatcctgtacgagatcctgctgggcaaggccaccctgtacgccgtgctggtgtctgccctggtgctgatggctatggtcaagcggaaggacagccggggacgcgccaagagaagcggatctggcgtgaagcagaccctgaatttcgacctgctgaagctggctggcgacgtggaatccaacccaggccctactagtatggactggatttggcgcatccttttccttgtcggcgctgctaccggcgcgcattccgggccccagctccagctgcaagagtctggacctggcctggtcaagcctagcgagacactgagcctgacctgtaccgtgtccggcgatagcatcagcagcggcgattactactggggctggatcagacagcctcctggcaaaggactggaatggatcggccacatctactacagcggcgtgacctactacaaccccagcctgaagtccagagtgaccatcagcgtggacaccagccggaaccagttctccctgaagctgtctagcgtgacagccgccgataccgccgtgtactactgcaccagagaggacagcagcaactggcggagtagaggccagggaacactggtcacagttagctctggatccggcggaggcggaagtggaggcggaggatctggcggcggaggctctttcgaagaagtccaacttgtggagtctggagggggcctggtgcagcccggcggctctctcagactgtcttgtgcggcaagcggctacaccttcacctcttactggatagaatgggtgaggcaggcacctggaaagggactggagtggattggagagattctgccaggagggggagatacaaattacaatgaaatcttcaaggggcgggccaccttttcagcggataccagcaagaatacagcttacctgcagatgaatagcctccgggcagaagataccgctgtttattattgcacgagacgggtgccaataagactggactattgggggcaagggactcttgtcaccgtcagttcaacgcgtgaggacctgaagaacgtgttcccacctgaggtggccgtgttcgagcctagcgaggccgagatcagccacacccagaaagccaccctcgtgtgcctggctaccggcttctaccccgaccatgtggaactgtcttggtgggtcaacggcaaagaggtgcacagcggcgtgtgtaccgacccccagccactgaaagaacagcccgccctgaacgacagccggtactgcctgagcagcagactgagagtgtccgccaccttctggcagaacccccggaaccacttcagatgccaggtgcagttctacggcctgagcgagaacgacgagtggacccaggacagagccaagcccgtgacccagatcgtgtctgccgaagcctggggcagagccgattgcgacgtgaagctggtggaaaagagcttcgagacagacaccaacctgaacttccagaacctgagcgtgatcggcttcagaatcctgctgctgaaagtggccggctttaacctgctgatgaccctgcggctgtggtccagc

SEQ ID NO: 38310 - DNA, 2073 bp, synthetic construct
  source 1..2073: mol_type = other DNA
atggccttaccagtgaccgccttgctcctgccgctggccttgctgctccacgccgccaggccggacatcgtgatgacacagagccctgatagcctggccgtgtctctgggagagagagccaccattaactgcaaggccagccagagcgtggactacgacggcgacagcttcctgaactggtatcagcagaagcccggccagcctcctaagctgctgatctacgccgccagcaatctggaaagcggcgtgccaagcagattttccggctctggcagcggcaccgatttcaccctgacaatatccagcctccagcctgaggacgtggccgtgtactactgccagcagagcaacgacgaccctctgacctttggacagggcaccaaggtggaaatcaaactcgaggacctgaagaacgtgttcccacctgaggtggccgtgttcgagcctagcgaggccgagatcagccacacccagaaagccaccctcgtgtgcctggctaccggcttctaccccgaccatgtggaactgtcttggtgggtcaacggcaaagaggtgcacagcggcgtgtgtaccgacccccagccactgaaagaacagcccgccctgaacgacagccggtactgcctgagcagcagactgagagtgtccgccaccttctggcagaacccccggaaccacttcagatgccaggtgcagttctacggcctgagcgagaacgacgagtggacccaggacagagccaagcccgtgacccagatcgtgtctgccgaagcctggggcagagccgattgcgacgtgaagctggtggaaaagagcttcgagacagacaccaacctgaacttccagaacctgagcgtgatcggcttcagaatcctgctgctgaaagtggccggctttaacctgctgatgaccctgcggctgtggtccagcagggccaagcgatctggatctggagcaacaaacttctcactactcaaacaagcaggtgacgtggaggagaatcccgggcctactagtatggactggatttggcgcatccttttccttgtcggcgctgctaccggcgcccattccgggcccatggaccccgacctggaaatcagagccgccttcctgcggcagagaaacacagccctgagaacagaggtggccgagctggaacaagaggtgcagcggctggaaaacgaggtgtcccagtacgagacaagatacggccctctcggaggcggaaaaggatccggcggcggaggatctggcggaggcggatctgggggcggaggctctttcgaagaagtccaacttgtggagtctggagggggcctggtgcagcccggcggctctctcagactgtcttgtgcggcaagcggctacaccttcacctcttactggatagaatgggtgaggcaggcacctggaaagggactggagtggattggagagattctgccaggagggggagatacaaattacaatgaaatcttcaaggggcgggccaccttttcagcggataccagcaagaatacagcttacctgcagatgaatagcctccgggcagaagataccgctgtttattattgcacgagacgggtgccaataagactggactattgggggcaagggactcttgtcaccgtcagttcaacgcgtatccagaaccctgatcctgccgtgtaccagctgcgggatagcaagagcagcgacaagagcgtgtgtctgttcaccgacttcgacagccagaccaacgtgtcccagagcaaggactccgacgtgtacatcaccgataagtgcgtgctggacatgcggagcatggacttcaagagcaactccgccgtggcctggtccaacaagtccgatttcgcctgcgccaacgccttcaacaacagcattatccccgaggacacattcttcccaagccccgagagcagctgcggctttaccagcgagagctaccagcagggcgtgctgagcgccaccatcctgtacgagatcctgctgggcaaggccaccctgtacgccgtgctggtgtctgccctggtgctgatggctatggtcaagcggaaggacagccgggga

SEQ ID NO: 38311 - DNA, 2085 bp, synthetic construct
  source 1..2085: mol_type = other DNA
atggccttaccagtgaccgccttgctcctgccgctggccttgctgctccacgccgccaggccggacatcgtgatgacacagagccctgatagcctggccgtgtctctgggagagagagccaccattaactgcaaggccagccagagcgtggactacgacggcgacagcttcctgaactggtatcagcagaagcccggccagcctcctaagctgctgatctacgccgccagcaatctggaaagcggcgtgccaagcagattttccggctctggcagcggcaccgatttcaccctgacaatatccagcctccagcctgaggacgtggccgtgtactactgccagcagagcaacgacgaccctctgacctttggacagggcaccaaggtggaaatcaaactcgagatccagaaccctgatcctgccgtgtaccagctgcgggatagcaagagcagcgacaagagcgtgtgtctgttcaccgacttcgacagccagaccaacgtgtcccagagcaaggactccgacgtgtacatcaccgataagtgcgtgctggacatgcggagcatggacttcaagagcaactccgccgtggcctggtccaacaagtccgatttcgcctgcgccaacgccttcaacaacagcattatccccgaggacacattcttcccaagccccgagagcagctgcggctttaccagcgagagctaccagcagggcgtgctgagcgccaccatcctgtacgagatcctgctgggcaaggccaccctgtacgccgtgctggtgtctgccctggtgctgatggctatggtcaagcggaaggacagccggggacgcgccaagagaagcggatctggcgtgaagcagaccctgaatttcgacctgctgaagctggctggcgacgtggaatccaacccaggccctactagtatggactggatttggcgcatccttttccttgtcggcgctgctaccggcgcccattccgggcccatggaccccgacctggaaatcagagccgccttcctgcggcagagaaacacagccctgagaacagaggtggccgagctggaacaagaggtgcagcggctggaaaacgaggtgtcccagtacgagacaagatacggccctctcggaggcggaaaaggatccggcggcggaggatctggcggaggcggatctgggggcggaggctctttcgaagaagtccaacttgtggagtctggagggggcctggtgcagcccggcggctctctcagactgtcttgtgcggcaagcggctacaccttcacctcttactggatagaatgggtgaggcaggcacctggaaagggactggagtggattggagagattctgccaggagggggagatacaaattacaatgaaatcttcaaggggcgggccaccttttcagcggataccagcaagaatacagcttacctgcagatgaatagcctccgggcagaagataccgctgtttattattgcacgagacgggtgccaataagactggactattgggggcaagggactcttgtcaccgtcagttcaacgcgtgaggacctgaagaacgtgttcccacctgaggtggccgtgttcgagcctagcgaggccgagatcagccacacccagaaagccaccctcgtgtgcctggctaccggcttctaccccgaccatgtggaactgtcttggtgggtcaacggcaaagaggtgcacagcggcgtgtgtaccgacccccagccactgaaagaacagcccgccctgaacgacagccggtactgcctgagcagcagactgagagtgtccgccaccttctggcagaacccccggaaccacttcagatgccaggtgcagttctacggcctgagcgagaacgacgagtggacccaggacagagccaagcccgtgacccagatcgtgtctgccgaagcctggggcagagccgattgcgacgtgaagctggtggaaaagagcttcgagacagacaccaacctgaacttccagaacctgagcgtgatcggcttcagaatcctgctgctgaaagtggccggctttaacctgctgatgaccctgcggctgtggtccagc

SEQ ID NO: 38312 - DNA, 2004 bp, synthetic construct
  source 1..2004: mol_type = other DNA
atggccttaccagtgaccgccttgctcctgccgctggccttgctgctccacgccgccaggccggacatcgtgatgacacagagccctgatagcctggccgtgtctctgggagagagagccaccattaactgcaaggccagccagagcgtggactacgacggcgacagcttcctgaactggtatcagcagaagcccggccagcctcctaagctgctgatctacgccgccagcaatctggaaagcggcgtgccaagcagattttccggctctggcagcggcaccgatttcaccctgacaatatccagcctccagcctgaggacgtggccgtgtactactgccagcagagcaacgacgaccctctgacctttggacagggcaccaaggtggaaatcaaactcgaggacctgaagaacgtgttcccacctgaggtggccgtgttcgagcctagcgaggccgagatcagccacacccagaaagccaccctcgtgtgcctggctaccggcttctaccccgaccatgtggaactgtcttggtgggtcaacggcaaagaggtgcacagcggcgtgtgtaccgacccccagccactgaaagaacagcccgccctgaacgacagccggtactgcctgagcagcagactgagagtgtccgccaccttctggcagaacccccggaaccacttcagatgccaggtgcagttctacggcctgagcgagaacgacgagtggacccaggacagagccaagcccgtgacccagatcgtgtctgccgaagcctggggcagagccgattgcgacgtgaagctggtggaaaagagcttcgagacagacaccaacctgaacttccagaacctgagcgtgatcggcttcagaatcctgctgctgaaagtggccggctttaacctgctgatgaccctgcggctgtggtccagcagggccaagcgatctggatctggagcaacaaacttctcactactcaaacaagcaggtgacgtggaggagaatcccgggcctactagtatggactggatttggcgcatccttttccttgtcggcgctgctaccggcgcccattccgggcccgaagttgctgccctcgagaaggaggtagcagctttggaaaaagaagtcgcagcccttgagaaagaagttgcggctctggagaagggatccggcggcggaggatctggcggaggcggatctgggggcggaggctctttcgaagaagtccaacttgtggagtctggagggggcctggtgcagcccggcggctctctcagactgtcttgtgcggcaagcggctacaccttcacctcttactggatagaatgggtgaggcaggcacctggaaagggactggagtggattggagagattctgccaggagggggagatacaaattacaatgaaatcttcaaggggcgggccaccttttcagcggataccagcaagaatacagcttacctgcagatgaatagcctccgggcagaagataccgctgtttattattgcacgagacgggtgccaataagactggactattgggggcaagggactcttgtcaccgtcagttcaacgcgtatccagaaccctgatcctgccgtgtaccagctgcgggatagcaagagcagcgacaagagcgtgtgtctgttcaccgacttcgacagccagaccaacgtgtcccagagcaaggactccgacgtgtacatcaccgataagtgcgtgctggacatgcggagcatggacttcaagagcaactccgccgtggcctggtccaacaagtccgatttcgcctgcgccaacgccttcaacaacagcattatccccgaggacacattcttcccaagccccgagagcagctgcggctttaccagcgagagctaccagcagggcgtgctgagcgccaccatcctgtacgagatcctgctgggcaaggccaccctgtacgccgtgctggtgtctgccctggtgctgatggctatggtcaagcggaaggacagccgggga

SEQ ID NO: 38313 - DNA, 2016 bp, synthetic construct
  source 1..2016: mol_type = other DNA
atggccttaccagtgaccgccttgctcctgccgctggccttgctgctccacgccgccaggccggacatcgtgatgacacagagccctgatagcctggccgtgtctctgggagagagagccaccattaactgcaaggccagccagagcgtggactacgacggcgacagcttcctgaactggtatcagcagaagcccggccagcctcctaagctgctgatctacgccgccagcaatctggaaagcggcgtgccaagcagattttccggctctggcagcggcaccgatttcaccctgacaatatccagcctccagcctgaggacgtggccgtgtactactgccagcagagcaacgacgaccctctgacctttggacagggcaccaaggtggaaatcaaactcgagatccagaaccctgatcctgccgtgtaccagctgcgggatagcaagagcagcgacaagagcgtgtgtctgttcaccgacttcgacagccagaccaacgtgtcccagagcaaggactccgacgtgtacatcaccgataagtgcgtgctggacatgcggagcatggacttcaagagcaactccgccgtggcctggtccaacaagtccgatttcgcctgcgccaacgccttcaacaacagcattatccccgaggacacattcttcccaagccccgagagcagctgcggctttaccagcgagagctaccagcagggcgtgctgagcgccaccatcctgtacgagatcctgctgggcaaggccaccctgtacgccgtgctggtgtctgccctggtgctgatggctatggtcaagcggaaggacagccggggacgcgccaagagaagcggatctggcgtgaagcagaccctgaatttcgacctgctgaagctggctggcgacgtggaatccaacccaggccctactagtatggactggatttggcgcatccttttccttgtcggcgctgctaccggcgcccattccgggcccgaagttgctgccctcgagaaggaggtagcagctttggaaaaagaagtcgcagcccttgagaaagaagttgcggctctggagaagggatccggcggcggaggatctggcggaggcggatctgggggcggaggctctttcgaagaagtccaacttgtggagtctggagggggcctggtgcagcccggcggctctctcagactgtcttgtgcggcaagcggctacaccttcacctcttactggatagaatgggtgaggcaggcacctggaaagggactggagtggattggagagattctgccaggagggggagatacaaattacaatgaaatcttcaaggggcgggccaccttttcagcggataccagcaagaatacagcttacctgcagatgaatagcctccgggcagaagataccgctgtttattattgcacgagacgggtgccaataagactggactattgggggcaagggactcttgtcaccgtcagttcaacgcgtgaggacctgaagaacgtgttcccacctgaggtggccgtgttcgagcctagcgaggccgagatcagccacacccagaaagccaccctcgtgtgcctggctaccggcttctaccccgaccatgtggaactgtcttggtgggtcaacggcaaagaggtgcacagcggcgtgtgtaccgacccccagccactgaaagaacagcccgccctgaacgacagccggtactgcctgagcagcagactgagagtgtccgccaccttctggcagaacccccggaaccacttcagatgccaggtgcagttctacggcctgagcgagaacgacgagtggacccaggacagagccaagcccgtgacccagatcgtgtctgccgaagcctggggcagagccgattgcgacgtgaagctggtggaaaagagcttcgagacagacaccaacctgaacttccagaacctgagcgtgatcggcttcagaatcctgctgctgaaagtggccggctttaacctgctgatgaccctgcggctgtggtccagc

SEQ ID NO: 38314 - DNA, 2274 bp, synthetic construct
  source 1..2274: mol_type = other DNA
atggccttaccagtgaccgccttgctcctgccgctggccttgctgctccacgccgccaggccggacatcgtgatgacacagagccctgatagcctggccgtgtctctgggagagagagccaccattaactgcaaggccagccagagcgtggactacgacggcgacagcttcctgaactggtatcagcagaagcccggccagcctcctaagctgctgatctacgccgccagcaatctggaaagcggcgtgccaagcagattttccggctctggcagcggcaccgatttcaccctgacaatatccagcctccagcctgaggacgtggccgtgtactactgccagcagagcaacgacgaccctctgacctttggacagggcaccaaggtggaaatcaaactcgaggacctgaagaacgtgttcccacctgaggtggccgtgttcgagcctagcgaggccgagatcagccacacccagaaagccaccctcgtgtgcctggctaccggcttctaccccgaccatgtggaactgtcttggtgggtcaacggcaaagaggtgcacagcggcgtgtgtaccgacccccagccactgaaagaacagcccgccctgaacgacagccggtactgcctgagcagcagactgagagtgtccgccaccttctggcagaacccccggaaccacttcagatgccaggtgcagttctacggcctgagcgagaacgacgagtggacccaggacagagccaagcccgtgacccagatcgtgtctgccgaagcctggggcagagccgattgcgacgtgaagctggtggaaaagagcttcgagacagacaccaacctgaacttccagaacctgagcgtgatcggcttcagaatcctgctgctgaaagtggccggctttaacctgctgatgaccctgcggctgtggtccagcagggccaagcgatctggatctggagcaacaaacttctcactactcaaacaagcaggtgacgtggaggagaatcccgggcctactagtatggactggatttggcgcatccttttccttgtcggcgctgctaccggcgcccattccgggccccaggttcagctgcaagagtctggcggaggacttgctcaagctggcggaagcctgagactgtcttgtgccgcctctggcagaaccttcagcatgggctggtttagacaggcccctggcaaagagagagagttcgtcgccgccatcacatacagcggcggcagcccttactacgcctcttctgtcagaggccggttcaccatcagccgggacaacgccaagaacaccgtgtacctccagatgaacagcctgaagccagaggacaccgccgtgtactactgtgccgccaatccaacctacggcagcgactggaatgccgagaattggggccagggcacccaagtgacagtgtctagtggatccggcggcggaggatctggcggaggcggatctgggggcggaggctctttcgaagaagtccaacttgtggagtctggagggggcctggtgcagcccggcggctctctcagactgtcttgtgcggcaagcggctacaccttcacctcttactggatagaatgggtgaggcaggcacctggaaagggactggagtggattggagagattctgccaggagggggagatacaaattacaatgaaatcttcaaggggcgggccaccttttcagcggataccagcaagaatacagcttacctgcagatgaatagcctccgggcagaagataccgctgtttattattgcacgagacgggtgccaataagactggactattgggggcaagggactcttgtcaccgtcagttcaacgcgtatccagaaccctgatcctgccgtgtaccagctgcgggatagcaagagcagcgacaagagcgtgtgtctgttcaccgacttcgacagccagaccaacgtgtcccagagcaaggactccgacgtgtacatcaccgataagtgcgtgctggacatgcggagcatggacttcaagagcaactccgccgtggcctggtccaacaagtccgatttcgcctgcgccaacgccttcaacaacagcattatccccgaggacacattcttcccaagccccgagagcagctgcggctttaccagcgagagctaccagcagggcgtgctgagcgccaccatcctgtacgagatcctgctgggcaaggccaccctgtacgccgtgctggtgtctgccctggtgctgatggctatggtcaagcggaaggacagccgggga

SEQ ID NO: 38315 - DNA, 2286 bp, synthetic construct
  source 1..2286: mol_type = other DNA
atggccttaccagtgaccgccttgctcctgccgctggccttgctgctccacgccgccaggccggacatcgtgatgacacagagccctgatagcctggccgtgtctctgggagagagagccaccattaactgcaaggccagccagagcgtggactacgacggcgacagcttcctgaactggtatcagcagaagcccggccagcctcctaagctgctgatctacgccgccagcaatctggaaagcggcgtgccaagcagattttccggctctggcagcggcaccgatttcaccctgacaatatccagcctccagcctgaggacgtggccgtgtactactgccagcagagcaacgacgaccctctgacctttggacagggcaccaaggtggaaatcaaactcgagatccagaaccctgatcctgccgtgtaccagctgcgggatagcaagagcagcgacaagagcgtgtgtctgttcaccgacttcgacagccagaccaacgtgtcccagagcaaggactccgacgtgtacatcaccgataagtgcgtgctggacatgcggagcatggacttcaagagcaactccgccgtggcctggtccaacaagtccgatttcgcctgcgccaacgccttcaacaacagcattatccccgaggacacattcttcccaagccccgagagcagctgcggctttaccagcgagagctaccagcagggcgtgctgagcgccaccatcctgtacgagatcctgctgggcaaggccaccctgtacgccgtgctggtgtctgccctggtgctgatggctatggtcaagcggaaggacagccggggacgcgccaagagaagcggatctggcgtgaagcagaccctgaatttcgacctgctgaagctggctggcgacgtggaatccaacccaggccctactagtatggactggatttggcgcatccttttccttgtcggcgctgctaccggcgcccattccgggccccaggttcagctgcaagagtctggcggaggacttgctcaagctggcggaagcctgagactgtcttgtgccgcctctggcagaaccttcagcatgggctggtttagacaggcccctggcaaagagagagagttcgtcgccgccatcacatacagcggcggcagcccttactacgcctcttctgtcagaggccggttcaccatcagccgggacaacgccaagaacaccgtgtacctccagatgaacagcctgaagccagaggacaccgccgtgtactactgtgccgccaatccaacctacggcagcgactggaatgccgagaattggggccagggcacccaagtgacagtgtctagtggatccggcggcggaggatctggcggaggcggatctgggggcggaggctctttcgaagaagtccaacttgtggagtctggagggggcctggtgcagcccggcggctctctcagactgtcttgtgcggcaagcggctacaccttcacctcttactggatagaatgggtgaggcaggcacctggaaagggactggagtggattggagagattctgccaggagggggagatacaaattacaatgaaatcttcaaggggcgggccaccttttcagcggataccagcaagaatacagcttacctgcagatgaatagcctccgggcagaagataccgctgtttattattgcacgagacgggtgccaataagactggactattgggggcaagggactcttgtcaccgtcagttcaacgcgtgaggacctgaagaacgtgttcccacctgaggtggccgtgttcgagcctagcgaggccgagatcagccacacccagaaagccaccctcgtgtgcctggctaccggcttctaccccgaccatgtggaactgtcttggtgggtcaacggcaaagaggtgcacagcggcgtgtgtaccgacccccagccactgaaagaacagcccgccctgaacgacagccggtactgcctgagcagcagactgagagtgtccgccaccttctggcagaacccccggaaccacttcagatgccaggtgcagttctacggcctgagcgagaacgacgagtggacccaggacagagccaagcccgtgacccagatcgtgtctgccgaagcctggggcagagccgattgcgacgtgaagctggtggaaaagagcttcgagacagacaccaacctgaacttccagaacctgagcgtgatcggcttcagaatcctgctgctgaaagtggccggctttaacctgctgatgaccctgcggctgtggtccagc

SEQ ID NO: 38316 - DNA, 2292 bp, synthetic construct
  source 1..2292: mol_type = other DNA
atggccttaccagtgaccgccttgctcctgccgctggccttgctgctccacgccgccaggccggaagtgcaactggtggaatctggaggctctctggtgcagccagggggaagcctgagactgtcttgtgccgcttccggcttcaccttcgacgactacgccatgagctgggtgcgccaggtgccaggcaaaggcctggaatgggtgtccagcatcaactggagcggcacccacaccgattacgccgactccgtgaaaggcagattcacaatcagcagaaacaacgccaacaataccctgtacctgcagatgaactccctgaagtctgaggatacagcagtgtattattgcgccaagaactggcgggacgccggcaccacttggtttgagaaaagcggctctgccggacagggaacccaagtgacagtgtcctccggtaccggcggaggcggatctggcggcggaggtagcggtggcggaggatctgaattcgacatcgtgatgacacagagccctgatagcctggccgtgtctctgggagagagagccaccattaactgcaaggccagccagagcgtggactacgacggcgacagcttcctgaactggtatcagcagaagcccggccagcctcctaagctgctgatctacgccgccagcaatctggaaagcggcgtgccaagcagattttccggctctggcagcggcaccgatttcaccctgacaatatccagcctccagcctgaggacgtggccgtgtactactgccagcagagcaacgacgaccctctgacctttggacagggcaccaaggtggaaatcaaactcgaggacctgaagaacgtgttcccacctgaggtggccgtgttcgagcctagcgaggccgagatcagccacacccagaaagccaccctcgtgtgcctggctaccggcttctaccccgaccatgtggaactgtcttggtgggtcaacggcaaagaggtgcacagcggcgtgtgtaccgacccccagccactgaaagaacagcccgccctgaacgacagccggtactgcctgagcagcagactgagagtgtccgccaccttctggcagaacccccggaaccacttcagatgccaggtgcagttctacggcctgagcgagaacgacgagtggacccaggacagagccaagcccgtgacccagatcgtgtctgccgaagcctggggcagagccgattgcgacgtgaagctggtggaaaagagcttcgagacagacaccaacctgaacttccagaacctgagcgtgatcggcttcagaatcctgctgctgaaagtggccggctttaacctgctgatgaccctgcggctgtggtccagcagggccaagcgatctggatctggagcaacaaacttctcactactcaaacaagcaggtgacgtggaggagaatcccgggcctactagtatggactggatttggcgcatccttttccttgtcggcgctgctaccggcgcgcattccttcgaagaagtccaacttgtggagtctggagggggcctggtgcagcccggcggctctctcagactgtcttgtgcggcaagcggctacaccttcacctcttactggatagaatgggtgaggcaggcacctggaaagggactggagtggattggagagattctgccaggagggggagatacaaattacaatgaaatcttcaaggggcgggccaccttttcagcggataccagcaagaatacagcttacctgcagatgaatagcctccgggcagaagataccgctgtttattattgcacgagacgggtgccaataagactggactattgggggcaagggactcttgtcaccgtcagttcaacgcgtatccagaaccctgatcctgccgtgtaccagctgcgggatagcaagagcagcgacaagagcgtgtgtctgttcaccgacttcgacagccagaccaacgtgtcccagagcaaggactccgacgtgtacatcaccgataagtgcgtgctggacatgcggagcatggacttcaagagcaactccgccgtggcctggtccaacaagtccgatttcgcctgcgccaacgccttcaacaacagcattatccccgaggacacattcttcccaagccccgagagcagctgcggctttaccagcgagagctaccagcagggcgtgctgagcgccaccatcctgtacgagatcctgctgggcaaggccaccctgtacgccgtgctggtgtctgccctggtgctgatggctatggtcaagcggaaggacagccgggga

SEQ ID NO: 38317 - DNA, 2304 bp, synthetic construct
  source 1..2304: mol_type = other DNA
atggccttaccagtgaccgccttgctcctgccgctggccttgctgctccacgccgccaggccggaagtgcaactggtggaatctggaggctctctggtgcagccagggggaagcctgagactgtcttgtgccgcttccggcttcaccttcgacgactacgccatgagctgggtgcgccaggtgccaggcaaaggcctggaatgggtgtccagcatcaactggagcggcacccacaccgattacgccgactccgtgaaaggcagattcacaatcagcagaaacaacgccaacaataccctgtacctgcagatgaactccctgaagtctgaggatacagcagtgtattattgcgccaagaactggcgggacgccggcaccacttggtttgagaaaagcggctctgccggacagggaacccaagtgacagtgtcctccggtaccggcggaggcggatctggcggcggaggtagcggtggcggaggatctgaattcgacatcgtgatgacacagagccctgatagcctggccgtgtctctgggagagagagccaccattaactgcaaggccagccagagcgtggactacgacggcgacagcttcctgaactggtatcagcagaagcccggccagcctcctaagctgctgatctacgccgccagcaatctggaaagcggcgtgccaagcagattttccggctctggcagcggcaccgatttcaccctgacaatatccagcctccagcctgaggacgtggccgtgtactactgccagcagagcaacgacgaccctctgacctttggacagggcaccaaggtggaaatcaaactcgagatccagaaccctgatcctgccgtgtaccagctgcgggatagcaagagcagcgacaagagcgtgtgtctgttcaccgacttcgacagccagaccaacgtgtcccagagcaaggactccgacgtgtacatcaccgataagtgcgtgctggacatgcggagcatggacttcaagagcaactccgccgtggcctggtccaacaagtccgatttcgcctgcgccaacgccttcaacaacagcattatccccgaggacacattcttcccaagccccgagagcagctgcggctttaccagcgagagctaccagcagggcgtgctgagcgccaccatcctgtacgagatcctgctgggcaaggccaccctgtacgccgtgctggtgtctgccctggtgctgatggctatggtcaagcggaaggacagccggggacgcgccaagagaagcggatctggcgtgaagcagaccctgaatttcgacctgctgaagctggctggcgacgtggaatccaacccaggccctactagtatggactggatttggcgcatccttttccttgtcggcgctgctaccggcgcgcattccttcgaagaagtccaacttgtggagtctggagggggcctggtgcagcccggcggctctctcagactgtcttgtgcggcaagcggctacaccttcacctcttactggatagaatgggtgaggcaggcacctggaaagggactggagtggattggagagattctgccaggagggggagatacaaattacaatgaaatcttcaaggggcgggccaccttttcagcggataccagcaagaatacagcttacctgcagatgaatagcctccgggcagaagataccgctgtttattattgcacgagacgggtgccaataagactggactattgggggcaagggactcttgtcaccgtcagttcaacgcgtgaggacctgaagaacgtgttcccacctgaggtggccgtgttcgagcctagcgaggccgagatcagccacacccagaaagccaccctcgtgtgcctggctaccggcttctaccccgaccatgtggaactgtcttggtgggtcaacggcaaagaggtgcacagcggcgtgtgtaccgacccccagccactgaaagaacagcccgccctgaacgacagccggtactgcctgagcagcagactgagagtgtccgccaccttctggcagaacccccggaaccacttcagatgccaggtgcagttctacggcctgagcgagaacgacgagtggacccaggacagagccaagcccgtgacccagatcgtgtctgccgaagcctggggcagagccgattgcgacgtgaagctggtggaaaagagcttcgagacagacaccaacctgaacttccagaacctgagcgtgatcggcttcagaatcctgctgctgaaagtggccggctttaacctgctgatgaccctgcggctgtggtccagc

SEQ ID NO: 38318 - DNA, 2286 bp, synthetic construct
  source 1..2286: mol_type = other DNA
atggccttaccagtgaccgccttgctcctgccgctggccttgctgctccacgccgccaggccggaagttcagctgcttgagtctggcggaggactggttcaacctggcggaagcctgagactgtcttgtgccgccagcggcttcatcttcagcagctacgccatgagctgggtccgacaggctcctggaaagggccaagaatgggtttccggcgttagcggcacaggcgtgaacacctactacgccgatagcgtgaagggcagattcaccatcagccgggacaacagcaagaacaccctgtacctccagatgaacagcctgagagccgaggacaccgccgtgtactattgtgcctctggcaaaggctgggacagcggctcttggtacgaggactatagaggccagggcaccctggtcacagtttcttcaggtaccggcggaggcggatctggcggcggaggtagcggtggcggaggatctgaattcgacatcgtgatgacacagagccctgatagcctggccgtgtctctgggagagagagccaccattaactgcaaggccagccagagcgtggactacgacggcgacagcttcctgaactggtatcagcagaagcccggccagcctcctaagctgctgatctacgccgccagcaatctggaaagcggcgtgccaagcagattttccggctctggcagcggcaccgatttcaccctgacaatatccagcctccagcctgaggacgtggccgtgtactactgccagcagagcaacgacgaccctctgacctttggacagggcaccaaggtggaaatcaaactcgaggacctgaagaacgtgttcccacctgaggtggccgtgttcgagcctagcgaggccgagatcagccacacccagaaagccaccctcgtgtgcctggctaccggcttctaccccgaccatgtggaactgtcttggtgggtcaacggcaaagaggtgcacagcggcgtgtgtaccgacccccagccactgaaagaacagcccgccctgaacgacagccggtactgcctgagcagcagactgagagtgtccgccaccttctggcagaacccccggaaccacttcagatgccaggtgcagttctacggcctgagcgagaacgacgagtggacccaggacagagccaagcccgtgacccagatcgtgtctgccgaagcctggggcagagccgattgcgacgtgaagctggtggaaaagagcttcgagacagacaccaacctgaacttccagaacctgagcgtgatcggcttcagaatcctgctgctgaaagtggccggctttaacctgctgatgaccctgcggctgtggtccagcagggccaagcgatctggatctggagcaacaaacttctcactactcaaacaagcaggtgacgtggaggagaatcccgggcctactagtatggactggatttggcgcatccttttccttgtcggcgctgctaccggcgcgcattccttcgaagaagtccaacttgtggagtctggagggggcctggtgcagcccggcggctctctcagactgtcttgtgcggcaagcggctacaccttcacctcttactggatagaatgggtgaggcaggcacctggaaagggactggagtggattggagagattctgccaggagggggagatacaaattacaatgaaatcttcaaggggcgggccaccttttcagcggataccagcaagaatacagcttacctgcagatgaatagcctccgggcagaagataccgctgtttattattgcacgagacgggtgccaataagactggactattgggggcaagggactcttgtcaccgtcagttcaacgcgtatccagaaccctgatcctgccgtgtaccagctgcgggatagcaagagcagcgacaagagcgtgtgtctgttcaccgacttcgacagccagaccaacgtgtcccagagcaaggactccgacgtgtacatcaccgataagtgcgtgctggacatgcggagcatggacttcaagagcaactccgccgtggcctggtccaacaagtccgatttcgcctgcgccaacgccttcaacaacagcattatccccgaggacacattcttcccaagccccgagagcagctgcggctttaccagcgagagctaccagcagggcgtgctgagcgccaccatcctgtacgagatcctgctgggcaaggccaccctgtacgccgtgctggtgtctgccctggtgctgatggctatggtcaagcggaaggacagccgggga

SEQ ID NO: 38319 - DNA, 2298 bp, synthetic construct
  source 1..2298: mol_type = other DNA
atggccttaccagtgaccgccttgctcctgccgctggccttgctgctccacgccgccaggccggaagttcagctgcttgagtctggcggaggactggttcaacctggcggaagcctgagactgtcttgtgccgccagcggcttcatcttcagcagctacgccatgagctgggtccgacaggctcctggaaagggccaagaatgggtttccggcgttagcggcacaggcgtgaacacctactacgccgatagcgtgaagggcagattcaccatcagccgggacaacagcaagaacaccctgtacctccagatgaacagcctgagagccgaggacaccgccgtgtactattgtgcctctggcaaaggctgggacagcggctcttggtacgaggactatagaggccagggcaccctggtcacagtttcttcaggtaccggcggaggcggatctggcggcggaggtagcggtggcggaggatctgaattcgacatcgtgatgacacagagccctgatagcctggccgtgtctctgggagagagagccaccattaactgcaaggccagccagagcgtggactacgacggcgacagcttcctgaactggtatcagcagaagcccggccagcctcctaagctgctgatctacgccgccagcaatctggaaagcggcgtgccaagcagattttccggctctggcagcggcaccgatttcaccctgacaatatccagcctccagcctgaggacgtggccgtgtactactgccagcagagcaacgacgaccctctgacctttggacagggcaccaaggtggaaatcaaactcgagatccagaaccctgatcctgccgtgtaccagctgcgggatagcaagagcagcgacaagagcgtgtgtctgttcaccgacttcgacagccagaccaacgtgtcccagagcaaggactccgacgtgtacatcaccgataagtgcgtgctggacatgcggagcatggacttcaagagcaactccgccgtggcctggtccaacaagtccgatttcgcctgcgccaacgccttcaacaacagcattatccccgaggacacattcttcccaagccccgagagcagctgcggctttaccagcgagagctaccagcagggcgtgctgagcgccaccatcctgtacgagatcctgctgggcaaggccaccctgtacgccgtgctggtgtctgccctggtgctgatggctatggtcaagcggaaggacagccggggacgcgccaagagaagcggatctggcgtgaagcagaccctgaatttcgacctgctgaagctggctggcgacgtggaatccaacccaggccctactagtatggactggatttggcgcatccttttccttgtcggcgctgctaccggcgcgcattccttcgaagaagtccaacttgtggagtctggagggggcctggtgcagcccggcggctctctcagactgtcttgtgcggcaagcggctacaccttcacctcttactggatagaatgggtgaggcaggcacctggaaagggactggagtggattggagagattctgccaggagggggagatacaaattacaatgaaatcttcaaggggcgggccaccttttcagcggataccagcaagaatacagcttacctgcagatgaatagcctccgggcagaagataccgctgtttattattgcacgagacgggtgccaataagactggactattgggggcaagggactcttgtcaccgtcagttcaacgcgtgaggacctgaagaacgtgttcccacctgaggtggccgtgttcgagcctagcgaggccgagatcagccacacccagaaagccaccctcgtgtgcctggctaccggcttctaccccgaccatgtggaactgtcttggtgggtcaacggcaaagaggtgcacagcggcgtgtgtaccgacccccagccactgaaagaacagcccgccctgaacgacagccggtactgcctgagcagcagactgagagtgtccgccaccttctggcagaacccccggaaccacttcagatgccaggtgcagttctacggcctgagcgagaacgacgagtggacccaggacagagccaagcccgtgacccagatcgtgtctgccgaagcctggggcagagccgattgcgacgtgaagctggtggaaaagagcttcgagacagacaccaacctgaacttccagaacctgagcgtgatcggcttcagaatcctgctgctgaaagtggccggctttaacctgctgatgaccctgcggctgtggtccagc

SEQ ID NO: 38320 - DNA, 2190 bp, synthetic construct
  source 1..2190: mol_type = other DNA
atggccttaccagtgaccgccttgctcctgccgctggccttgctgctccacgccgccaggccgatgctgcccgctcctaagaatctggtggtgtccagaatcaccgaggacagcgccagactgtcttggacagctcctgatgccgccttcgacagcttccccatccggtacatcgagacactgatctggggcgaagccatctggctggatgtgcctggaagcgagagaagctacgacctgaccggactgaagcctggcacagagtatgccgtggtcatcaccggcgtgaaaggcggcagattctctagccctctggtggcctctttcaccaccggtaccggcggaggcggatctggcggcggaggtagcggtggcggaggatctgaattcgacatcgtgatgacacagagccctgatagcctggccgtgtctctgggagagagagccaccattaactgcaaggccagccagagcgtggactacgacggcgacagcttcctgaactggtatcagcagaagcccggccagcctcctaagctgctgatctacgccgccagcaatctggaaagcggcgtgccaagcagattttccggctctggcagcggcaccgatttcaccctgacaatatccagcctccagcctgaggacgtggccgtgtactactgccagcagagcaacgacgaccctctgacctttggacagggcaccaaggtggaaatcaaactcgaggacctgaagaacgtgttcccacctgaggtggccgtgttcgagcctagcgaggccgagatcagccacacccagaaagccaccctcgtgtgcctggctaccggcttctaccccgaccatgtggaactgtcttggtgggtcaacggcaaagaggtgcacagcggcgtgtgtaccgacccccagccactgaaagaacagcccgccctgaacgacagccggtactgcctgagcagcagactgagagtgtccgccaccttctggcagaacccccggaaccacttcagatgccaggtgcagttctacggcctgagcgagaacgacgagtggacccaggacagagccaagcccgtgacccagatcgtgtctgccgaagcctggggcagagccgattgcgacgtgaagctggtggaaaagagcttcgagacagacaccaacctgaacttccagaacctgagcgtgatcggcttcagaatcctgctgctgaaagtggccggctttaacctgctgatgaccctgcggctgtggtccagcagggccaagcgatctggatctggagcaacaaacttctcactactcaaacaagcaggtgacgtggaggagaatcccgggcctactagtatggactggatttggcgcatccttttccttgtcggcgctgctaccggcgcgcattccttcgaagaagtccaacttgtggagtctggagggggcctggtgcagcccggcggctctctcagactgtcttgtgcggcaagcggctacaccttcacctcttactggatagaatgggtgaggcaggcacctggaaagggactggagtggattggagagattctgccaggagggggagatacaaattacaatgaaatcttcaaggggcgggccaccttttcagcggataccagcaagaatacagcttacctgcagatgaatagcctccgggcagaagataccgctgtttattattgcacgagacgggtgccaataagactggactattgggggcaagggactcttgtcaccgtcagttcaacgcgtatccagaaccctgatcctgccgtgtaccagctgcgggatagcaagagcagcgacaagagcgtgtgtctgttcaccgacttcgacagccagaccaacgtgtcccagagcaaggactccgacgtgtacatcaccgataagtgcgtgctggacatgcggagcatggacttcaagagcaactccgccgtggcctggtccaacaagtccgatttcgcctgcgccaacgccttcaacaacagcattatccccgaggacacattcttcccaagccccgagagcagctgcggctttaccagcgagagctaccagcagggcgtgctgagcgccaccatcctgtacgagatcctgctgggcaaggccaccctgtacgccgtgctggtgtctgccctggtgctgatggctatggtcaagcggaaggacagccgggga

SEQ ID NO: 38321 - DNA, 2202 bp, synthetic construct
  source 1..2202: mol_type = other DNA
atggccttaccagtgaccgccttgctcctgccgctggccttgctgctccacgccgccaggccgatgctgcccgctcctaagaatctggtggtgtccagaatcaccgaggacagcgccagactgtcttggacagctcctgatgccgccttcgacagcttccccatccggtacatcgagacactgatctggggcgaagccatctggctggatgtgcctggaagcgagagaagctacgacctgaccggactgaagcctggcacagagtatgccgtggtcatcaccggcgtgaaaggcggcagattctctagccctctggtggcctctttcaccaccggtaccggcggaggcggatctggcggcggaggtagcggtggcggaggatctgaattcgacatcgtgatgacacagagccctgatagcctggccgtgtctctgggagagagagccaccattaactgcaaggccagccagagcgtggactacgacggcgacagcttcctgaactggtatcagcagaagcccggccagcctcctaagctgctgatctacgccgccagcaatctggaaagcggcgtgccaagcagattttccggctctggcagcggcaccgatttcaccctgacaatatccagcctccagcctgaggacgtggccgtgtactactgccagcagagcaacgacgaccctctgacctttggacagggcaccaaggtggaaatcaaactcgagatccagaaccctgatcctgccgtgtaccagctgcgggatagcaagagcagcgacaagagcgtgtgtctgttcaccgacttcgacagccagaccaacgtgtcccagagcaaggactccgacgtgtacatcaccgataagtgcgtgctggacatgcggagcatggacttcaagagcaactccgccgtggcctggtccaacaagtccgatttcgcctgcgccaacgccttcaacaacagcattatccccgaggacacattcttcccaagccccgagagcagctgcggctttaccagcgagagctaccagcagggcgtgctgagcgccaccatcctgtacgagatcctgctgggcaaggccaccctgtacgccgtgctggtgtctgccctggtgctgatggctatggtcaagcggaaggacagccggggacgcgccaagagaagcggatctggcgtgaagcagaccctgaatttcgacctgctgaagctggctggcgacgtggaatccaacccaggccctactagtatggactggatttggcgcatccttttccttgtcggcgctgctaccggcgcgcattccttcgaagaagtccaacttgtggagtctggagggggcctggtgcagcccggcggctctctcagactgtcttgtgcggcaagcggctacaccttcacctcttactggatagaatgggtgaggcaggcacctggaaagggactggagtggattggagagattctgccaggagggggagatacaaattacaatgaaatcttcaaggggcgggccaccttttcagcggataccagcaagaatacagcttacctgcagatgaatagcctccgggcagaagataccgctgtttattattgcacgagacgggtgccaataagactggactattgggggcaagggactcttgtcaccgtcagttcaacgcgtgaggacctgaagaacgtgttcccacctgaggtggccgtgttcgagcctagcgaggccgagatcagccacacccagaaagccaccctcgtgtgcctggctaccggcttctaccccgaccatgtggaactgtcttggtgggtcaacggcaaagaggtgcacagcggcgtgtgtaccgacccccagccactgaaagaacagcccgccctgaacgacagccggtactgcctgagcagcagactgagagtgtccgccaccttctggcagaacccccggaaccacttcagatgccaggtgcagttctacggcctgagcgagaacgacgagtggacccaggacagagccaagcccgtgacccagatcgtgtctgccgaagcctggggcagagccgattgcgacgtgaagctggtggaaaagagcttcgagacagacaccaacctgaacttccagaacctgagcgtgatcggcttcagaatcctgctgctgaaagtggccggctttaacctgctgatgaccctgcggctgtggtccagc

SEQ ID NO: 38322 - DNA, 2277 bp, synthetic construct
  source 1..2277: mol_type = other DNA
atggccttaccagtgaccgccttgctcctgccgctggccttgctgctccacgccgccaggccggaggtgcagctggttgaatctggcggaggactggttcagcctggcggatctctgagactgtcttgtgccgccagcggcttcaacatcaaggatacctgtatcggctgggttcgcagagcccctggcaaagaggaagaactggtcgccaaaatctgcaagtacagcggccacaccagatacgccgacagcgtgaagggcagattcaccatcagcgccgacaccagcaagaacaccgcctacctccagatgaacagcctgagagccgaggacaccgccgtgtactattgtgccgctgtgtccgtcagagatgggcactacaattactggggccagggcaccaccgtgaccgtttcttcaggtaccggcggaggcggatctggcggcggaggtagcggtggcggaggatctgaattcgacatcgtgatgacacagagccctgatagcctggccgtgtctctgggagagagagccaccattaactgcaaggccagccagagcgtggactacgacggcgacagcttcctgaactggtatcagcagaagcccggccagcctcctaagctgctgatctacgccgccagcaatctggaaagcggcgtgccaagcagattttccggctctggcagcggcaccgatttcaccctgacaatatccagcctccagcctgaggacgtggccgtgtactactgccagcagagcaacgacgaccctctgacctttggacagggcaccaaggtggaaatcaaactcgaggacctgaagaacgtgttcccacctgaggtggccgtgttcgagcctagcgaggccgagatcagccacacccagaaagccaccctcgtgtgcctggctaccggcttctaccccgaccatgtggaactgtcttggtgggtcaacggcaaagaggtgcacagcggcgtgtgtaccgacccccagccactgaaagaacagcccgccctgaacgacagccggtactgcctgagcagcagactgagagtgtccgccaccttctggcagaacccccggaaccacttcagatgccaggtgcagttctacggcctgagcgagaacgacgagtggacccaggacagagccaagcccgtgacccagatcgtgtctgccgaagcctggggcagagccgattgcgacgtgaagctggtggaaaagagcttcgagacagacaccaacctgaacttccagaacctgagcgtgatcggcttcagaatcctgctgctgaaagtggccggctttaacctgctgatgaccctgcggctgtggtccagcagggccaagcgatctggatctggagcaacaaacttctcactactcaaacaagcaggtgacgtggaggagaatcccgggcctactagtatggactggatttggcgcatccttttccttgtcggcgctgctaccggcgcgcattccttcgaagaagtccaacttgtggagtctggagggggcctggtgcagcccggcggctctctcagactgtcttgtgcggcaagcggctacaccttcacctcttactggatagaatgggtgaggcaggcacctggaaagggactggagtggattggagagattctgccaggagggggagatacaaattacaatgaaatcttcaaggggcgggccaccttttcagcggataccagcaagaatacagcttacctgcagatgaatagcctccgggcagaagataccgctgtttattattgcacgagacgggtgccaataagactggactattgggggcaagggactcttgtcaccgtcagttcaacgcgtatccagaaccctgatcctgccgtgtaccagctgcgggatagcaagagcagcgacaagagcgtgtgtctgttcaccgacttcgacagccagaccaacgtgtcccagagcaaggactccgacgtgtacatcaccgataagtgcgtgctggacatgcggagcatggacttcaagagcaactccgccgtggcctggtccaacaagtccgatttcgcctgcgccaacgccttcaacaacagcattatccccgaggacacattcttcccaagccccgagagcagctgcggctttaccagcgagagctaccagcagggcgtgctgagcgccaccatcctgtacgagatcctgctgggcaaggccaccctgtacgccgtgctggtgtctgccctggtgctgatggctatggtcaagcggaaggacagccgggga

SEQ ID NO: 38323 - DNA, 2289 bp, synthetic construct
  source 1..2289: mol_type = other DNA
atggccttaccagtgaccgccttgctcctgccgctggccttgctgctccacgccgccaggccggaggtgcagctggttgaatctggcggaggactggttcagcctggcggatctctgagactgtcttgtgccgccagcggcttcaacatcaaggatacctgtatcggctgggttcgcagagcccctggcaaagaggaagaactggtcgccaaaatctgcaagtacagcggccacaccagatacgccgacagcgtgaagggcagattcaccatcagcgccgacaccagcaagaacaccgcctacctccagatgaacagcctgagagccgaggacaccgccgtgtactattgtgccgctgtgtccgtcagagatgggcactacaattactggggccagggcaccaccgtgaccgtttcttcaggtaccggcggaggcggatctggcggcggaggtagcggtggcggaggatctgaattcgacatcgtgatgacacagagccctgatagcctggccgtgtctctgggagagagagccaccattaactgcaaggccagccagagcgtggactacgacggcgacagcttcctgaactggtatcagcagaagcccggccagcctcctaagctgctgatctacgccgccagcaatctggaaagcggcgtgccaagcagattttccggctctggcagcggcaccgatttcaccctgacaatatccagcctccagcctgaggacgtggccgtgtactactgccagcagagcaacgacgaccctctgacctttggacagggcaccaaggtggaaatcaaactcgagatccagaaccctgatcctgccgtgtaccagctgcgggatagcaagagcagcgacaagagcgtgtgtctgttcaccgacttcgacagccagaccaacgtgtcccagagcaaggactccgacgtgtacatcaccgataagtgcgtgctggacatgcggagcatggacttcaagagcaactccgccgtggcctggtccaacaagtccgatttcgcctgcgccaacgccttcaacaacagcattatccccgaggacacattcttcccaagccccgagagcagctgcggctttaccagcgagagctaccagcagggcgtgctgagcgccaccatcctgtacgagatcctgctgggcaaggccaccctgtacgccgtgctggtgtctgccctggtgctgatggctatggtcaagcggaaggacagccggggacgcgccaagagaagcggatctggcgtgaagcagaccctgaatttcgacctgctgaagctggctggcgacgtggaatccaacccaggccctactagtatggactggatttggcgcatccttttccttgtcggcgctgctaccggcgcgcattccttcgaagaagtccaacttgtggagtctggagggggcctggtgcagcccggcggctctctcagactgtcttgtgcggcaagcggctacaccttcacctcttactggatagaatgggtgaggcaggcacctggaaagggactggagtggattggagagattctgccaggagggggagatacaaattacaatgaaatcttcaaggggcgggccaccttttcagcggataccagcaagaatacagcttacctgcagatgaatagcctccgggcagaagataccgctgtttattattgcacgagacgggtgccaataagactggactattgggggcaagggactcttgtcaccgtcagttcaacgcgtgaggacctgaagaacgtgttcccacctgaggtggccgtgttcgagcctagcgaggccgagatcagccacacccagaaagccaccctcgtgtgcctggctaccggcttctaccccgaccatgtggaactgtcttggtgggtcaacggcaaagaggtgcacagcggcgtgtgtaccgacccccagccactgaaagaacagcccgccctgaacgacagccggtactgcctgagcagcagactgagagtgtccgccaccttctggcagaacccccggaaccacttcagatgccaggtgcagttctacggcctgagcgagaacgacgagtggacccaggacagagccaagcccgtgacccagatcgtgtctgccgaagcctggggcagagccgattgcgacgtgaagctggtggaaaagagcttcgagacagacaccaacctgaacttccagaacctgagcgtgatcggcttcagaatcctgctgctgaaagtggccggctttaacctgctgatgaccctgcggctgtggtccagc

SEQ ID NO: 38324 - DNA, 3393 bp, synthetic construct
  source 1..3393: mol_type = other DNA
atggccttaccagtgaccgccttgctcctgccgctggccttgctgctccacgccgccaggccggaagtgcagctggttgaatctggcggaggactggttcaggctggcggatctctgagactgtcttgtgccgccagcggcagaacctttagcatgggctggtttagacaggcccctggcaaagagagagagttcgtcgccgccatcacatactctggcggcagcccttactacgccgactctgtgaagggcagattcaccatcagccgggacaacgccaagaacaccgtgtacctccagatgaacagcctgaagcctgaggacaccgccgtgtactactgcgccgccaatccaacatacggcagcgactggaacgccgagaattggggccagggaacccaagtgacagtgtctagcggtaccggcggaggcggatctggcggcggaggtagcggtggcggaggatctgaattcgacatcgtgatgacacagagccctgatagcctggccgtgtctctgggagagagagccaccattaactgcaaggccagccagagcgtggactacgacggcgacagcttcctgaactggtatcagcagaagcccggccagcctcctaagctgctgatctacgccgccagcaatctggaaagcggcgtgccaagcagattttccggctctggcagcggcaccgatttcaccctgacaatatccagcctccagcctgaggacgtggccgtgtactactgccagcagagcaacgacgaccctctgacctttggacagggcaccaaggtggaaatcaaactcgaggacctgaagaacgtgttcccacctgaggtggccgtgttcgagcctagcgaggccgagatcagccacacccagaaagccaccctcgtgtgcctggctaccggcttctaccccgaccatgtggaactgtcttggtgggtcaacggcaaagaggtgcacagcggcgtgtgtaccgacccccagccactgaaagaacagcccgccctgaacgacagccggtactgcctgagcagcagactgagagtgtccgccaccttctggcagaacccccggaaccacttcagatgccaggtgcagttctacggcctgagcgagaacgacgagtggacccaggacagagccaagcccgtgacccagatcgtgtctgccgaagcctggggcagagccgattgcgacgtgaagctggtggaaaagagcttcgagacagacaccaacctgaacttccagaacctgagcgtgatcggcttcagaatcctgctgctgaaagtggccggctttaacctgctgatgaccctgcggctgtggtccagcagggccaagcgatctggatctggagcaacaaacttctcactactcaaacaagcaggtgacgtggaggagaatcccgggcctactagtgccaccatggactggatttggcgcatccttttccttgtcggcgctgctaccggcgcccattccgggcccgaagtgcaactggttgaatccggtggcggcctggtgcaagcaggcggatctctcagacttagctgtgccgcctccggcagaaccttcacaatgggatggtttaggcaggctccagggaaagagagagagttcgtcgccgccatctctctgtctcccacactggcctactacgccgactctgtgaaaggccggttcaccatctccagagataatgccaagaacaccgtggtgctgcaaatgaactctctgaaacccgaggatacagccctgtactattgtgccgctgaccggaagtccgtgatgagcatcagacccgattactggggacagggcacacaagtcacagtgtcctctggatccggcggcggaggatctggcggaggcggatctgggggcggaggctctttcgaagaagtccaacttgtggagtctggagggggcctggtgcagcccggcggctctctcagactgtcttgtgcggcaagcggctacaccttcacctcttactggatagaatgggtgaggcaggcacctggaaagggactggagtggattggagagattctgccaggagggggagatacaaattacaatgaaatcttcaaggggcgggccaccttttcagcggataccagcaagaatacagcttacctgcagatgaatagcctccgggcagaagataccgctgtttattattgcacgagacgggtgccaataagactggactattgggggcaagggactcttgtcaccgtcagttcaacgcgtatccagaaccctgatcctgccgtgtaccagctgcgggatagcaagagcagcgacaagagcgtgtgtctgttcaccgacttcgacagccagaccaacgtgtcccagagcaaggactccgacgtgtacatcaccgataagtgcgtgctggacatgcggagcatggacttcaagagcaactccgccgtggcctggtccaacaagtccgatttcgcctgcgccaacgccttcaacaacagcattatccccgaggacacattcttcccaagccccgagagcagctgcggctttaccagcgagagctaccagcagggcgtgctgagcgccaccatcctgtacgagatcctgctgggcaaggccaccctgtacgccgtgctggtgtctgccctggtgctgatggctatggtcaagcggaaggacagccggggacgcgccaagagaagcggatctggcgtgaagcagaccctgaatttcgacctgctgaagctggctggcgacgtggaatccaacccaggcccttctagaggccatatgaccgagtacaagcccacggtgcgcctcgccacccgcgacgacgtccccagggccgtacgcaccctcgccgccgcgttcgccgactaccccgccacgcgccacaccgtcgatccggaccgccacatcgagcgggtcaccgagctgcaagaactcttcctcacgcgcgtcgggctcgacatcggcaaggtgtgggtcgcggacgacggcgccgcggtggcggtctggaccacgccggagagcgtcgaagcgggggcggtgttcgccgagatcggcccgcgcatggccgagttgagcggttcccggctggccgcgcagcaacagatggaaggcctcctggcgccgcaccggcccaaggagcccgcgtggttcctggccaccgtcggcgtctcgcccgaccaccagggcaagggtctgggcagcgccgtcgtgctccccggagtggaggcggccgagcgcgccggggtgcccgccttcctggagacctccgcgccccgcaacctccccttctacgagcggctcggcttcaccgtcaccgccgacgtcgaggtgcccgaaggaccgcgcacctggtgcatgacccgcaagcccggtgcctga

SEQ ID NO: 38325 - DNA, 2307 bp, synthetic construct
  source 1..2307: mol_type = other DNA
atggccttaccagtgaccgccttgctcctgccgctggccttgctgctccacgccgccaggccggaagtgcagctggttgaatctggcggaggactggttcagcctggcggatctctgagactgtcttgtgccgcctctggcttcgccagcgactactatatcatcggctggttcagacaggcccctggcaaagagagagagggcgtcagctgtatcagcagcagatacgccaacaccaactacgccgacagcgtgaagggcagattcaccatcagccgggacaacgccaagaacaccgtgtacctccagatgaacagcctgaagcctgaggacaccgccgtgtactactgtgccgccgacaccagaagatacacctgtcctgacattgccaccatgcaccggaacttcgattcttggggccagggcacactggtcaccgtttcttctggtaccggcggaggcggatctggcggcggaggtagcggtggcggaggatctgaattcgacatcgtgatgacacagagccctgatagcctggccgtgtctctgggagagagagccaccattaactgcaaggccagccagagcgtggactacgacggcgacagcttcctgaactggtatcagcagaagcccggccagcctcctaagctgctgatctacgccgccagcaatctggaaagcggcgtgccaagcagattttccggctctggcagcggcaccgatttcaccctgacaatatccagcctccagcctgaggacgtggccgtgtactactgccagcagagcaacgacgaccctctgacctttggacagggcaccaaggtggaaatcaaactcgaggacctgaagaacgtgttcccacctgaggtggccgtgttcgagcctagcgaggccgagatcagccacacccagaaagccaccctcgtgtgcctggctaccggcttctaccccgaccatgtggaactgtcttggtgggtcaacggcaaagaggtgcacagcggcgtgtgtaccgacccccagccactgaaagaacagcccgccctgaacgacagccggtactgcctgagcagcagactgagagtgtccgccaccttctggcagaacccccggaaccacttcagatgccaggtgcagttctacggcctgagcgagaacgacgagtggacccaggacagagccaagcccgtgacccagatcgtgtctgccgaagcctggggcagagccgattgcgacgtgaagctggtggaaaagagcttcgagacagacaccaacctgaacttccagaacctgagcgtgatcggcttcagaatcctgctgctgaaagtggccggctttaacctgctgatgaccctgcggctgtggtccagcagggccaagcgatctggatctggagcaacaaacttctcactactcaaacaagcaggtgacgtggaggagaatcccgggcctactagtatggactggatttggcgcatccttttccttgtcggcgctgctaccggcgcgcattccttcgaagaagtccaacttgtggagtctggagggggcctggtgcagcccggcggctctctcagactgtcttgtgcggcaagcggctacaccttcacctcttactggatagaatgggtgaggcaggcacctggaaagggactggagtggattggagagattctgccaggagggggagatacaaattacaatgaaatcttcaaggggcgggccaccttttcagcggataccagcaagaatacagcttacctgcagatgaatagcctccgggcagaagataccgctgtttattattgcacgagacgggtgccaataagactggactattgggggcaagggactcttgtcaccgtcagttcaacgcgtatccagaaccctgatcctgccgtgtaccagctgcgggatagcaagagcagcgacaagagcgtgtgtctgttcaccgacttcgacagccagaccaacgtgtcccagagcaaggactccgacgtgtacatcaccgataagtgcgtgctggacatgcggagcatggacttcaagagcaactccgccgtggcctggtccaacaagtccgatttcgcctgcgccaacgccttcaacaacagcattatccccgaggacacattcttcccaagccccgagagcagctgcggctttaccagcgagagctaccagcagggcgtgctgagcgccaccatcctgtacgagatcctgctgggcaaggccaccctgtacgccgtgctggtgtctgccctggtgctgatggctatggtcaagcggaaggacagccggggataa

SEQ ID NO: 38326 - DNA, 2307 bp, synthetic construct
  source 1..2307: mol_type = other DNA
atggccttaccagtgaccgccttgctcctgccgctggccttgctgctccacgccgccaggccggaagtgcagctggttgaatctggcggaggactggttcagcctggcggatctctgagactgagctgtgaagccagcggcttcgccagcgacgattacatcatcggctggttcagacaggcccctggcaaagagagagagggcgtcagctgcatcagctctaagtacgccaacaccgtgtacaccgacagcgtgaagggcagattcagactgagcagaggcaccgccaagaataccgtgtacctccagatgagcgccctgaagcctgaggataccgccgtgtactactgcgctatggacagccgcagagtgacatgccctgagatcagcaccatgcaccggaacttcgattcttggggccagggcacactggtcacagtgtcatctggtaccggcggaggcggatctggcggcggaggtagcggtggcggaggatctgaattcgacatcgtgatgacacagagccctgatagcctggccgtgtctctgggagagagagccaccattaactgcaaggccagccagagcgtggactacgacggcgacagcttcctgaactggtatcagcagaagcccggccagcctcctaagctgctgatctacgccgccagcaatctggaaagcggcgtgccaagcagattttccggctctggcagcggcaccgatttcaccctgacaatatccagcctccagcctgaggacgtggccgtgtactactgccagcagagcaacgacgaccctctgacctttggacagggcaccaaggtggaaatcaaactcgaggacctgaagaacgtgttcccacctgaggtggccgtgttcgagcctagcgaggccgagatcagccacacccagaaagccaccctcgtgtgcctggctaccggcttctaccccgaccatgtggaactgtcttggtgggtcaacggcaaagaggtgcacagcggcgtgtgtaccgacccccagccactgaaagaacagcccgccctgaacgacagccggtactgcctgagcagcagactgagagtgtccgccaccttctggcagaacccccggaaccacttcagatgccaggtgcagttctacggcctgagcgagaacgacgagtggacccaggacagagccaagcccgtgacccagatcgtgtctgccgaagcctggggcagagccgattgcgacgtgaagctggtggaaaagagcttcgagacagacaccaacctgaacttccagaacctgagcgtgatcggcttcagaatcctgctgctgaaagtggccggctttaacctgctgatgaccctgcggctgtggtccagcagggccaagcgatctggatctggagcaacaaacttctcactactcaaacaagcaggtgacgtggaggagaatcccgggcctactagtatggactggatttggcgcatccttttccttgtcggcgctgctaccggcgcgcattccttcgaagaagtccaacttgtggagtctggagggggcctggtgcagcccggcggctctctcagactgtcttgtgcggcaagcggctacaccttcacctcttactggatagaatgggtgaggcaggcacctggaaagggactggagtggattggagagattctgccaggagggggagatacaaattacaatgaaatcttcaaggggcgggccaccttttcagcggataccagcaagaatacagcttacctgcagatgaatagcctccgggcagaagataccgctgtttattattgcacgagacgggtgccaataagactggactattgggggcaagggactcttgtcaccgtcagttcaacgcgtatccagaaccctgatcctgccgtgtaccagctgcgggatagcaagagcagcgacaagagcgtgtgtctgttcaccgacttcgacagccagaccaacgtgtcccagagcaaggactccgacgtgtacatcaccgataagtgcgtgctggacatgcggagcatggacttcaagagcaactccgccgtggcctggtccaacaagtccgatttcgcctgcgccaacgccttcaacaacagcattatccccgaggacacattcttcccaagccccgagagcagctgcggctttaccagcgagagctaccagcagggcgtgctgagcgccaccatcctgtacgagatcctgctgggcaaggccaccctgtacgccgtgctggtgtctgccctggtgctgatggctatggtcaagcggaaggacagccggggataa

SEQ ID NO: 38327 - DNA, 2304 bp, synthetic construct
  source 1..2304: mol_type = other DNA
atggccttaccagtgaccgccttgctcctgccgctggccttgctgctccacgccgccaggccggaagtgcagctggttgaatctggcggaggactggttcagcctggcggatctctgagactgtcttgtgccgcctctggcttcgccagcgactactatatcatcggctggttcagacaggcccctggcaaagagagagagggcgtcagctgtatcagcagcagatacgccaacaccaactacgccgacagcgtgaagggcagattcaccatcagccgggacaacgccaagaacaccgtgtacctccagatgaacagcctgaagcctgaggacaccgccgtgtactactgtgccgccgacaccagaagatacacctgtcctgacattgccaccatgcaccggaacttcgattcttggggccagggcacactggtcaccgtttcttctggtaccggcggaggcggatctggcggcggaggtagcggtggcggaggatctgaattcgacatcgtgatgacacagagccctgatagcctggccgtgtctctgggagagagagccaccattaactgcaaggccagccagagcgtggactacgacggcgacagcttcctgaactggtatcagcagaagcccggccagcctcctaagctgctgatctacgccgccagcaatctggaaagcggcgtgccaagcagattttccggctctggcagcggcaccgatttcaccctgacaatatccagcctccagcctgaggacgtggccgtgtactactgccagcagagcaacgacgaccctctgacctttggacagggcaccaaggtggaaatcaaactcgagatccagaaccctgatcctgccgtgtaccagctgcgggatagcaagagcagcgacaagagcgtgtgtctgttcaccgacttcgacagccagaccaacgtgtcccagagcaaggactccgacgtgtacatcaccgataagtgcgtgctggacatgcggagcatggacttcaagagcaactccgccgtggcctggtccaacaagtccgatttcgcctgcgccaacgccttcaacaacagcattatccccgaggacacattcttcccaagccccgagagcagctgcggctttaccagcgagagctaccagcagggcgtgctgagcgccaccatcctgtacgagatcctgctgggcaaggccaccctgtacgccgtgctggtgtctgccctggtgctgatggctatggtcaagcggaaggacagccggggaagggccaagcgatctggatctggagcaacaaacttctcactactcaaacaagcaggtgacgtggaggagaatcccgggcctactagtatggactggatttggcgcatccttttccttgtcggcgctgctaccggcgcgcattccttcgaagaagtccaacttgtggagtctggagggggcctggtgcagcccggcggctctctcagactgtcttgtgcggcaagcggctacaccttcacctcttactggatagaatgggtgaggcaggcacctggaaagggactggagtggattggagagattctgccaggagggggagatacaaattacaatgaaatcttcaaggggcgggccaccttttcagcggataccagcaagaatacagcttacctgcagatgaatagcctccgggcagaagataccgctgtttattattgcacgagacgggtgccaataagactggactattgggggcaagggactcttgtcaccgtcagttcaacgcgtgacctgaagaacgtgttcccacctgaggtggccgtgttcgagcctagcgaggccgagatcagccacacccagaaagccaccctcgtgtgcctggctaccggcttctaccccgaccatgtggaactgtcttggtgggtcaacggcaaagaggtgcacagcggcgtgtgtaccgacccccagccactgaaagaacagcccgccctgaacgacagccggtactgcctgagcagcagactgagagtgtccgccaccttctggcagaacccccggaaccacttcagatgccaggtgcagttctacggcctgagcgagaacgacgagtggacccaggacagagccaagcccgtgacccagatcgtgtctgccgaagcctggggcagagccgattgcgacgtgaagctggtggaaaagagcttcgagacagacaccaacctgaacttccagaacctgagcgtgatcggcttcagaatcctgctgctgaaagtggccggctttaacctgctgatgaccctgcggctgtggtccagc

SEQ ID NO: 38328 - DNA, 2304 bp, synthetic construct
  source 1..2304: mol_type = other DNA
atggccttaccagtgaccgccttgctcctgccgctggccttgctgctccacgccgccaggccggaagtgcagctggttgaatctggcggaggactggttcagcctggcggatctctgagactgagctgtgaagccagcggcttcgccagcgacgattacatcatcggctggttcagacaggcccctggcaaagagagagagggcgtcagctgcatcagctctaagtacgccaacaccgtgtacaccgacagcgtgaagggcagattcagactgagcagaggcaccgccaagaataccgtgtacctccagatgagcgccctgaagcctgaggataccgccgtgtactactgcgctatggacagccgcagagtgacatgccctgagatcagcaccatgcaccggaacttcgattcttggggccagggcacactggtcacagtgtcatctggtaccggcggaggcggatctggcggcggaggtagcggtggcggaggatctgaattcgacatcgtgatgacacagagccctgatagcctggccgtgtctctgggagagagagccaccattaactgcaaggccagccagagcgtggactacgacggcgacagcttcctgaactggtatcagcagaagcccggccagcctcctaagctgctgatctacgccgccagcaatctggaaagcggcgtgccaagcagattttccggctctggcagcggcaccgatttcaccctgacaatatccagcctccagcctgaggacgtggccgtgtactactgccagcagagcaacgacgaccctctgacctttggacagggcaccaaggtggaaatcaaactcgagatccagaaccctgatcctgccgtgtaccagctgcgggatagcaagagcagcgacaagagcgtgtgtctgttcaccgacttcgacagccagaccaacgtgtcccagagcaaggactccgacgtgtacatcaccgataagtgcgtgctggacatgcggagcatggacttcaagagcaactccgccgtggcctggtccaacaagtccgatttcgcctgcgccaacgccttcaacaacagcattatccccgaggacacattcttcccaagccccgagagcagctgcggctttaccagcgagagctaccagcagggcgtgctgagcgccaccatcctgtacgagatcctgctgggcaaggccaccctgtacgccgtgctggtgtctgccctggtgctgatggctatggtcaagcggaaggacagccggggaagggccaagcgatctggatctggagcaacaaacttctcactactcaaacaagcaggtgacgtggaggagaatcccgggcctactagtatggactggatttggcgcatccttttccttgtcggcgctgctaccggcgcgcattccttcgaagaagtccaacttgtggagtctggagggggcctggtgcagcccggcggctctctcagactgtcttgtgcggcaagcggctacaccttcacctcttactggatagaatgggtgaggcaggcacctggaaagggactggagtggattggagagattctgccaggagggggagatacaaattacaatgaaatcttcaaggggcgggccaccttttcagcggataccagcaagaatacagcttacctgcagatgaatagcctccgggcagaagataccgctgtttattattgcacgagacgggtgccaataagactggactattgggggcaagggactcttgtcaccgtcagttcaacgcgtgacctgaagaacgtgttcccacctgaggtggccgtgttcgagcctagcgaggccgagatcagccacacccagaaagccaccctcgtgtgcctggctaccggcttctaccccgaccatgtggaactgtcttggtgggtcaacggcaaagaggtgcacagcggcgtgtgtaccgacccccagccactgaaagaacagcccgccctgaacgacagccggtactgcctgagcagcagactgagagtgtccgccaccttctggcagaacccccggaaccacttcagatgccaggtgcagttctacggcctgagcgagaacgacgagtggacccaggacagagccaagcccgtgacccagatcgtgtctgccgaagcctggggcagagccgattgcgacgtgaagctggtggaaaagagcttcgagacagacaccaacctgaacttccagaacctgagcgtgatcggcttcagaatcctgctgctgaaagtggccggctttaacctgctgatgaccctgcggctgtggtccagc

SEQ ID NO: 38329 - DNA, 2277 bp, synthetic construct
  source 1..2277: mol_type = other DNA
atggccttaccagtgaccgccttgctcctgccgctggccttgctgctccacgccgccaggccgcaagtcaaactggaagaaagcggtggcggcctggtgcaacctggcgaatctctgagactgagctgtagcgccagcggctccatcttcaaggtgttcagagtgttcgccatgagctggtacaggcaaggccctggcaagcagagagagctggtcgcctctatcagcagcggcgagacaaccacatacgccgaatctgtgaaaggccggttcaccatcagccgggataatgccaagaataccgcctatctccagatggactccctgaagcctgaagatacagctgtgtactactgcaacgccgaccataccttcaccggcgatttttggggccagggaacccaagtgaccgtgtctagtggtaccggcggaggcggatctggcggcggaggtagcggtggcggaggatctgaattcgacatcgtgatgacacagagccctgatagcctggccgtgtctctgggagagagagccaccattaactgcaaggccagccagagcgtggactacgacggcgacagcttcctgaactggtatcagcagaagcccggccagcctcctaagctgctgatctacgccgccagcaatctggaaagcggcgtgccaagcagattttccggctctggcagcggcaccgatttcaccctgacaatatccagcctccagcctgaggacgtggccgtgtactactgccagcagagcaacgacgaccctctgacctttggacagggcaccaaggtggaaatcaaactcgagatccagaaccctgatcctgccgtgtaccagctgcgggatagcaagagcagcgacaagagcgtgtgtctgttcaccgacttcgacagccagaccaacgtgtcccagagcaaggactccgacgtgtacatcaccgataagtgcgtgctggacatgcggagcatggacttcaagagcaactccgccgtggcctggtccaacaagtccgatttcgcctgcgccaacgccttcaacaacagcattatccccgaggacacattcttcccaagccccgagagcagctgcggctttaccagcgagagctaccagcagggcgtgctgagcgccaccatcctgtacgagatcctgctgggcaaggccaccctgtacgccgtgctggtgtctgccctggtgctgatggctatggtcaagcggaaggacagccggggaagggccaagcgatctggatctggagcaacaaacttctcactactcaaacaagcaggtgacgtggaggagaatcccgggcctactagtatggactggatttggcgcatccttttccttgtcggcgctgctaccggcgcgcattccttcgaagaagtccaacttgtggagtctggagggggcctggtgcagcccggcggctctctcagactgtcttgtgcggcaagcggctacaccttcacctcttactggatagaatgggtgaggcaggcacctggaaagggactggagtggattggagagattctgccaggagggggagatacaaattacaatgaaatcttcaaggggcgggccaccttttcagcggataccagcaagaatacagcttacctgcagatgaatagcctccgggcagaagataccgctgtttattattgcacgagacgggtgccaataagactggactattgggggcaagggactcttgtcaccgtcagttcaacgcgtgacctgaagaacgtgttcccacctgaggtggccgtgttcgagcctagcgaggccgagatcagccacacccagaaagccaccctcgtgtgcctggctaccggcttctaccccgaccatgtggaactgtcttggtgggtcaacggcaaagaggtgcacagcggcgtgtgtaccgacccccagccactgaaagaacagcccgccctgaacgacagccggtactgcctgagcagcagactgagagtgtccgccaccttctggcagaacccccggaaccacttcagatgccaggtgcagttctacggcctgagcgagaacgacgagtggacccaggacagagccaagcccgtgacccagatcgtgtctgccgaagcctggggcagagccgattgcgacgtgaagctggtggaaaagagcttcgagacagacaccaacctgaacttccagaacctgagcgtgatcggcttcagaatcctgctgctgaaagtggccggctttaacctgctgatgaccctgcggctgtggtccagc

SEQ ID NO: 38330 - DNA, 2283 bp, synthetic construct
  source 1..2283: mol_type = other DNA
atggccttaccagtgaccgccttgctcctgccgctggccttgctgctccacgccgccaggccggacatcgtgatgacacagagccctgatagcctggccgtgtctctgggagagagagccaccattaactgcaaggccagccagagcgtggactacgacggcgacagcttcctgaactggtatcagcagaagcccggccagcctcctaagctgctgatctacgccgccagcaatctggaaagcggcgtgccaagcagattttccggctctggcagcggcaccgatttcaccctgacaatatccagcctccagcctgaggacgtggccgtgtactactgccagcagagcaacgacgaccctctgacctttggacagggcaccaaggtggaaatcaaactcgaggacctgaagaacgtgttcccacctgaggtggccgtgttcgagcctagcgaggccgagatcagccacacccagaaagccaccctcgtgtgcctggctaccggcttctaccccgaccatgtggaactgtcttggtgggtcaacggcaaagaggtgcacagcggcgtgtgtaccgacccccagccactgaaagaacagcccgccctgaacgacagccggtactgcctgagcagcagactgagagtgtccgccaccttctggcagaacccccggaaccacttcagatgccaggtgcagttctacggcctgagcgagaacgacgagtggacccaggacagagccaagcccgtgacccagatcgtgtctgccgaagcctggggcagagccgattgcgacgtgaagctggtggaaaagagcttcgagacagacaccaacctgaacttccagaacctgagcgtgatcggcttcagaatcctgctgctgaaagtggccggctttaacctgctgatgaccctgcggctgtggtccagcagggccaagcgatctggatctggagcaacaaacttctcactactcaaacaagcaggtgacgtggaggagaatcccgggcctactagtgccaccatggactggatttggcgcatccttttccttgtcggcgctgctaccggcgcccattccgggcccgaagtgcagctggttgaatctggcggaggactggttcaggctggcggatctctgagactgtcttgtgccgccagcggcagaacctttagcatgggctggtttagacaggcccctggcaaagagagagagttcgtcgccgccatcacatactctggcggcagcccttactacgccgactctgtgaagggcagattcaccatcagccgggacaacgccaagaacaccgtgtacctccagatgaacagcctgaagcctgaggacaccgccgtgtactactgcgccgccaatccaacatacggcagcgactggaacgccgagaattggggccagggaacccaagtgacagtgtctagcggatccggcggcggaggatctggcggaggcggatctgggggcggaggctctttcgaagaagtccaacttgtggagtctggagggggcctggtgcagcccggcggctctctcagactgtcttgtgcggcaagcggctacaccttcacctcttactggatagaatgggtgaggcaggcacctggaaagggactggagtggattggagagattctgccaggagggggagatacaaattacaatgaaatcttcaaggggcgggccaccttttcagcggataccagcaagaatacagcttacctgcagatgaatagcctccgggcagaagataccgctgtttattattgcacgagacgggtgccaataagactggactattgggggcaagggactcttgtcaccgtcagttcaacgcgtatccagaaccctgatcctgccgtgtaccagctgcgggatagcaagagcagcgacaagagcgtgtgtctgttcaccgacttcgacagccagaccaacgtgtcccagagcaaggactccgacgtgtacatcaccgataagtgcgtgctggacatgcggagcatggacttcaagagcaactccgccgtggcctggtccaacaagtccgatttcgcctgcgccaacgccttcaacaacagcattatccccgaggacacattcttcccaagccccgagagcagctgcggctttaccagcgagagctaccagcagggcgtgctgagcgccaccatcctgtacgagatcctgctgggcaaggccaccctgtacgccgtgctggtgtctgccctggtgctgatggctatggtcaagcggaaggacagccggggataa

SEQ ID NO: 38331 - DNA, 2286 bp, synthetic construct
  source 1..2286: mol_type = other DNA
atggccttaccagtgaccgccttgctcctgccgctggccttgctgctccacgccgccaggccggacatcgtgatgacacagagccctgatagcctggccgtgtctctgggagagagagccaccattaactgcaaggccagccagagcgtggactacgacggcgacagcttcctgaactggtatcagcagaagcccggccagcctcctaagctgctgatctacgccgccagcaatctggaaagcggcgtgccaagcagattttccggctctggcagcggcaccgatttcaccctgacaatatccagcctccagcctgaggacgtggccgtgtactactgccagcagagcaacgacgaccctctgacctttggacagggcaccaaggtggaaatcaaactcgaggacctgaagaacgtgttcccacctgaggtggccgtgttcgagcctagcgaggccgagatcagccacacccagaaagccaccctcgtgtgcctggctaccggcttctaccccgaccatgtggaactgtcttggtgggtcaacggcaaagaggtgcacagcggcgtgtgtaccgacccccagccactgaaagaacagcccgccctgaacgacagccggtactgcctgagcagcagactgagagtgtccgccaccttctggcagaacccccggaaccacttcagatgccaggtgcagttctacggcctgagcgagaacgacgagtggacccaggacagagccaagcccgtgacccagatcgtgtctgccgaagcctggggcagagccgattgcgacgtgaagctggtggaaaagagcttcgagacagacaccaacctgaacttccagaacctgagcgtgatcggcttcagaatcctgctgctgaaagtggccggctttaacctgctgatgaccctgcggctgtggtccagcagggccaagcgatctggatctggagcaacaaacttctcactactcaaacaagcaggtgacgtggaggagaatcccgggcctactagtgccaccatggactggatttggcgcatccttttccttgtcggcgctgctaccggcgcccattccgggcccgaagtgcaactggtggaatctgggggcggactggtgcagccaggcggaagtctgaggctgtcttgtgccgcctccggcagcatcttcggcttcaacgacatggcctggtatcggcaggctcccggaaaacagcgcgagctggtggctctgattagcagagtgggcgtgaccagcagcgccgactctgtgaagggcagattcacaatctccagagtgaacgccaaggatacagtgtacctccagatgaactctctgaaacctgaggatacagcagtgtactattgctacatggaccagcggctggacggcagcacactggcctactggggacagggaactcaagtgacagtgtctagcggatccggcggcggaggatctggcggaggcggatctgggggcggaggctctttcgaagaagtccaacttgtggagtctggagggggcctggtgcagcccggcggctctctcagactgtcttgtgcggcaagcggctacaccttcacctcttactggatagaatgggtgaggcaggcacctggaaagggactggagtggattggagagattctgccaggagggggagatacaaattacaatgaaatcttcaaggggcgggccaccttttcagcggataccagcaagaatacagcttacctgcagatgaatagcctccgggcagaagataccgctgtttattattgcacgagacgggtgccaataagactggactattgggggcaagggactcttgtcaccgtcagttcaacgcgtatccagaaccctgatcctgccgtgtaccagctgcgggatagcaagagcagcgacaagagcgtgtgtctgttcaccgacttcgacagccagaccaacgtgtcccagagcaaggactccgacgtgtacatcaccgataagtgcgtgctggacatgcggagcatggacttcaagagcaactccgccgtggcctggtccaacaagtccgatttcgcctgcgccaacgccttcaacaacagcattatccccgaggacacattcttcccaagccccgagagcagctgcggctttaccagcgagagctaccagcagggcgtgctgagcgccaccatcctgtacgagatcctgctgggcaaggccaccctgtacgccgtgctggtgtctgccctggtgctgatggctatggtcaagcggaaggacagccggggataa

SEQ ID NO: 38332 - DNA, 2274 bp, synthetic construct
  source 1..2274: mol_type = other DNA
atggccttaccagtgaccgccttgctcctgccgctggccttgctgctccacgccgccaggccggacatcgtgatgacacagagccctgatagcctggccgtgtctctgggagagagagccaccattaactgcaaggccagccagagcgtggactacgacggcgacagcttcctgaactggtatcagcagaagcccggccagcctcctaagctgctgatctacgccgccagcaatctggaaagcggcgtgccaagcagattttccggctctggcagcggcaccgatttcaccctgacaatatccagcctccagcctgaggacgtggccgtgtactactgccagcagagcaacgacgaccctctgacctttggacagggcaccaaggtggaaatcaaactcgaggacctgaagaacgtgttcccacctgaggtggccgtgttcgagcctagcgaggccgagatcagccacacccagaaagccaccctcgtgtgcctggctaccggcttctaccccgaccatgtggaactgtcttggtgggtcaacggcaaagaggtgcacagcggcgtgtgtaccgacccccagccactgaaagaacagcccgccctgaacgacagccggtactgcctgagcagcagactgagagtgtccgccaccttctggcagaacccccggaaccacttcagatgccaggtgcagttctacggcctgagcgagaacgacgagtggacccaggacagagccaagcccgtgacccagatcgtgtctgccgaagcctggggcagagccgattgcgacgtgaagctggtggaaaagagcttcgagacagacaccaacctgaacttccagaacctgagcgtgatcggcttcagaatcctgctgctgaaagtggccggctttaacctgctgatgaccctgcggctgtggtccagcagggccaagcgatctggatctggagcaacaaacttctcactactcaaacaagcaggtgacgtggaggagaatcccgggcctactagtgccaccatggactggatttggcgcatccttttccttgtcggcgctgctaccggcgcccattccgggcccgaggtgcagctggttgaatctggcggaggactggttcaggctggcggatctctgagactgtcttgtgccgccagcggctctgtgttcagcggcaatgtgatgggctggtacagacaggcccctggcaaagaaagagagtgggttgccgccattgccagcggcggcagcatctactacagagactctgtgaagggcagattcaccatcagccgggacaacgccaagaacaccgtgtacctccagatgaacagcctgaagcctgaggacaccgccgtgtactactgcaactctcaccctcctacactgccctattggggcctgggaacccaagtgacagtgtcctctggatccggcggcggaggatctggcggaggcggatctgggggcggaggctctttcgaagaagtccaacttgtggagtctggagggggcctggtgcagcccggcggctctctcagactgtcttgtgcggcaagcggctacaccttcacctcttactggatagaatgggtgaggcaggcacctggaaagggactggagtggattggagagattctgccaggagggggagatacaaattacaatgaaatcttcaaggggcgggccaccttttcagcggataccagcaagaatacagcttacctgcagatgaatagcctccgggcagaagataccgctgtttattattgcacgagacgggtgccaataagactggactattgggggcaagggactcttgtcaccgtcagttcaacgcgtatccagaaccctgatcctgccgtgtaccagctgcgggatagcaagagcagcgacaagagcgtgtgtctgttcaccgacttcgacagccagaccaacgtgtcccagagcaaggactccgacgtgtacatcaccgataagtgcgtgctggacatgcggagcatggacttcaagagcaactccgccgtggcctggtccaacaagtccgatttcgcctgcgccaacgccttcaacaacagcattatccccgaggacacattcttcccaagccccgagagcagctgcggctttaccagcgagagctaccagcagggcgtgctgagcgccaccatcctgtacgagatcctgctgggcaaggccaccctgtacgccgtgctggtgtctgccctggtgctgatggctatggtcaagcggaaggacagccggggataa

SEQ ID NO: 38333 - DNA, 2268 bp, synthetic construct
  source 1..2268: mol_type = other DNA
atggccttaccagtgaccgccttgctcctgccgctggccttgctgctccacgccgccaggccggacatcgtgatgacacagagccctgatagcctggccgtgtctctgggagagagagccaccattaactgcaaggccagccagagcgtggactacgacggcgacagcttcctgaactggtatcagcagaagcccggccagcctcctaagctgctgatctacgccgccagcaatctggaaagcggcgtgccaagcagattttccggctctggcagcggcaccgatttcaccctgacaatatccagcctccagcctgaggacgtggccgtgtactactgccagcagagcaacgacgaccctctgacctttggacagggcaccaaggtggaaatcaaactcgaggacctgaagaacgtgttcccacctgaggtggccgtgttcgagcctagcgaggccgagatcagccacacccagaaagccaccctcgtgtgcctggctaccggcttctaccccgaccatgtggaactgtcttggtgggtcaacggcaaagaggtgcacagcggcgtgtgtaccgacccccagccactgaaagaacagcccgccctgaacgacagccggtactgcctgagcagcagactgagagtgtccgccaccttctggcagaacccccggaaccacttcagatgccaggtgcagttctacggcctgagcgagaacgacgagtggacccaggacagagccaagcccgtgacccagatcgtgtctgccgaagcctggggcagagccgattgcgacgtgaagctggtggaaaagagcttcgagacagacaccaacctgaacttccagaacctgagcgtgatcggcttcagaatcctgctgctgaaagtggccggctttaacctgctgatgaccctgcggctgtggtccagcagggccaagcgatctggatctggagcaacaaacttctcactactcaaacaagcaggtgacgtggaggagaatcccgggcctactagtgccaccatggactggatttggcgcatccttttccttgtcggcgctgctaccggcgcccattccgggcccgaagttcagctgctggaatctggcggaggactcgttcaacctggcggctctctgagactgagctgtgccgcttctggcttcagcttctctagctacgccctgagctgggttcgacaagctcccggaaagggccttgaatgggtgtccagcatcggcgagaatgacggcaccacagactatgccgatgccgtgaaaggccggtttaccatcagcagagacaattccaagaacacgctctatctgcaaatgaactccctgcgcgtggaagatacagccgtgtattattgcgtgaaggacggcatccactggggacagggaaccctggttacagtgtctagcggatccggcggcggaggatctggcggaggcggatctgggggcggaggctctttcgaagaagtccaacttgtggagtctggagggggcctggtgcagcccggcggctctctcagactgtcttgtgcggcaagcggctacaccttcacctcttactggatagaatgggtgaggcaggcacctggaaagggactggagtggattggagagattctgccaggagggggagatacaaattacaatgaaatcttcaaggggcgggccaccttttcagcggataccagcaagaatacagcttacctgcagatgaatagcctccgggcagaagataccgctgtttattattgcacgagacgggtgccaataagactggactattgggggcaagggactcttgtcaccgtcagttcaacgcgtatccagaaccctgatcctgccgtgtaccagctgcgggatagcaagagcagcgacaagagcgtgtgtctgttcaccgacttcgacagccagaccaacgtgtcccagagcaaggactccgacgtgtacatcaccgataagtgcgtgctggacatgcggagcatggacttcaagagcaactccgccgtggcctggtccaacaagtccgatttcgcctgcgccaacgccttcaacaacagcattatccccgaggacacattcttcccaagccccgagagcagctgcggctttaccagcgagagctaccagcagggcgtgctgagcgccaccatcctgtacgagatcctgctgggcaaggccaccctgtacgccgtgctggtgtctgccctggtgctgatggctatggtcaagcggaaggacagccggggataa

SEQ ID NO: 38334 - DNA, 3375 bp, synthetic construct
  source 1..3375: mol_type = other DNA
atgggacccagactgctgttttgggctctgctgtgtctgctcggcacaggacctgttgaagctggcgtgacacagagccccacacacctgattaagaccagaggccagcaggccacactgagatgcagccctatcagcggccacaccagcgtgtactggtatcagcaggctctcggactgggcctccagttcctgctttggtacgacgagggcgaagagagaaaccggggcaacttccctcctcggttttccggcagacagttccccaactacagcagcgagctgaacgtgaacgccctggaactggaagatagcgccctgtacctgtgtgcctcttctcttggtggacctcgcggactggctggactgagaggggatgagcagtttttcggccctggcaccagactgaccgtgctggaaggtaccggcggaggcggatctggcggcggagaattcgacatcgtgatgacacagagccctgatagcctggccgtgtctctgggagagagagccaccattaactgcaaggccagccagagcgtggactacgacggcgacagcttcctgaactggtatcagcagaagcccggccagcctcctaagctgctgatctacgccgccagcaatctggaaagcggcgtgccaagcagattttccggctctggcagcggcaccgatttcaccctgacaatatccagcctccagcctgaggacgtggccgtgtactactgccagcagagcaacgacgaccctctgacctttggacagggcaccaaggtggaaatcaaactcgaggacctgaagaacgtgttcccacctgaggtggccgtgttcgagcctagcgaggccgagatcagccacacccagaaagccaccctcgtgtgcctggctaccggcttctaccccgaccatgtggaactgtcttggtgggtcaacggcaaagaggtgcacagcggcgtgtgtaccgacccccagccactgaaagaacagcccgccctgaacgacagccggtactgcctgagcagcagactgagagtgtccgccaccttctggcagaacccccggaaccacttcagatgccaggtgcagttctacggcctgagcgagaacgacgagtggacccaggacagagccaagcccgtgacccagatcgtgtctgccgaagcctggggcagagccgattgcgacgtgaagctggtggaaaagagcttcgagacagacaccaacctgaacttccagaacctgagcgtgatcggcttcagaatcctgctgctgaaagtggccggctttaacctgctgatgaccctgcggctgtggtccagcagggccaagcgatctggatctggagcaacaaacttctcactactcaaacaagcaggtgacgtggaggagaatcccgggcctactagtgccaccatggactggatttggcgcatccttttccttgtcggcgctgctaccggcgcccattccgggcccgaagtgcagctggttgaatctggcggaggactggttcaggctggcggatctctgagactgtcttgtgccgccagcggcagaacctttagcatgggctggtttagacaggcccctggcaaagagagagagttcgtcgccgccatcacatactctggcggcagcccttactacgccgactctgtgaagggcagattcaccatcagccgggacaacgccaagaacaccgtgtacctccagatgaacagcctgaagcctgaggacaccgccgtgtactactgcgccgccaatccaacatacggcagcgactggaacgccgagaattggggccagggaacccaagtgacagtgtctagcggatccggcggcggaggatctggcggaggcggatctgggggcggaggctctttcgaagaagtccaacttgtggagtctggagggggcctggtgcagcccggcggctctctcagactgtcttgtgcggcaagcggctacaccttcacctcttactggatagaatgggtgaggcaggcacctggaaagggactggagtggattggagagattctgccaggagggggagatacaaattacaatgaaatcttcaaggggcgggccaccttttcagcggataccagcaagaatacagcttacctgcagatgaatagcctccgggcagaagataccgctgtttattattgcacgagacgggtgccaataagactggactattgggggcaagggactcttgtcaccgtcagttcaacgcgtatccagaaccctgatcctgccgtgtaccagctgcgggatagcaagagcagcgacaagagcgtgtgtctgttcaccgacttcgacagccagaccaacgtgtcccagagcaaggactccgacgtgtacatcaccgataagtgcgtgctggacatgcggagcatggacttcaagagcaactccgccgtggcctggtccaacaagtccgatttcgcctgcgccaacgccttcaacaacagcattatccccgaggacacattcttcccaagccccgagagcagctgcggctttaccagcgagagctaccagcagggcgtgctgagcgccaccatcctgtacgagatcctgctgggcaaggccaccctgtacgccgtgctggtgtctgccctggtgctgatggctatggtcaagcggaaggacagccggggacgcgccaagagaagcggatctggcgtgaagcagaccctgaatttcgacctgctgaagctggctggcgacgtggaatccaacccaggcccttctagaggccatatgaccgagtacaagcccacggtgcgcctcgccacccgcgacgacgtccccagggccgtacgcaccctcgccgccgcgttcgccgactaccccgccacgcgccacaccgtcgatccggaccgccacatcgagcgggtcaccgagctgcaagaactcttcctcacgcgcgtcgggctcgacatcggcaaggtgtgggtcgcggacgacggcgccgcggtggcggtctggaccacgccggagagcgtcgaagcgggggcggtgttcgccgagatcggcccgcgcatggccgagttgagcggttcccggctggccgcgcagcaacagatggaaggcctcctggcgccgcaccggcccaaggagcccgcgtggttcctggccaccgtcggcgtctcgcccgaccaccagggcaagggtctgggcagcgccgtcgtgctccccggagtggaggcggccgagcgcgccggggtgcccgccttcctggagacctccgcgccccgcaacctccccttctacgagcggctcggcttcaccgtcaccgccgacgtcgaggtgcccgaaggaccgcgcacctggtgcatgacccgcaagcccggtgcctga

SEQ ID NO: 38335 - DNA, 3372 bp, synthetic construct
  source 1..3372: mol_type = other DNA
atgggacccagactgctgttttgggctctgctgtgtctgctcggcacaggacctgttgaagctggcgtgacacagagccccacacacctgattaagaccagaggccagcaggccacactgagatgcagccctatcagcggccacaccagcgtgtactggtatcagcaggctctcggactgggcctccagttcctgctttggtacgacgagggcgaagagagaaaccggggcaacttccctcctcggttttccggcagacagttccccaactacagcagcgagctgaacgtgaacgccctggaactggaagatagcgccctgtacctgtgtgccagctctctcggcggagatgaactgggagccgatggcaacgagcagttctttggccctggcaccagactgaccgtgctggaaggtaccggcggaggcggatctggcggcggaagcgaattcgacatcgtgatgacacagagccctgatagcctggccgtgtctctgggagagagagccaccattaactgcaaggccagccagagcgtggactacgacggcgacagcttcctgaactggtatcagcagaagcccggccagcctcctaagctgctgatctacgccgccagcaatctggaaagcggcgtgccaagcagattttccggctctggcagcggcaccgatttcaccctgacaatatccagcctccagcctgaggacgtggccgtgtactactgccagcagagcaacgacgaccctctgacctttggacagggcaccaaggtggaaatcaaactcgaggacctgaagaacgtgttcccacctgaggtggccgtgttcgagcctagcgaggccgagatcagccacacccagaaagccaccctcgtgtgcctggctaccggcttctaccccgaccatgtggaactgtcttggtgggtcaacggcaaagaggtgcacagcggcgtgtgtaccgacccccagccactgaaagaacagcccgccctgaacgacagccggtactgcctgagcagcagactgagagtgtccgccaccttctggcagaacccccggaaccacttcagatgccaggtgcagttctacggcctgagcgagaacgacgagtggacccaggacagagccaagcccgtgacccagatcgtgtctgccgaagcctggggcagagccgattgcgacgtgaagctggtggaaaagagcttcgagacagacaccaacctgaacttccagaacctgagcgtgatcggcttcagaatcctgctgctgaaagtggccggctttaacctgctgatgaccctgcggctgtggtccagcagggccaagcgatctggatctggagcaacaaacttctcactactcaaacaagcaggtgacgtggaggagaatcccgggcctactagtgccaccatggactggatttggcgcatccttttccttgtcggcgctgctaccggcgcccattccgggcccgaagtgcagctggttgaatctggcggaggactggttcaggctggcggatctctgagactgtcttgtgccgccagcggcagaacctttagcatgggctggtttagacaggcccctggcaaagagagagagttcgtcgccgccatcacatactctggcggcagcccttactacgccgactctgtgaagggcagattcaccatcagccgggacaacgccaagaacaccgtgtacctccagatgaacagcctgaagcctgaggacaccgccgtgtactactgcgccgccaatccaacatacggcagcgactggaacgccgagaattggggccagggaacccaagtgacagtgtctagcggatccggcggcggaggatctggcggaggcggatctgggggcggaggctctttcgaagaagtccaacttgtggagtctggagggggcctggtgcagcccggcggctctctcagactgtcttgtgcggcaagcggctacaccttcacctcttactggatagaatgggtgaggcaggcacctggaaagggactggagtggattggagagattctgccaggagggggagatacaaattacaatgaaatcttcaaggggcgggccaccttttcagcggataccagcaagaatacagcttacctgcagatgaatagcctccgggcagaagataccgctgtttattattgcacgagacgggtgccaataagactggactattgggggcaagggactcttgtcaccgtcagttcaacgcgtatccagaaccctgatcctgccgtgtaccagctgcgggatagcaagagcagcgacaagagcgtgtgtctgttcaccgacttcgacagccagaccaacgtgtcccagagcaaggactccgacgtgtacatcaccgataagtgcgtgctggacatgcggagcatggacttcaagagcaactccgccgtggcctggtccaacaagtccgatttcgcctgcgccaacgccttcaacaacagcattatccccgaggacacattcttcccaagccccgagagcagctgcggctttaccagcgagagctaccagcagggcgtgctgagcgccaccatcctgtacgagatcctgctgggcaaggccaccctgtacgccgtgctggtgtctgccctggtgctgatggctatggtcaagcggaaggacagccggggacgcgccaagagaagcggatctggcgtgaagcagaccctgaatttcgacctgctgaagctggctggcgacgtggaatccaacccaggcccttctagaggccatatgaccgagtacaagcccacggtgcgcctcgccacccgcgacgacgtccccagggccgtacgcaccctcgccgccgcgttcgccgactaccccgccacgcgccacaccgtcgatccggaccgccacatcgagcgggtcaccgagctgcaagaactcttcctcacgcgcgtcgggctcgacatcggcaaggtgtgggtcgcggacgacggcgccgcggtggcggtctggaccacgccggagagcgtcgaagcgggggcggtgttcgccgagatcggcccgcgcatggccgagttgagcggttcccggctggccgcgcagcaacagatggaaggcctcctggcgccgcaccggcccaaggagcccgcgtggttcctggccaccgtcggcgtctcgcccgaccaccagggcaagggtctgggcagcgccgtcgtgctccccggagtggaggcggccgagcgcgccggggtgcccgccttcctggagacctccgcgccccgcaacctccccttctacgagcggctcggcttcaccgtcaccgccgacgtcgaggtgcccgaaggaccgcgcacctggtgcatgacccgcaagcccggtgcctga

SEQ ID NO: 38336 - DNA, 2847 bp, synthetic construct
  source 1..2847: mol_type = other DNA
atggccttaccagtgaccgccttgctcctgccgctggccttgctgctccacgccgccaggccggacatcgtgatgacacagagccctgatagcctggccgtgtctctgggagagagagccaccattaactgcaaggccagccagagcgtggactacgacggcgacagcttcctgaactggtatcagcagaagcccggccagcctcctaagctgctgatctacgccgccagcaatctggaaagcggcgtgccaagcagattttccggctctggcagcggcaccgatttcaccctgacaatatccagcctccagcctgaggacgtggccgtgtactactgccagcagagcaacgacgaccctctgacctttggacagggcaccaaggtggaaatcaaactcgaggacctgaagaacgtgttcccacctgaggtggccgtgttcgagcctagcgaggccgagatcagccacacccagaaagccaccctcgtgtgcctggctaccggcttctaccccgaccatgtggaactgtcttggtgggtcaacggcaaagaggtgcacagcggcgtgtgtaccgacccccagccactgaaagaacagcccgccctgaacgacagccggtactgcctgagcagcagactgagagtgtccgccaccttctggcagaacccccggaaccacttcagatgccaggtgcagttctacggcctgagcgagaacgacgagtggacccaggacagagccaagcccgtgacccagatcgtgtctgccgaagcctggggcagagccgattgcgacgtgaagctggtggaaaagagcttcgagacagacaccaacctgaacttccagaacctgagcgtgatcggcttcagaatcctgctgctgaaagtggccggctttaacctgctgatgaccctgcggctgtggtccagcagggccaagcgatctggatctggagcaacaaacttctcactactcaaacaagcaggtgacgtggaggagaatcccgggcctactagtgccaccatggactggatttggcgcatccttttccttgtcggcgctgctaccggcgcccattccgggcccatgggaagctggcttgagttctaccacagactcaacgccattgacagcaggctgtgggcacttggcggaagcgaagctgaactcgccgcttttgaaaaagaaattgccgctttcgagtccgagcttcaggcttacaaaggcaaagggaatcctgaggtcgagagcctgagagatcacgctgcccacattagagagtggttgcaggcataccggcacaatggatccggcggcggaggatctggcggaggcggatctgggggcggaggctctttcgaagaagtccaacttgtggagtctggagggggcctggtgcagcccggcggctctctcagactgtcttgtgcggcaagcggctacaccttcacctcttactggatagaatgggtgaggcaggcacctggaaagggactggagtggattggagagattctgccaggagggggagatacaaattacaatgaaatcttcaaggggcgggccaccttttcagcggataccagcaagaatacagcttacctgcagatgaatagcctccgggcagaagataccgctgtttattattgcacgagacgggtgccaataagactggactattgggggcaagggactcttgtcaccgtcagttcaacgcgtatccagaaccctgatcctgccgtgtaccagctgcgggatagcaagagcagcgacaagagcgtgtgtctgttcaccgacttcgacagccagaccaacgtgtcccagagcaaggactccgacgtgtacatcaccgataagtgcgtgctggacatgcggagcatggacttcaagagcaactccgccgtggcctggtccaacaagtccgatttcgcctgcgccaacgccttcaacaacagcattatccccgaggacacattcttcccaagccccgagagcagctgcggctttaccagcgagagctaccagcagggcgtgctgagcgccaccatcctgtacgagatcctgctgggcaaggccaccctgtacgccgtgctggtgtctgccctggtgctgatggctatggtcaagcggaaggacagccggggacgcgccaagagaagcggatctggcgtgaagcagaccctgaatttcgacctgctgaagctggctggcgacgtggaatccaacccaggcccttctagaggccatatgaccgagtacaagcccacggtgcgcctcgccacccgcgacgacgtccccagggccgtacgcaccctcgccgccgcgttcgccgactaccccgccacgcgccacaccgtcgatccggaccgccacatcgagcgggtcaccgagctgcaagaactcttcctcacgcgcgtcgggctcgacatcggcaaggtgtgggtcgcggacgacggcgccgcggtggcggtctggaccacgccggagagcgtcgaagcgggggcggtgttcgccgagatcggcccgcgcatggccgagttgagcggttcccggctggccgcgcagcaacagatggaaggcctcctggcgccgcaccggcccaaggagcccgcgtggttcctggccaccgtcggcgtctcgcccgaccaccagggcaagggtctgggcagcgccgtcgtgctccccggagtggaggcggccgagcgcgccggggtgcccgccttcctggagacctccgcgccccgcaacctccccttctacgagcggctcggcttcaccgtcaccgccgacgtcgaggtgcccgaaggaccgcgcacctggtgcatgacccgcaagcccggtgcctga

SEQ ID NO: 38337 - DNA, 2847 bp, synthetic construct
  source 1..2847: mol_type = other DNA
atggccttaccagtgaccgccttgctcctgccgctggccttgctgctccacgccgccaggccggcatgcatgggcagttggttcgagttctacgaccggctgaatgccatcgacgccagactgtgggctctcggaggatctgaagctgagctggccgccttcgagaaagagatcgccgcctttgagagcgagctgcaagcctacaaaggcaagggcaaccccgaggtggaaaacctgagagtgcacgccgctgccatcagagaatggctccaggcttacagacacaacggtaccggcggaggcggatctggcggcggaggtagcggtggcggaggatctgaattcgacatcgtgatgacacagagccctgatagcctggccgtgtctctgggagagagagccaccattaactgcaaggccagccagagcgtggactacgacggcgacagcttcctgaactggtatcagcagaagcccggccagcctcctaagctgctgatctacgccgccagcaatctggaaagcggcgtgccaagcagattttccggctctggcagcggcaccgatttcaccctgacaatatccagcctccagcctgaggacgtggccgtgtactactgccagcagagcaacgacgaccctctgacctttggacagggcaccaaggtggaaatcaaactcgaggacctgaagaacgtgttcccacctgaggtggccgtgttcgagcctagcgaggccgagatcagccacacccagaaagccaccctcgtgtgcctggctaccggcttctaccccgaccatgtggaactgtcttggtgggtcaacggcaaagaggtgcacagcggcgtgtgtaccgacccccagccactgaaagaacagcccgccctgaacgacagccggtactgcctgagcagcagactgagagtgtccgccaccttctggcagaacccccggaaccacttcagatgccaggtgcagttctacggcctgagcgagaacgacgagtggacccaggacagagccaagcccgtgacccagatcgtgtctgccgaagcctggggcagagccgattgcgacgtgaagctggtggaaaagagcttcgagacagacaccaacctgaacttccagaacctgagcgtgatcggcttcagaatcctgctgctgaaagtggccggctttaacctgctgatgaccctgcggctgtggtccagcagggccaagcgatctggatctggagcaacaaacttctcactactcaaacaagcaggtgacgtggaggagaatcccgggcctactagtatggactggatttggcgcatccttttccttgtcggcgctgctaccggcgcgcattccttcgaagaagtccaacttgtggagtctggagggggcctggtgcagcccggcggctctctcagactgtcttgtgcggcaagcggctacaccttcacctcttactggatagaatgggtgaggcaggcacctggaaagggactggagtggattggagagattctgccaggagggggagatacaaattacaatgaaatcttcaaggggcgggccaccttttcagcggataccagcaagaatacagcttacctgcagatgaatagcctccgggcagaagataccgctgtttattattgcacgagacgggtgccaataagactggactattgggggcaagggactcttgtcaccgtcagttcaacgcgtatccagaaccctgatcctgccgtgtaccagctgcgggatagcaagagcagcgacaagagcgtgtgtctgttcaccgacttcgacagccagaccaacgtgtcccagagcaaggactccgacgtgtacatcaccgataagtgcgtgctggacatgcggagcatggacttcaagagcaactccgccgtggcctggtccaacaagtccgatttcgcctgcgccaacgccttcaacaacagcattatccccgaggacacattcttcccaagccccgagagcagctgcggctttaccagcgagagctaccagcagggcgtgctgagcgccaccatcctgtacgagatcctgctgggcaaggccaccctgtacgccgtgctggtgtctgccctggtgctgatggctatggtcaagcggaaggacagccggggacgcgccaagagaagcggatctggcgtgaagcagaccctgaatttcgacctgctgaagctggctggcgacgtggaatccaacccaggcccttctagaggccatatgaccgagtacaagcccacggtgcgcctcgccacccgcgacgacgtccccagggccgtacgcaccctcgccgccgcgttcgccgactaccccgccacgcgccacaccgtcgatccggaccgccacatcgagcgggtcaccgagctgcaagaactcttcctcacgcgcgtcgggctcgacatcggcaaggtgtgggtcgcggacgacggcgccgcggtggcggtctggaccacgccggagagcgtcgaagcgggggcggtgttcgccgagatcggcccgcgcatggccgagttgagcggttcccggctggccgcgcagcaacagatggaaggcctcctggcgccgcaccggcccaaggagcccgcgtggttcctggccaccgtcggcgtctcgcccgaccaccagggcaagggtctgggcagcgccgtcgtgctccccggagtggaggcggccgagcgcgccggggtgcccgccttcctggagacctccgcgccccgcaacctccccttctacgagcggctcggcttcaccgtcaccgccgacgtcgaggtgcccgaaggaccgcgcacctggtgcatgacccgcaagcccggtgcctga

SEQ ID NO: 38338 - DNA, 3198 bp, synthetic construct
  source 1..3198: mol_type = other DNA
atggccttaccagtgaccgccttgctcctgccgctggccttgctgctccacgccgccaggccggcatgcatggaccccgacctggaaatcagagccgccttcctgcggcagagaaacacagccctgagaacagaggtggccgagctggaacaagaggtgcagcggctggaaaacgaggtgtcccagtacgagacaagatacggccctctcggaggcggaaaaggtaccggcggaggcggatctggcggcggaggtagcggtggcggaggatctgaattcgacatcgtgatgacacagagccctgatagcctggccgtgtctctgggagagagagccaccattaactgcaaggccagccagagcgtggactacgacggcgacagcttcctgaactggtatcagcagaagcccggccagcctcctaagctgctgatctacgccgccagcaatctggaaagcggcgtgccaagcagattttccggctctggcagcggcaccgatttcaccctgacaatatccagcctccagcctgaggacgtggccgtgtactactgccagcagagcaacgacgaccctctgacctttggacagggcaccaaggtggaaatcaaactcgaggacctgaagaacgtgttcccacctgaggtggccgtgttcgagcctagcgaggccgagatcagccacacccagaaagccaccctcgtgtgcctggctaccggcttctaccccgaccatgtggaactgtcttggtgggtcaacggcaaagaggtgcacagcggcgtgtgtaccgacccccagccactgaaagaacagcccgccctgaacgacagccggtactgcctgagcagcagactgagagtgtccgccaccttctggcagaacccccggaaccacttcagatgccaggtgcagttctacggcctgagcgagaacgacgagtggacccaggacagagccaagcccgtgacccagatcgtgtctgccgaagcctggggcagagccgattgcgacgtgaagctggtggaaaagagcttcgagacagacaccaacctgaacttccagaacctgagcgtgatcggcttcagaatcctgctgctgaaagtggccggctttaacctgctgatgaccctgcggctgtggtccagcagggccaagcgatctggatctggagcaacaaacttctcactactcaaacaagcaggtgacgtggaggagaatcccgggcctactagtgccaccatggactggatttggcgcatccttttccttgtcggcgctgctaccggcgcccattccgggcccgaagtgcagctggttgaatctggcggaggactggttcaggctggcggatctctgagactgtcttgtgccgccagcggcagaacctttagcatgggctggtttagacaggcccctggcaaagagagagagttcgtcgccgccatcacatactctggcggcagcccttactacgccgactctgtgaagggcagattcaccatcagccgggacaacgccaagaacaccgtgtacctccagatgaacagcctgaagcctgaggacaccgccgtgtactactgcgccgccaatccaacatacggcagcgactggaacgccgagaattggggccagggaacccaagtgacagtgtctagcggatccggcggcggaggatctggcggaggcggatctgggggcggaggctctttcgaagaagtccaacttgtggagtctggagggggcctggtgcagcccggcggctctctcagactgtcttgtgcggcaagcggctacaccttcacctcttactggatagaatgggtgaggcaggcacctggaaagggactggagtggattggagagattctgccaggagggggagatacaaattacaatgaaatcttcaaggggcgggccaccttttcagcggataccagcaagaatacagcttacctgcagatgaatagcctccgggcagaagataccgctgtttattattgcacgagacgggtgccaataagactggactattgggggcaagggactcttgtcaccgtcagttcaacgcgtatccagaaccctgatcctgccgtgtaccagctgcgggatagcaagagcagcgacaagagcgtgtgtctgttcaccgacttcgacagccagaccaacgtgtcccagagcaaggactccgacgtgtacatcaccgataagtgcgtgctggacatgcggagcatggacttcaagagcaactccgccgtggcctggtccaacaagtccgatttcgcctgcgccaacgccttcaacaacagcattatccccgaggacacattcttcccaagccccgagagcagctgcggctttaccagcgagagctaccagcagggcgtgctgagcgccaccatcctgtacgagatcctgctgggcaaggccaccctgtacgccgtgctggtgtctgccctggtgctgatggctatggtcaagcggaaggacagccggggacgcgccaagagaagcggatctggcgtgaagcagaccctgaatttcgacctgctgaagctggctggcgacgtggaatccaacccaggcccttctagaggccatatgaccgagtacaagcccacggtgcgcctcgccacccgcgacgacgtccccagggccgtacgcaccctcgccgccgcgttcgccgactaccccgccacgcgccacaccgtcgatccggaccgccacatcgagcgggtcaccgagctgcaagaactcttcctcacgcgcgtcgggctcgacatcggcaaggtgtgggtcgcggacgacggcgccgcggtggcggtctggaccacgccggagagcgtcgaagcgggggcggtgttcgccgagatcggcccgcgcatggccgagttgagcggttcccggctggccgcgcagcaacagatggaaggcctcctggcgccgcaccggcccaaggagcccgcgtggttcctggccaccgtcggcgtctcgcccgaccaccagggcaagggtctgggcagcgccgtcgtgctccccggagtggaggcggccgagcgcgccggggtgcccgccttcctggagacctccgcgccccgcaacctccccttctacgagcggctcggcttcaccgtcaccgccgacgtcgaggtgcccgaaggaccgcgcacctggtgcatgacccgcaagcccggtgcctga

SEQ ID NO: 38339 - DNA, 2847 bp, synthetic construct
  source 1..2847: mol_type = other DNA
atggccttaccagtgaccgccttgctcctgccgctggccttgctgctccacgccgccaggccggacatcgtgatgacacagagccctgatagcctggccgtgtctctgggagagagagccaccattaactgcaaggccagccagagcgtggactacgacggcgacagcttcctgaactggtatcagcagaagcccggccagcctcctaagctgctgatctacgccgccagcaatctggaaagcggcgtgccaagcagattttccggctctggcagcggcaccgatttcaccctgacaatatccagcctccagcctgaggacgtggccgtgtactactgccagcagagcaacgacgaccctctgacctttggacagggcaccaaggtggaaatcaaactcgaggacctgaagaacgtgttcccacctgaggtggccgtgttcgagcctagcgaggccgagatcagccacacccagaaagccaccctcgtgtgcctggctaccggcttctaccccgaccatgtggaactgtcttggtgggtcaacggcaaagaggtgcacagcggcgtgtgtaccgacccccagccactgaaagaacagcccgccctgaacgacagccggtactgcctgagcagcagactgagagtgtccgccaccttctggcagaacccccggaaccacttcagatgccaggtgcagttctacggcctgagcgagaacgacgagtggacccaggacagagccaagcccgtgacccagatcgtgtctgccgaagcctggggcagagccgattgcgacgtgaagctggtggaaaagagcttcgagacagacaccaacctgaacttccagaacctgagcgtgatcggcttcagaatcctgctgctgaaagtggccggctttaacctgctgatgaccctgcggctgtggtccagcagggccaagcgatctggatctggagcaacaaacttctcactactcaaacaagcaggtgacgtggaggagaatcccgggcctactagtgccaccatggactggatttggcgcatccttttccttgtcggcgctgctaccggcgcccattccgggcccatgggatcttggagcgagttttacgatcggctgcacgccattcaccaccggctgtatgctctcggaggaagcgaagctgagctggccgcttttgaaaaagaaattgccgctttcgagtccgagcttcaggcttacaaaggcaaagggaatcctgaggtcgaggccctgagagataccgccgccttcatcagaacccggttgcaggcataccggcacaacggatccggcggcggaggatctggcggaggcggatctgggggcggaggctctttcgaagaagtccaacttgtggagtctggagggggcctggtgcagcccggcggctctctcagactgtcttgtgcggcaagcggctacaccttcacctcttactggatagaatgggtgaggcaggcacctggaaagggactggagtggattggagagattctgccaggagggggagatacaaattacaatgaaatcttcaaggggcgggccaccttttcagcggataccagcaagaatacagcttacctgcagatgaatagcctccgggcagaagataccgctgtttattattgcacgagacgggtgccaataagactggactattgggggcaagggactcttgtcaccgtcagttcaacgcgtatccagaaccctgatcctgccgtgtaccagctgcgggatagcaagagcagcgacaagagcgtgtgtctgttcaccgacttcgacagccagaccaacgtgtcccagagcaaggactccgacgtgtacatcaccgataagtgcgtgctggacatgcggagcatggacttcaagagcaactccgccgtggcctggtccaacaagtccgatttcgcctgcgccaacgccttcaacaacagcattatccccgaggacacattcttcccaagccccgagagcagctgcggctttaccagcgagagctaccagcagggcgtgctgagcgccaccatcctgtacgagatcctgctgggcaaggccaccctgtacgccgtgctggtgtctgccctggtgctgatggctatggtcaagcggaaggacagccggggacgcgccaagagaagcggatctggcgtgaagcagaccctgaatttcgacctgctgaagctggctggcgacgtggaatccaacccaggcccttctagaggccatatgaccgagtacaagcccacggtgcgcctcgccacccgcgacgacgtccccagggccgtacgcaccctcgccgccgcgttcgccgactaccccgccacgcgccacaccgtcgatccggaccgccacatcgagcgggtcaccgagctgcaagaactcttcctcacgcgcgtcgggctcgacatcggcaaggtgtgggtcgcggacgacggcgccgcggtggcggtctggaccacgccggagagcgtcgaagcgggggcggtgttcgccgagatcggcccgcgcatggccgagttgagcggttcccggctggccgcgcagcaacagatggaaggcctcctggcgccgcaccggcccaaggagcccgcgtggttcctggccaccgtcggcgtctcgcccgaccaccagggcaagggtctgggcagcgccgtcgtgctccccggagtggaggcggccgagcgcgccggggtgcccgccttcctggagacctccgcgccccgcaacctccccttctacgagcggctcggcttcaccgtcaccgccgacgtcgaggtgcccgaaggaccgcgcacctggtgcatgacccgcaagcccggtgcctga

SEQ ID NO: 38340 - DNA, 3477 bp, synthetic construct
  source 1..3477: mol_type = other DNA
atggccttaccagtgaccgccttgctcctgccgctggccttgctgctccacgccgccaggccggacatcgtgatgacacagagccctgatagcctggccgtgtctctgggagagagagccaccattaactgcaaggccagccagagcgtggactacgacggcgacagcttcctgaactggtatcagcagaagcccggccagcctcctaagctgctgatctacgccgccagcaatctggaaagcggcgtgccaagcagattttccggctctggcagcggcaccgatttcaccctgacaatatccagcctccagcctgaggacgtggccgtgtactactgccagcagagcaacgacgaccctctgacctttggacagggcaccaaggtggaaatcaaactcgaggacctgaagaacgtgttcccacctgaggtggccgtgttcgagcctagcgaggccgagatcagccacacccagaaagccaccctcgtgtgcctggctaccggcttctaccccgaccatgtggaactgtcttggtgggtcaacggcaaagaggtgcacagcggcgtgtgtaccgacccccagccactgaaagaacagcccgccctgaacgacagccggtactgcctgagcagcagactgagagtgtccgccaccttctggcagaacccccggaaccacttcagatgccaggtgcagttctacggcctgagcgagaacgacgagtggacccaggacagagccaagcccgtgacccagatcgtgtctgccgaagcctggggcagagccgattgcgacgtgaagctggtggaaaagagcttcgagacagacaccaacctgaacttccagaacctgagcgtgatcggcttcagaatcctgctgctgaaagtggccggctttaacctgctgatgaccctgcggctgtggtccagcagggccaagcgatctggatctggagcaacaaacttctcactactcaaacaagcaggtgacgtggaggagaatcccgggcctactagtaccatggactggatttggcgcatccttttccttgtcggcgctgctaccggcgcccattccctgttcaatcaagaggtgcagatccctctgaccgagagctactgtggcccctgtcctaagaactggatctgctacaagaacaactgctaccagttcttcgacgagagcaagaattggtacgagagccaggccagctgcatgagccagaatgccagcctgctgaaggtgtacagcaaagaggaccaggacctgctgaaactggtcaagagcgcccactggatgggccttgtgcacatccccaccaatggctcttggcagtgggaggacggcagcattctgagccctaacctgctgaccatcatcgagatgcagaagggcgactgcgccctgtacgccagcagctttaagggctacatcgagaattgcagcaccccgaacacctacatctgtatgcagagaaccgtttctggcggaggcggctctggaggaggcggaagtggcggcggaggcgacctctttaatcaagaagtccagattccactcaccgaatcctactgcggaccttgtccaaaaaattggatttgttataagaacaactgttatcaattctttgatgagtctaaaaattggtatgagtcccaggcttcctgcatgtctcagaacgcttctctgctgaaagtctactctaaagaagatcaggatctcctgaagctcgtcaagtctgcccattggatggggctcgtccacattcctaccaacggaagctggcaatgggaagatggctccatcctgtctccaaatctgctcacgattattgaaatgcagaaaggggattgtgctctctacgccagctccttcaagggatatattgagaactgtagcacgcccaatacttatatctgtatgcaacggaccgtgggatccggcggcggaggatctggcggaggcggatctgggggcggaggctctttcgaagaagtccaacttgtggagtctggagggggcctggtgcagcccggcggctctctcagactgtcttgtgcggcaagcggctacaccttcacctcttactggatagaatgggtgaggcaggcacctggaaagggactggagtggattggagagattctgccaggagggggagatacaaattacaatgaaatcttcaaggggcgggccaccttttcagcggataccagcaagaatacagcttacctgcagatgaatagcctccgggcagaagataccgctgtttattattgcacgagacgggtgccaataagactggactattgggggcaagggactcttgtcaccgtcagttcaacgcgtatccagaaccctgatcctgccgtgtaccagctgcgggatagcaagagcagcgacaagagcgtgtgtctgttcaccgacttcgacagccagaccaacgtgtcccagagcaaggactccgacgtgtacatcaccgataagtgcgtgctggacatgcggagcatggacttcaagagcaactccgccgtggcctggtccaacaagtccgatttcgcctgcgccaacgccttcaacaacagcattatccccgaggacacattcttcccaagccccgagagcagctgcggctttaccagcgagagctaccagcagggcgtgctgagcgccaccatcctgtacgagatcctgctgggcaaggccaccctgtacgccgtgctggtgtctgccctggtgctgatggctatggtcaagcggaaggacagccggggacgcgccaagagaagcggatctggcgtgaagcagaccctgaatttcgacctgctgaagctggctggcgacgtggaatccaacccaggcccttctagaggccatatgaccgagtacaagcccacggtgcgcctcgccacccgcgacgacgtccccagggccgtacgcaccctcgccgccgcgttcgccgactaccccgccacgcgccacaccgtcgatccggaccgccacatcgagcgggtcaccgagctgcaagaactcttcctcacgcgcgtcgggctcgacatcggcaaggtgtgggtcgcggacgacggcgccgcggtggcggtctggaccacgccggagagcgtcgaagcgggggcggtgttcgccgagatcggcccgcgcatggccgagttgagcggttcccggctggccgcgcagcaacagatggaaggcctcctggcgccgcaccggcccaaggagcccgcgtggttcctggccaccgtcggcgtctcgcccgaccaccagggcaagggtctgggcagcgccgtcgtgctccccggagtggaggcggccgagcgcgccggggtgcccgccttcctggagacctccgcgccccgcaacctccccttctacgagcggctcggcttcaccgtcaccgccgacgtcgaggtgcccgaaggaccgcgcacctggtgcatgacccgcaagcccggtgcctga

SEQ ID NO: 38341 - DNA, 1863 bp, synthetic construct
  source 1..1863: mol_type = other DNA
atggccttaccagtgaccgccttgctcctgccgctggccttgctgctccacgccgccaggccggacatcgtgatgacacagagccctgatagcctggccgtgtctctgggagagagagccaccattaactgcaaggccagccagagcgtggactacgacggcgacagcttcctgaactggtatcagcagaagcccggccagcctcctaagctgctgatctacgccgccagcaatctggaaagcggcgtgccaagcagattttccggctctggcagcggcaccgatttcaccctgacaatatccagcctccagcctgaggacgtggccgtgtactactgccagcagagcaacgacgaccctctgacctttggacagggcaccaaggtggaaatcaaactcgaggacctgaagaacgtgttcccacctgaggtggccgtgttcgagcctagcgaggccgagatcagccacacccagaaagccaccctcgtgtgcctggctaccggcttctaccccgaccatgtggaactgtcttggtgggtcaacggcaaagaggtgcacagcggcgtgtgtaccgacccccagccactgaaagaacagcccgccctgaacgacagccggtactgcctgagcagcagactgagagtgtccgccaccttctggcagaacccccggaaccacttcagatgccaggtgcagttctacggcctgagcgagaacgacgagtggacccaggacagagccaagcccgtgacccagatcgtgtctgccgaagcctggggcagagccgattgcggctttaccagcgagagctaccagcagggcgtgctgagcgccaccaacctgagcgtgatcggcttcagaatcctgctgctgaaagtggccggctttaacctgctgatgaccctgcggctgtggtccagcagggccaagcgatctggatctggagcaacaaacttctcactactcaaacaagcaggtgacgtggaggagaatcccgggcctactagtatggactggatttggcgcatccttttccttgtcggcgctgctaccggcgcgcattccttcgaagaagtccaacttgtggagtctggagggggcctggtgcagcccggcggctctctcagactgtcttgtgcggcaagcggctacaccttcacctcttactggatagaatgggtgaggcaggcacctggaaagggactggagtggattggagagattctgccaggagggggagatacaaattacaatgaaatcttcaaggggcgggccaccttttcagcggataccagcaagaatacagcttacctgcagatgaatagcctccgggcagaagataccgctgtttattattgcacgagacgggtgccaataagactggactattgggggcaagggactcttgtcaccgtcagttcaacgcgtatccagaaccctgatcctgccgtgtaccagctgcgggatagcaagagcagcgacaagagcgtgtgtctgttcaccgacttcgacagccagaccaacgtgtcccagagcaaggactccgacgtgtacatcaccgataagtgcgtgctggacatgcggagcatggacttcaagagcaactccgccgtggcctggtccaacaagtccgatttcgcctgcgccaacgccttcaacaacagcattatccccgaggacacattcttcccaagccccgagagcagctgcgacgtgaagctggtggaaaagagcttcgagacagacaccaacctgaacttccagatcctgtacgagatcctgctgggcaaggccaccctgtacgccgtgctggtgtctgccctggtgctgatggctatggtcaagcggaaggacagccgggga

SEQ ID NO: 38342 - DNA, 1875 bp, synthetic construct
  source 1..1875: mol_type = other DNA
atggccttaccagtgaccgccttgctcctgccgctggccttgctgctccacgccgccaggccggacatcgtgatgacacagagccctgatagcctggccgtgtctctgggagagagagccaccattaactgcaaggccagccagagcgtggactacgacggcgacagcttcctgaactggtatcagcagaagcccggccagcctcctaagctgctgatctacgccgccagcaatctggaaagcggcgtgccaagcagattttccggctctggcagcggcaccgatttcaccctgacaatatccagcctccagcctgaggacgtggccgtgtactactgccagcagagcaacgacgaccctctgacctttggacagggcaccaaggtggaaatcaaactcgagatccagaaccctgatcctgccgtgtaccagctgcgggatagcaagagcagcgacaagagcgtgtgtctgttcaccgacttcgacagccagaccaacgtgtcccagagcaaggactccgacgtgtacatcaccgataagtgcgtgctggacatgcggagcatggacttcaagagcaactccgccgtggcctggtccaacaagtccgatttcgcctgcgccaacgccttcaacaacagcattatccccgaggacacattcttcccaagccccgagagcagctgcgacgtgaagctggtggaaaagagcttcgagacagacaccaacctgaacttccagatcctgtacgagatcctgctgggcaaggccaccctgtacgccgtgctggtgtctgccctggtgctgatggctatggtcaagcggaaggacagccggggacgcgccaagagaagcggatctggcgtgaagcagaccctgaatttcgacctgctgaagctggctggcgacgtggaatccaacccaggccctactagtatggactggatttggcgcatccttttccttgtcggcgctgctaccggcgcgcattccttcgaagaagtccaacttgtggagtctggagggggcctggtgcagcccggcggctctctcagactgtcttgtgcggcaagcggctacaccttcacctcttactggatagaatgggtgaggcaggcacctggaaagggactggagtggattggagagattctgccaggagggggagatacaaattacaatgaaatcttcaaggggcgggccaccttttcagcggataccagcaagaatacagcttacctgcagatgaatagcctccgggcagaagataccgctgtttattattgcacgagacgggtgccaataagactggactattgggggcaagggactcttgtcaccgtcagttcaacgcgtgaggacctgaagaacgtgttcccacctgaggtggccgtgttcgagcctagcgaggccgagatcagccacacccagaaagccaccctcgtgtgcctggctaccggcttctaccccgaccatgtggaactgtcttggtgggtcaacggcaaagaggtgcacagcggcgtgtgtaccgacccccagccactgaaagaacagcccgccctgaacgacagccggtactgcctgagcagcagactgagagtgtccgccaccttctggcagaacccccggaaccacttcagatgccaggtgcagttctacggcctgagcgagaacgacgagtggacccaggacagagccaagcccgtgacccagatcgtgtctgccgaagcctggggcagagccgattgcggctttaccagcgagagctaccagcagggcgtgctgagcgccaccaacctgagcgtgatcggcttcagaatcctgctgctgaaagtggccggctttaacctgctgatgaccctgcggctgtggtccagc

SEQ ID NO: 38343 - DNA, 2268 bp, synthetic construct
  source 1..2268: mol_type = other DNA
atggccttaccagtgaccgccttgctcctgccgctggccttgctgctccacgccgccaggccggaagtgcagctggttgaatctggcggaggactggttcagcctggcggatctctgagactgtcttgtgccgccagcggcttcagcttcagcgacttttggatgagctgggtccgacaggcccctggcaaaggacttgaatgggtcgccacaatcagccaggccggcagcgagaaggactacgtggactctgtgaagggcagattcaccatcagccgggacaacgccaagaagtccctgtacctccagatgaacagcctgagagccgaggacaccgccgtgtactattgtgcctctggcgtgtacagcttcgactacagaggccagggcaccctggtcacagtctcttctggtaccggcggaggcggatctggcggcggaggtagcggtggcggaggatctgaattcgacatcgtgatgacacagagccctgatagcctggccgtgtctctgggagagagagccaccattaactgcaaggccagccagagcgtggactacgacggcgacagcttcctgaactggtatcagcagaagcccggccagcctcctaagctgctgatctacgccgccagcaatctggaaagcggcgtgccaagcagattttccggctctggcagcggcaccgatttcaccctgacaatatccagcctccagcctgaggacgtggccgtgtactactgccagcagagcaacgacgaccctctgacctttggacagggcaccaaggtggaaatcaaactcgaggacctgaagaacgtgttcccacctgaggtggccgtgttcgagcctagcgaggccgagatcagccacacccagaaagccaccctcgtgtgcctggctaccggcttctaccccgaccatgtggaactgtcttggtgggtcaacggcaaagaggtgcacagcggcgtgtgtaccgacccccagccactgaaagaacagcccgccctgaacgacagccggtactgcctgagcagcagactgagagtgtccgccaccttctggcagaacccccggaaccacttcagatgccaggtgcagttctacggcctgagcgagaacgacgagtggacccaggacagagccaagcccgtgacccagatcgtgtctgccgaagcctggggcagagccgattgcggctttaccagcgagagctaccagcagggcgtgctgagcgccaccaacctgagcgtgatcggcttcagaatcctgctgctgaaagtggccggctttaacctgctgatgaccctgcggctgtggtccagcagggccaagcgatctggatctggagcaacaaacttctcactactcaaacaagcaggtgacgtggaggagaatcccgggcctactagtatggactggatttggcgcatccttttccttgtcggcgctgctaccggcgcgcattccttcgaagaagtccaacttgtggagtctggagggggcctggtgcagcccggcggctctctcagactgtcttgtgcggcaagcggctacaccttcacctcttactggatagaatgggtgaggcaggcacctggaaagggactggagtggattggagagattctgccaggagggggagatacaaattacaatgaaatcttcaaggggcgggccaccttttcagcggataccagcaagaatacagcttacctgcagatgaatagcctccgggcagaagataccgctgtttattattgcacgagacgggtgccaataagactggactattgggggcaagggactcttgtcaccgtcagttcaacgcgtatccagaaccctgatcctgccgtgtaccagctgcgggatagcaagagcagcgacaagagcgtgtgtctgttcaccgacttcgacagccagaccaacgtgtcccagagcaaggactccgacgtgtacatcaccgataagtgcgtgctggacatgcggagcatggacttcaagagcaactccgccgtggcctggtccaacaagtccgatttcgcctgcgccaacgccttcaacaacagcattatccccgaggacacattcttcccaagccccgagagcagctgcgacgtgaagctggtggaaaagagcttcgagacagacaccaacctgaacttccagatcctgtacgagatcctgctgggcaaggccaccctgtacgccgtgctggtgtctgccctggtgctgatggctatggtcaagcggaaggacagccgggga

SEQ ID NO: 38344 - DNA, 2280 bp, synthetic construct
  source 1..2280: mol_type = other DNA
atggccttaccagtgaccgccttgctcctgccgctggccttgctgctccacgccgccaggccggaagtgcagctggttgaatctggcggaggactggttcagcctggcggatctctgagactgtcttgtgccgccagcggcttcagcttcagcgacttttggatgagctgggtccgacaggcccctggcaaaggacttgaatgggtcgccacaatcagccaggccggcagcgagaaggactacgtggactctgtgaagggcagattcaccatcagccgggacaacgccaagaagtccctgtacctccagatgaacagcctgagagccgaggacaccgccgtgtactattgtgcctctggcgtgtacagcttcgactacagaggccagggcaccctggtcacagtctcttctggtaccggcggaggcggatctggcggcggaggtagcggtggcggaggatctgaattcgacatcgtgatgacacagagccctgatagcctggccgtgtctctgggagagagagccaccattaactgcaaggccagccagagcgtggactacgacggcgacagcttcctgaactggtatcagcagaagcccggccagcctcctaagctgctgatctacgccgccagcaatctggaaagcggcgtgccaagcagattttccggctctggcagcggcaccgatttcaccctgacaatatccagcctccagcctgaggacgtggccgtgtactactgccagcagagcaacgacgaccctctgacctttggacagggcaccaaggtggaaatcaaactcgagatccagaaccctgatcctgccgtgtaccagctgcgggatagcaagagcagcgacaagagcgtgtgtctgttcaccgacttcgacagccagaccaacgtgtcccagagcaaggactccgacgtgtacatcaccgataagtgcgtgctggacatgcggagcatggacttcaagagcaactccgccgtggcctggtccaacaagtccgatttcgcctgcgccaacgccttcaacaacagcattatccccgaggacacattcttcccaagccccgagagcagctgcgacgtgaagctggtggaaaagagcttcgagacagacaccaacctgaacttccagatcctgtacgagatcctgctgggcaaggccaccctgtacgccgtgctggtgtctgccctggtgctgatggctatggtcaagcggaaggacagccggggacgcgccaagagaagcggatctggcgtgaagcagaccctgaatttcgacctgctgaagctggctggcgacgtggaatccaacccaggccctactagtatggactggatttggcgcatccttttccttgtcggcgctgctaccggcgcgcattccttcgaagaagtccaacttgtggagtctggagggggcctggtgcagcccggcggctctctcagactgtcttgtgcggcaagcggctacaccttcacctcttactggatagaatgggtgaggcaggcacctggaaagggactggagtggattggagagattctgccaggagggggagatacaaattacaatgaaatcttcaaggggcgggccaccttttcagcggataccagcaagaatacagcttacctgcagatgaatagcctccgggcagaagataccgctgtttattattgcacgagacgggtgccaataagactggactattgggggcaagggactcttgtcaccgtcagttcaacgcgtgaggacctgaagaacgtgttcccacctgaggtggccgtgttcgagcctagcgaggccgagatcagccacacccagaaagccaccctcgtgtgcctggctaccggcttctaccccgaccatgtggaactgtcttggtgggtcaacggcaaagaggtgcacagcggcgtgtgtaccgacccccagccactgaaagaacagcccgccctgaacgacagccggtactgcctgagcagcagactgagagtgtccgccaccttctggcagaacccccggaaccacttcagatgccaggtgcagttctacggcctgagcgagaacgacgagtggacccaggacagagccaagcccgtgacccagatcgtgtctgccgaagcctggggcagagccgattgcggctttaccagcgagagctaccagcagggcgtgctgagcgccaccaacctgagcgtgatcggcttcagaatcctgctgctgaaagtggccggctttaacctgctgatgaccctgcggctgtggtccagc

SEQ ID NO: 38345 - DNA, 2679 bp, synthetic construct
  source 1..2679: mol_type = other DNA
atggccttaccagtgaccgccttgctcctgccgctggccttgctgctccacgccgccaggccggaagtgcagctggttgaatctggcggaggactggttcagcctggcggatctctgagactgtcttgtgccgccagcggcttcagcttcagcgacttttggatgagctgggtccgacaggcccctggcaaaggacttgaatgggtcgccacaatcagccaggccggcagcgagaaggactacgtggactctgtgaagggcagattcaccatcagccgggacaacgccaagaagtccctgtacctccagatgaacagcctgagagccgaggacaccgccgtgtactattgtgcctctggcgtgtacagcttcgactacagaggccagggcaccctggtcacagtctcttctggtaccggcggaggcggatctggcggcggaggtagcggtggcggaggatctgaattcgacatcgtgatgacacagagccctgatagcctggccgtgtctctgggagagagagccaccattaactgcaaggccagccagagcgtggactacgacggcgacagcttcctgaactggtatcagcagaagcccggccagcctcctaagctgctgatctacgccgccagcaatctggaaagcggcgtgccaagcagattttccggctctggcagcggcaccgatttcaccctgacaatatccagcctccagcctgaggacgtggccgtgtactactgccagcagagcaacgacgaccctctgacctttggacagggcaccaaggtggaaatcaaactcgaggacctgaagaacgtgttcccacctgaggtggccgtgttcgagcctagcgaggccgagatcagccacacccagaaagccaccctcgtgtgcctggctaccggcttctaccccgaccatgtggaactgtcttggtgggtcaacggcaaagaggtgcacagcggcgtgtgtaccgacccccagccactgaaagaacagcccgccctgaacgacagccggtactgcctgagcagcagactgagagtgtccgccaccttctggcagaacccccggaaccacttcagatgccaggtgcagttctacggcctgagcgagaacgacgagtggacccaggacagagccaagcccgtgacccagatcgtgtctgccgaagcctggggcagagccgattgcggctttaccagcgagagctaccagcagggcgtgctgagcgccaccaacctgagcgtgatcggcttcagaatcctgctgctgaaagtggccggctttaacctgctgatgaccctgcggctgtggtccagcagggccaagcgatctggatctggagcaacaaacttctcactactcaaacaagcaggtgacgtggaggagaatcccgggcctactagtatggactggatttggcgcatccttttccttgtcggcgctgctaccggcgcgcattccgggccccagctccagctgcaagagtctggacctggcctggtcaagcctagcgagacactgagcctgacctgtaccgtgtccggcgatagcatcagcagcggcgattactactggggctggatcagacagcctcctggcaaaggactggaatggatcggccacatctactacagcggcgtgacctactacaaccccagcctgaagtccagagtgaccatcagcgtggacaccagccggaaccagttctccctgaagctgtctagcgtgacagccgccgataccgccgtgtactactgcaccagagaggacagcagcaactggcggagtagaggccagggaacactggtcacagttagctctggatccggcggaggcggaagtggaggcggaggatctggcggcggaggctctttcgaagaagtccaacttgtggagtctggagggggcctggtgcagcccggcggctctctcagactgtcttgtgcggcaagcggctacaccttcacctcttactggatagaatgggtgaggcaggcacctggaaagggactggagtggattggagagattctgccaggagggggagatacaaattacaatgaaatcttcaaggggcgggccaccttttcagcggataccagcaagaatacagcttacctgcagatgaatagcctccgggcagaagataccgctgtttattattgcacgagacgggtgccaataagactggactattgggggcaagggactcttgtcaccgtcagttcaacgcgtatccagaaccctgatcctgccgtgtaccagctgcgggatagcaagagcagcgacaagagcgtgtgtctgttcaccgacttcgacagccagaccaacgtgtcccagagcaaggactccgacgtgtacatcaccgataagtgcgtgctggacatgcggagcatggacttcaagagcaactccgccgtggcctggtccaacaagtccgatttcgcctgcgccaacgccttcaacaacagcattatccccgaggacacattcttcccaagccccgagagcagctgcgacgtgaagctggtggaaaagagcttcgagacagacaccaacctgaacttccagatcctgtacgagatcctgctgggcaaggccaccctgtacgccgtgctggtgtctgccctggtgctgatggctatggtcaagcggaaggacagccgggga

SEQ ID NO: 38346 - DNA, 2691 bp, synthetic construct
  source 1..2691: mol_type = other DNA
atggccttaccagtgaccgccttgctcctgccgctggccttgctgctccacgccgccaggccggaagtgcagctggttgaatctggcggaggactggttcagcctggcggatctctgagactgtcttgtgccgccagcggcttcagcttcagcgacttttggatgagctgggtccgacaggcccctggcaaaggacttgaatgggtcgccacaatcagccaggccggcagcgagaaggactacgtggactctgtgaagggcagattcaccatcagccgggacaacgccaagaagtccctgtacctccagatgaacagcctgagagccgaggacaccgccgtgtactattgtgcctctggcgtgtacagcttcgactacagaggccagggcaccctggtcacagtctcttctggtaccggcggaggcggatctggcggcggaggtagcggtggcggaggatctgaattcgacatcgtgatgacacagagccctgatagcctggccgtgtctctgggagagagagccaccattaactgcaaggccagccagagcgtggactacgacggcgacagcttcctgaactggtatcagcagaagcccggccagcctcctaagctgctgatctacgccgccagcaatctggaaagcggcgtgccaagcagattttccggctctggcagcggcaccgatttcaccctgacaatatccagcctccagcctgaggacgtggccgtgtactactgccagcagagcaacgacgaccctctgacctttggacagggcaccaaggtggaaatcaaactcgagatccagaaccctgatcctgccgtgtaccagctgcgggatagcaagagcagcgacaagagcgtgtgtctgttcaccgacttcgacagccagaccaacgtgtcccagagcaaggactccgacgtgtacatcaccgataagtgcgtgctggacatgcggagcatggacttcaagagcaactccgccgtggcctggtccaacaagtccgatttcgcctgcgccaacgccttcaacaacagcattatccccgaggacacattcttcccaagccccgagagcagctgcgacgtgaagctggtggaaaagagcttcgagacagacaccaacctgaacttccagatcctgtacgagatcctgctgggcaaggccaccctgtacgccgtgctggtgtctgccctggtgctgatggctatggtcaagcggaaggacagccggggacgcgccaagagaagcggatctggcgtgaagcagaccctgaatttcgacctgctgaagctggctggcgacgtggaatccaacccaggccctactagtatggactggatttggcgcatccttttccttgtcggcgctgctaccggcgcgcattccgggccccagctccagctgcaagagtctggacctggcctggtcaagcctagcgagacactgagcctgacctgtaccgtgtccggcgatagcatcagcagcggcgattactactggggctggatcagacagcctcctggcaaaggactggaatggatcggccacatctactacagcggcgtgacctactacaaccccagcctgaagtccagagtgaccatcagcgtggacaccagccggaaccagttctccctgaagctgtctagcgtgacagccgccgataccgccgtgtactactgcaccagagaggacagcagcaactggcggagtagaggccagggaacactggtcacagttagctctggatccggcggaggcggaagtggaggcggaggatctggcggcggaggctctttcgaagaagtccaacttgtggagtctggagggggcctggtgcagcccggcggctctctcagactgtcttgtgcggcaagcggctacaccttcacctcttactggatagaatgggtgaggcaggcacctggaaagggactggagtggattggagagattctgccaggagggggagatacaaattacaatgaaatcttcaaggggcgggccaccttttcagcggataccagcaagaatacagcttacctgcagatgaatagcctccgggcagaagataccgctgtttattattgcacgagacgggtgccaataagactggactattgggggcaagggactcttgtcaccgtcagttcaacgcgtgaggacctgaagaacgtgttcccacctgaggtggccgtgttcgagcctagcgaggccgagatcagccacacccagaaagccaccctcgtgtgcctggctaccggcttctaccccgaccatgtggaactgtcttggtgggtcaacggcaaagaggtgcacagcggcgtgtgtaccgacccccagccactgaaagaacagcccgccctgaacgacagccggtactgcctgagcagcagactgagagtgtccgccaccttctggcagaacccccggaaccacttcagatgccaggtgcagttctacggcctgagcgagaacgacgagtggacccaggacagagccaagcccgtgacccagatcgtgtctgccgaagcctggggcagagccgattgcggctttaccagcgagagctaccagcagggcgtgctgagcgccaccaacctgagcgtgatcggcttcagaatcctgctgctgaaagtggccggctttaacctgctgatgaccctgcggctgtggtccagc

SEQ ID NO: 38347 - DNA, 2175 bp, synthetic construct
  source 1..2175: mol_type = other DNA
atggccttaccagtgaccgccttgctcctgccgctggccttgctgctccacgccgccaggccggacatcgtgatgacacagagccctgatagcctggccgtgtctctgggagagagagccaccattaactgcaaggccagccagagcgtggactacgacggcgacagcttcctgaactggtatcagcagaagcccggccagcctcctaagctgctgatctacgccgccagcaatctggaaagcggcgtgccaagcagattttccggctctggcagcggcaccgatttcaccctgacaatatccagcctccagcctgaggacgtggccgtgtactactgccagcagagcaacgacgaccctctgacctttggacagggcaccaaggtggaaatcaaactcgaggacctgaagaacgtgttcccacctgaggtggccgtgttcgagcctagcgaggccgagatcagccacacccagaaagccaccctcgtgtgcctggctaccggcttctaccccgaccatgtggaactgtcttggtgggtcaacggcaaagaggtgcacagcggcgtgtgtaccgacccccagccactgaaagaacagcccgccctgaacgacagccggtactgcctgagcagcagactgagagtgtccgccaccttctggcagaacccccggaaccacttcagatgccaggtgcagttctacggcctgagcgagaacgacgagtggacccaggacagagccaagcccgtgacccagatcgtgtctgccgaagcctggggcagagccgatgatgtgattaagatccactggcaggaaaagaagtccaacaccatcctgggcagccaggaaggcaacaccatgaagaccaacgacacctacatgaagttcagctggctgaccgtgcccgagaagtccctggacaaagaacacagatgcatcgtgcggcacgaaaacaacaagaacggcgtggaccaggaaatcatcttcccacccatcaagaccgatgtgattacaatggaccccaaggacaactgctccaaggacgccaacgataccctgctgctccagctgaccaacaccagcgcctactacatgtacttgttgctgctgctgaagtccgtggtgtacttcgccatcatcacatgctgcctgctgatggctatggtcaagcggaaggacagccggggaagggccaagcgatctggatctggagcaacaaacttctcactactcaaacaagcaggtgacgtggaggagaatcccgggcctactagtatggactggatttggcgcatccttttccttgtcggcgctgctaccggcgcgcattccttcgaagaagtccaacttgtggagtctggagggggcctggtgcagcccggcggctctctcagactgtcttgtgcggcaagcggctacaccttcacctcttactggatagaatgggtgaggcaggcacctggaaagggactggagtggattggagagattctgccaggagggggagatacaaattacaatgaaatcttcaaggggcgggccaccttttcagcggataccagcaagaatacagcttacctgcagatgaatagcctccgggcagaagataccgctgtttattattgcacgagacgggtgccaataagactggactattgggggcaagggactcttgtcaccgtcagttcaacgcgtatccagaaccctgatcctgccgtgtaccagctgcgggatagcaagagcagcgacaagagcgtgtgtctgttcaccgacttcgacagccagaccaacgtgtcccagagcaaggactccgacgtgtacatcaccgataagtgcgtgctggacatgcggagcatggacttcaagagcaactccgccgtggcctggtccaacaagtccgatttcgcctgcgccaacgccttcaacaacagcattatccccgaggacacattcttcccaagccccgagagcagcgactccaccgaccacgtgaagcccaaagagacagagaacaccaagcagcccagcaagagctgccacaagcccaaggccatcgtgcacaccgagaaagtgaacatgatgagcctgaccgtgctgggcctgcggatgctgttcgccaaaaccgtggccgtgaacttcctgctgaccgccaagctgttcttcctcctcaccgcc

SEQ ID NO: 38348 - DNA, 2187 bp, synthetic construct
  source 1..2187: mol_type = other DNA
atggccttaccagtgaccgccttgctcctgccgctggccttgctgctccacgccgccaggccggacatcgtgatgacacagagccctgatagcctggccgtgtctctgggagagagagccaccattaactgcaaggccagccagagcgtggactacgacggcgacagcttcctgaactggtatcagcagaagcccggccagcctcctaagctgctgatctacgccgccagcaatctggaaagcggcgtgccaagcagattttccggctctggcagcggcaccgatttcaccctgacaatatccagcctccagcctgaggacgtggccgtgtactactgccagcagagcaacgacgaccctctgacctttggacagggcaccaaggtggaaatcaaactcgagatccagaaccctgatcctgccgtgtaccagctgcgggatagcaagagcagcgacaagagcgtgtgtctgttcaccgacttcgacagccagaccaacgtgtcccagagcaaggactccgacgtgtacatcaccgataagtgcgtgctggacatgcggagcatggacttcaagagcaactccgccgtggcctggtccaacaagtccgatttcgcctgcgccaacgccttcaacaacagcattatccccgaggacacattcttcccaagccccgagagcagcgactccaccgaccacgtgaagcccaaagagacagagaacaccaagcagcccagcaagagctgccacaagcccaaggccatcgtgcacaccgagaaagtgaacatgatgagcctgaccgtgctgggcctgcggatgctgttcgccaaaaccgtggccgtgaacttcctgctgaccgccaagctgttcttcctcctcaccgcccgcgccaagagaagcggatctggcgtgaagcagaccctgaatttcgacctgctgaagctggctggcgacgtggaatccaacccaggccctactagtatggactggatttggcgcatccttttccttgtcggcgctgctaccggcgcgcattccttcgaagaagtccaacttgtggagtctggagggggcctggtgcagcccggcggctctctcagactgtcttgtgcggcaagcggctacaccttcacctcttactggatagaatgggtgaggcaggcacctggaaagggactggagtggattggagagattctgccaggagggggagatacaaattacaatgaaatcttcaaggggcgggccaccttttcagcggataccagcaagaatacagcttacctgcagatgaatagcctccgggcagaagataccgctgtttattattgcacgagacgggtgccaataagactggactattgggggcaagggactcttgtcaccgtcagttcaacgcgtgaggacctgaagaacgtgttcccacctgaggtggccgtgttcgagcctagcgaggccgagatcagccacacccagaaagccaccctcgtgtgcctggctaccggcttctaccccgaccatgtggaactgtcttggtgggtcaacggcaaagaggtgcacagcggcgtgtgtaccgacccccagccactgaaagaacagcccgccctgaacgacagccggtactgcctgagcagcagactgagagtgtccgccaccttctggcagaacccccggaaccacttcagatgccaggtgcagttctacggcctgagcgagaacgacgagtggacccaggacagagccaagcccgtgacccagatcgtgtctgccgaagcctggggcagagccgatgatgtgattaagatccactggcaggaaaagaagtccaacaccatcctgggcagccaggaaggcaacaccatgaagaccaacgacacctacatgaagttcagctggctgaccgtgcccgagaagtccctggacaaagaacacagatgcatcgtgcggcacgaaaacaacaagaacggcgtggaccaggaaatcatcttcccacccatcaagaccgatgtgattacaatggaccccaaggacaactgctccaaggacgccaacgataccctgctgctccagctgaccaacaccagcgcctactacatgtacttgttgctgctgctgaagtccgtggtgtacttcgccatcatcacatgctgcctgctgatggctatggtcaagcggaaggacagccgggga

SEQ ID NO: 38349 - DNA, 2580 bp, synthetic construct
  source 1..2580: mol_type = other DNA
atggccttaccagtgaccgccttgctcctgccgctggccttgctgctccacgccgccaggccggaagtgcagctggttgaatctggcggaggactggttcagcctggcggatctctgagactgtcttgtgccgccagcggcttcagcttcagcgacttttggatgagctgggtccgacaggcccctggcaaaggacttgaatgggtcgccacaatcagccaggccggcagcgagaaggactacgtggactctgtgaagggcagattcaccatcagccgggacaacgccaagaagtccctgtacctccagatgaacagcctgagagccgaggacaccgccgtgtactattgtgcctctggcgtgtacagcttcgactacagaggccagggcaccctggtcacagtctcttctggtaccggcggaggcggatctggcggcggaggtagcggtggcggaggatctgaattcgacatcgtgatgacacagagccctgatagcctggccgtgtctctgggagagagagccaccattaactgcaaggccagccagagcgtggactacgacggcgacagcttcctgaactggtatcagcagaagcccggccagcctcctaagctgctgatctacgccgccagcaatctggaaagcggcgtgccaagcagattttccggctctggcagcggcaccgatttcaccctgacaatatccagcctccagcctgaggacgtggccgtgtactactgccagcagagcaacgacgaccctctgacctttggacagggcaccaaggtggaaatcaaactcgaggacctgaagaacgtgttcccacctgaggtggccgtgttcgagcctagcgaggccgagatcagccacacccagaaagccaccctcgtgtgcctggctaccggcttctaccccgaccatgtggaactgtcttggtgggtcaacggcaaagaggtgcacagcggcgtgtgtaccgacccccagccactgaaagaacagcccgccctgaacgacagccggtactgcctgagcagcagactgagagtgtccgccaccttctggcagaacccccggaaccacttcagatgccaggtgcagttctacggcctgagcgagaacgacgagtggacccaggacagagccaagcccgtgacccagatcgtgtctgccgaagcctggggcagagccgatgatgtgattaagatccactggcaggaaaagaagtccaacaccatcctgggcagccaggaaggcaacaccatgaagaccaacgacacctacatgaagttcagctggctgaccgtgcccgagaagtccctggacaaagaacacagatgcatcgtgcggcacgaaaacaacaagaacggcgtggaccaggaaatcatcttcccacccatcaagaccgatgtgattacaatggaccccaaggacaactgctccaaggacgccaacgataccctgctgctccagctgaccaacaccagcgcctactacatgtacttgttgctgctgctgaagtccgtggtgtacttcgccatcatcacatgctgcctgctgatggctatggtcaagcggaaggacagccggggaagggccaagcgatctggatctggagcaacaaacttctcactactcaaacaagcaggtgacgtggaggagaatcccgggcctactagtatggactggatttggcgcatccttttccttgtcggcgctgctaccggcgcgcattccttcgaagaagtccaacttgtggagtctggagggggcctggtgcagcccggcggctctctcagactgtcttgtgcggcaagcggctacaccttcacctcttactggatagaatgggtgaggcaggcacctggaaagggactggagtggattggagagattctgccaggagggggagatacaaattacaatgaaatcttcaaggggcgggccaccttttcagcggataccagcaagaatacagcttacctgcagatgaatagcctccgggcagaagataccgctgtttattattgcacgagacgggtgccaataagactggactattgggggcaagggactcttgtcaccgtcagttcaacgcgtatccagaaccctgatcctgccgtgtaccagctgcgggatagcaagagcagcgacaagagcgtgtgtctgttcaccgacttcgacagccagaccaacgtgtcccagagcaaggactccgacgtgtacatcaccgataagtgcgtgctggacatgcggagcatggacttcaagagcaactccgccgtggcctggtccaacaagtccgatttcgcctgcgccaacgccttcaacaacagcattatccccgaggacacattcttcccaagccccgagagcagcgactccaccgaccacgtgaagcccaaagagacagagaacaccaagcagcccagcaagagctgccacaagcccaaggccatcgtgcacaccgagaaagtgaacatgatgagcctgaccgtgctgggcctgcggatgctgttcgccaaaaccgtggccgtgaacttcctgctgaccgccaagctgttcttcctcctcaccgcc

SEQ ID NO: 38350 - DNA, 2592 bp, synthetic construct
  source 1..2592: mol_type = other DNA
atggccttaccagtgaccgccttgctcctgccgctggccttgctgctccacgccgccaggccggaagtgcagctggttgaatctggcggaggactggttcagcctggcggatctctgagactgtcttgtgccgccagcggcttcagcttcagcgacttttggatgagctgggtccgacaggcccctggcaaaggacttgaatgggtcgccacaatcagccaggccggcagcgagaaggactacgtggactctgtgaagggcagattcaccatcagccgggacaacgccaagaagtccctgtacctccagatgaacagcctgagagccgaggacaccgccgtgtactattgtgcctctggcgtgtacagcttcgactacagaggccagggcaccctggtcacagtctcttctggtaccggcggaggcggatctggcggcggaggtagcggtggcggaggatctgaattcgacatcgtgatgacacagagccctgatagcctggccgtgtctctgggagagagagccaccattaactgcaaggccagccagagcgtggactacgacggcgacagcttcctgaactggtatcagcagaagcccggccagcctcctaagctgctgatctacgccgccagcaatctggaaagcggcgtgccaagcagattttccggctctggcagcggcaccgatttcaccctgacaatatccagcctccagcctgaggacgtggccgtgtactactgccagcagagcaacgacgaccctctgacctttggacagggcaccaaggtggaaatcaaactcgagatccagaaccctgatcctgccgtgtaccagctgcgggatagcaagagcagcgacaagagcgtgtgtctgttcaccgacttcgacagccagaccaacgtgtcccagagcaaggactccgacgtgtacatcaccgataagtgcgtgctggacatgcggagcatggacttcaagagcaactccgccgtggcctggtccaacaagtccgatttcgcctgcgccaacgccttcaacaacagcattatccccgaggacacattcttcccaagccccgagagcagcgactccaccgaccacgtgaagcccaaagagacagagaacaccaagcagcccagcaagagctgccacaagcccaaggccatcgtgcacaccgagaaagtgaacatgatgagcctgaccgtgctgggcctgcggatgctgttcgccaaaaccgtggccgtgaacttcctgctgaccgccaagctgttcttcctcctcaccgcccgcgccaagagaagcggatctggcgtgaagcagaccctgaatttcgacctgctgaagctggctggcgacgtggaatccaacccaggccctactagtatggactggatttggcgcatccttttccttgtcggcgctgctaccggcgcgcattccttcgaagaagtccaacttgtggagtctggagggggcctggtgcagcccggcggctctctcagactgtcttgtgcggcaagcggctacaccttcacctcttactggatagaatgggtgaggcaggcacctggaaagggactggagtggattggagagattctgccaggagggggagatacaaattacaatgaaatcttcaaggggcgggccaccttttcagcggataccagcaagaatacagcttacctgcagatgaatagcctccgggcagaagataccgctgtttattattgcacgagacgggtgccaataagactggactattgggggcaagggactcttgtcaccgtcagttcaacgcgtgaggacctgaagaacgtgttcccacctgaggtggccgtgttcgagcctagcgaggccgagatcagccacacccagaaagccaccctcgtgtgcctggctaccggcttctaccccgaccatgtggaactgtcttggtgggtcaacggcaaagaggtgcacagcggcgtgtgtaccgacccccagccactgaaagaacagcccgccctgaacgacagccggtactgcctgagcagcagactgagagtgtccgccaccttctggcagaacccccggaaccacttcagatgccaggtgcagttctacggcctgagcgagaacgacgagtggacccaggacagagccaagcccgtgacccagatcgtgtctgccgaagcctggggcagagccgatgatgtgattaagatccactggcaggaaaagaagtccaacaccatcctgggcagccaggaaggcaacaccatgaagaccaacgacacctacatgaagttcagctggctgaccgtgcccgagaagtccctggacaaagaacacagatgcatcgtgcggcacgaaaacaacaagaacggcgtggaccaggaaatcatcttcccacccatcaagaccgatgtgattacaatggaccccaaggacaactgctccaaggacgccaacgataccctgctgctccagctgaccaacaccagcgcctactacatgtacttgttgctgctgctgaagtccgtggtgtacttcgccatcatcacatgctgcctgctgatggctatggtcaagcggaaggacagccgggga

SEQ ID NO: 38351 - DNA, 2991 bp, synthetic construct
  source 1..2991: mol_type = other DNA
atggccttaccagtgaccgccttgctcctgccgctggccttgctgctccacgccgccaggccggaagtgcagctggttgaatctggcggaggactggttcagcctggcggatctctgagactgtcttgtgccgccagcggcttcagcttcagcgacttttggatgagctgggtccgacaggcccctggcaaaggacttgaatgggtcgccacaatcagccaggccggcagcgagaaggactacgtggactctgtgaagggcagattcaccatcagccgggacaacgccaagaagtccctgtacctccagatgaacagcctgagagccgaggacaccgccgtgtactattgtgcctctggcgtgtacagcttcgactacagaggccagggcaccctggtcacagtctcttctggtaccggcggaggcggatctggcggcggaggtagcggtggcggaggatctgaattcgacatcgtgatgacacagagccctgatagcctggccgtgtctctgggagagagagccaccattaactgcaaggccagccagagcgtggactacgacggcgacagcttcctgaactggtatcagcagaagcccggccagcctcctaagctgctgatctacgccgccagcaatctggaaagcggcgtgccaagcagattttccggctctggcagcggcaccgatttcaccctgacaatatccagcctccagcctgaggacgtggccgtgtactactgccagcagagcaacgacgaccctctgacctttggacagggcaccaaggtggaaatcaaactcgaggacctgaagaacgtgttcccacctgaggtggccgtgttcgagcctagcgaggccgagatcagccacacccagaaagccaccctcgtgtgcctggctaccggcttctaccccgaccatgtggaactgtcttggtgggtcaacggcaaagaggtgcacagcggcgtgtgtaccgacccccagccactgaaagaacagcccgccctgaacgacagccggtactgcctgagcagcagactgagagtgtccgccaccttctggcagaacccccggaaccacttcagatgccaggtgcagttctacggcctgagcgagaacgacgagtggacccaggacagagccaagcccgtgacccagatcgtgtctgccgaagcctggggcagagccgatgatgtgattaagatccactggcaggaaaagaagtccaacaccatcctgggcagccaggaaggcaacaccatgaagaccaacgacacctacatgaagttcagctggctgaccgtgcccgagaagtccctggacaaagaacacagatgcatcgtgcggcacgaaaacaacaagaacggcgtggaccaggaaatcatcttcccacccatcaagaccgatgtgattacaatggaccccaaggacaactgctccaaggacgccaacgataccctgctgctccagctgaccaacaccagcgcctactacatgtacttgttgctgctgctgaagtccgtggtgtacttcgccatcatcacatgctgcctgctgatggctatggtcaagcggaaggacagccggggaagggccaagcgatctggatctggagcaacaaacttctcactactcaaacaagcaggtgacgtggaggagaatcccgggcctactagtatggactggatttggcgcatccttttccttgtcggcgctgctaccggcgcgcattccgggccccagctccagctgcaagagtctggacctggcctggtcaagcctagcgagacactgagcctgacctgtaccgtgtccggcgatagcatcagcagcggcgattactactggggctggatcagacagcctcctggcaaaggactggaatggatcggccacatctactacagcggcgtgacctactacaaccccagcctgaagtccagagtgaccatcagcgtggacaccagccggaaccagttctccctgaagctgtctagcgtgacagccgccgataccgccgtgtactactgcaccagagaggacagcagcaactggcggagtagaggccagggaacactggtcacagttagctctggatccggcggaggcggaagtggaggcggaggatctggcggcggaggctctttcgaagaagtccaacttgtggagtctggagggggcctggtgcagcccggcggctctctcagactgtcttgtgcggcaagcggctacaccttcacctcttactggatagaatgggtgaggcaggcacctggaaagggactggagtggattggagagattctgccaggagggggagatacaaattacaatgaaatcttcaaggggcgggccaccttttcagcggataccagcaagaatacagcttacctgcagatgaatagcctccgggcagaagataccgctgtttattattgcacgagacgggtgccaataagactggactattgggggcaagggactcttgtcaccgtcagttcaacgcgtatccagaaccctgatcctgccgtgtaccagctgcgggatagcaagagcagcgacaagagcgtgtgtctgttcaccgacttcgacagccagaccaacgtgtcccagagcaaggactccgacgtgtacatcaccgataagtgcgtgctggacatgcggagcatggacttcaagagcaactccgccgtggcctggtccaacaagtccgatttcgcctgcgccaacgccttcaacaacagcattatccccgaggacacattcttcccaagccccgagagcagcgactccaccgaccacgtgaagcccaaagagacagagaacaccaagcagcccagcaagagctgccacaagcccaaggccatcgtgcacaccgagaaagtgaacatgatgagcctgaccgtgctgggcctgcggatgctgttcgccaaaaccgtggccgtgaacttcctgctgaccgccaagctgttcttcctcctcaccgcc

SEQ ID NO: 38352 - DNA, 3003 bp, synthetic construct
  source 1..3003: mol_type = other DNA
atggccttaccagtgaccgccttgctcctgccgctggccttgctgctccacgccgccaggccggaagtgcagctggttgaatctggcggaggactggttcagcctggcggatctctgagactgtcttgtgccgccagcggcttcagcttcagcgacttttggatgagctgggtccgacaggcccctggcaaaggacttgaatgggtcgccacaatcagccaggccggcagcgagaaggactacgtggactctgtgaagggcagattcaccatcagccgggacaacgccaagaagtccctgtacctccagatgaacagcctgagagccgaggacaccgccgtgtactattgtgcctctggcgtgtacagcttcgactacagaggccagggcaccctggtcacagtctcttctggtaccggcggaggcggatctggcggcggaggtagcggtggcggaggatctgaattcgacatcgtgatgacacagagccctgatagcctggccgtgtctctgggagagagagccaccattaactgcaaggccagccagagcgtggactacgacggcgacagcttcctgaactggtatcagcagaagcccggccagcctcctaagctgctgatctacgccgccagcaatctggaaagcggcgtgccaagcagattttccggctctggcagcggcaccgatttcaccctgacaatatccagcctccagcctgaggacgtggccgtgtactactgccagcagagcaacgacgaccctctgacctttggacagggcaccaaggtggaaatcaaactcgagatccagaaccctgatcctgccgtgtaccagctgcgggatagcaagagcagcgacaagagcgtgtgtctgttcaccgacttcgacagccagaccaacgtgtcccagagcaaggactccgacgtgtacatcaccgataagtgcgtgctggacatgcggagcatggacttcaagagcaactccgccgtggcctggtccaacaagtccgatttcgcctgcgccaacgccttcaacaacagcattatccccgaggacacattcttcccaagccccgagagcagcgactccaccgaccacgtgaagcccaaagagacagagaacaccaagcagcccagcaagagctgccacaagcccaaggccatcgtgcacaccgagaaagtgaacatgatgagcctgaccgtgctgggcctgcggatgctgttcgccaaaaccgtggccgtgaacttcctgctgaccgccaagctgttcttcctcctcaccgcccgcgccaagagaagcggatctggcgtgaagcagaccctgaatttcgacctgctgaagctggctggcgacgtggaatccaacccaggccctactagtatggactggatttggcgcatccttttccttgtcggcgctgctaccggcgcgcattccgggccccagctccagctgcaagagtctggacctggcctggtcaagcctagcgagacactgagcctgacctgtaccgtgtccggcgatagcatcagcagcggcgattactactggggctggatcagacagcctcctggcaaaggactggaatggatcggccacatctactacagcggcgtgacctactacaaccccagcctgaagtccagagtgaccatcagcgtggacaccagccggaaccagttctccctgaagctgtctagcgtgacagccgccgataccgccgtgtactactgcaccagagaggacagcagcaactggcggagtagaggccagggaacactggtcacagttagctctggatccggcggaggcggaagtggaggcggaggatctggcggcggaggctctttcgaagaagtccaacttgtggagtctggagggggcctggtgcagcccggcggctctctcagactgtcttgtgcggcaagcggctacaccttcacctcttactggatagaatgggtgaggcaggcacctggaaagggactggagtggattggagagattctgccaggagggggagatacaaattacaatgaaatcttcaaggggcgggccaccttttcagcggataccagcaagaatacagcttacctgcagatgaatagcctccgggcagaagataccgctgtttattattgcacgagacgggtgccaataagactggactattgggggcaagggactcttgtcaccgtcagttcaacgcgtgaggacctgaagaacgtgttcccacctgaggtggccgtgttcgagcctagcgaggccgagatcagccacacccagaaagccaccctcgtgtgcctggctaccggcttctaccccgaccatgtggaactgtcttggtgggtcaacggcaaagaggtgcacagcggcgtgtgtaccgacccccagccactgaaagaacagcccgccctgaacgacagccggtactgcctgagcagcagactgagagtgtccgccaccttctggcagaacccccggaaccacttcagatgccaggtgcagttctacggcctgagcgagaacgacgagtggacccaggacagagccaagcccgtgacccagatcgtgtctgccgaagcctggggcagagccgatgatgtgattaagatccactggcaggaaaagaagtccaacaccatcctgggcagccaggaaggcaacaccatgaagaccaacgacacctacatgaagttcagctggctgaccgtgcccgagaagtccctggacaaagaacacagatgcatcgtgcggcacgaaaacaacaagaacggcgtggaccaggaaatcatcttcccacccatcaagaccgatgtgattacaatggaccccaaggacaactgctccaaggacgccaacgataccctgctgctccagctgaccaacaccagcgcctactacatgtacttgttgctgctgctgaagtccgtggtgtacttcgccatcatcacatgctgcctgctgatggctatggtcaagcggaaggacagccgggga

SEQ ID NO: 38353 - DNA, 2169 bp, synthetic construct
  source 1..2169: mol_type = other DNA
atggccttaccagtgaccgccttgctcctgccgctggccttgctgctccacgccgccaggccggacatcgtgatgacacagagccctgatagcctggccgtgtctctgggagagagagccaccattaactgcaaggccagccagagcgtggactacgacggcgacagcttcctgaactggtatcagcagaagcccggccagcctcctaagctgctgatctacgccgccagcaatctggaaagcggcgtgccaagcagattttccggctctggcagcggcaccgatttcaccctgacaatatccagcctccagcctgaggacgtggccgtgtactactgccagcagagcaacgacgaccctctgacctttggacagggcaccaaggtggaaatcaaactcgaggacctgaagaacgtgttcccacctgaggtggccgtgttcgagcctagcgaggccgagatcagccacacccagaaagccaccctcgtgtgcctggctaccggcttctaccccgaccatgtggaactgtcttggtgggtcaacggcaaagaggtgcacagcggcgtgtgtaccgacccccagccactgaaagaacagcccgccctgaacgacagccggtactgcctgagcagcagactgagagtgtccgccaccttctggcagaacccccggaaccacttcagatgccaggtgcagttctacggcctgagcgagaacgacgagtggacccaggacagagccaagcccgtgacccagatcgtgtctgccgaagcctggggcagagccgatgatgtgattaagatccactggcaggaaaagaagtccaacaccatcctgggcagccaggaaggcaacaccatgaagaccaacgacacctacatgaagttcagctggctgaccgtgcccgagaagtccctggacaaagaacacagatgcatcgtgcggcacgaaaacaacaagaacggcgtggaccaggaaatcatcttcccacccatcaagaccgatgtgattacaatggaccccaaggacaactgctccaaggacgccaacgataccctgctgctccagctgaccaacaccagcgcctactacatgtacttgttgctgctgctgaagtccgtggtgtacttcgccatcatcacatgctgcctgctgcggagaaccgccttctgctgcaacggcgagaagtctagggccaagcgatctggatctggagcaacaaacttctcactactcaaacaagcaggtgacgtggaggagaatcccgggcctactagtatggactggatttggcgcatccttttccttgtcggcgctgctaccggcgcgcattccttcgaagaagtccaacttgtggagtctggagggggcctggtgcagcccggcggctctctcagactgtcttgtgcggcaagcggctacaccttcacctcttactggatagaatgggtgaggcaggcacctggaaagggactggagtggattggagagattctgccaggagggggagatacaaattacaatgaaatcttcaaggggcgggccaccttttcagcggataccagcaagaatacagcttacctgcagatgaatagcctccgggcagaagataccgctgtttattattgcacgagacgggtgccaataagactggactattgggggcaagggactcttgtcaccgtcagttcaacgcgtatccagaaccctgatcctgccgtgtaccagctgcgggatagcaagagcagcgacaagagcgtgtgtctgttcaccgacttcgacagccagaccaacgtgtcccagagcaaggactccgacgtgtacatcaccgataagtgcgtgctggacatgcggagcatggacttcaagagcaactccgccgtggcctggtccaacaagtccgatttcgcctgcgccaacgccttcaacaacagcattatccccgaggacacattcttcccaagccccgagagcagcgactccaccgaccacgtgaagcccaaagagacagagaacaccaagcagcccagcaagagctgccacaagcccaaggccatcgtgcacaccgagaaagtgaacatgatgagcctgaccgtgctgggcctgcggatgctgttcgccaaaaccgtggccgtgaacttcctgctgaccgccaagctgttcttcctc

SEQ ID NO: 38354 - DNA, 2181 bp, synthetic construct
  source 1..2181: mol_type = other DNA
atggccttaccagtgaccgccttgctcctgccgctggccttgctgctccacgccgccaggccggacatcgtgatgacacagagccctgatagcctggccgtgtctctgggagagagagccaccattaactgcaaggccagccagagcgtggactacgacggcgacagcttcctgaactggtatcagcagaagcccggccagcctcctaagctgctgatctacgccgccagcaatctggaaagcggcgtgccaagcagattttccggctctggcagcggcaccgatttcaccctgacaatatccagcctccagcctgaggacgtggccgtgtactactgccagcagagcaacgacgaccctctgacctttggacagggcaccaaggtggaaatcaaactcgagatccagaaccctgatcctgccgtgtaccagctgcgggatagcaagagcagcgacaagagcgtgtgtctgttcaccgacttcgacagccagaccaacgtgtcccagagcaaggactccgacgtgtacatcaccgataagtgcgtgctggacatgcggagcatggacttcaagagcaactccgccgtggcctggtccaacaagtccgatttcgcctgcgccaacgccttcaacaacagcattatccccgaggacacattcttcccaagccccgagagcagcgactccaccgaccacgtgaagcccaaagagacagagaacaccaagcagcccagcaagagctgccacaagcccaaggccatcgtgcacaccgagaaagtgaacatgatgagcctgaccgtgctgggcctgcggatgctgttcgccaaaaccgtggccgtgaacttcctgctgaccgccaagctgttcttcctccgcgccaagagaagcggatctggcgtgaagcagaccctgaatttcgacctgctgaagctggctggcgacgtggaatccaacccaggccctactagtatggactggatttggcgcatccttttccttgtcggcgctgctaccggcgcgcattccttcgaagaagtccaacttgtggagtctggagggggcctggtgcagcccggcggctctctcagactgtcttgtgcggcaagcggctacaccttcacctcttactggatagaatgggtgaggcaggcacctggaaagggactggagtggattggagagattctgccaggagggggagatacaaattacaatgaaatcttcaaggggcgggccaccttttcagcggataccagcaagaatacagcttacctgcagatgaatagcctccgggcagaagataccgctgtttattattgcacgagacgggtgccaataagactggactattgggggcaagggactcttgtcaccgtcagttcaacgcgtgaggacctgaagaacgtgttcccacctgaggtggccgtgttcgagcctagcgaggccgagatcagccacacccagaaagccaccctcgtgtgcctggctaccggcttctaccccgaccatgtggaactgtcttggtgggtcaacggcaaagaggtgcacagcggcgtgtgtaccgacccccagccactgaaagaacagcccgccctgaacgacagccggtactgcctgagcagcagactgagagtgtccgccaccttctggcagaacccccggaaccacttcagatgccaggtgcagttctacggcctgagcgagaacgacgagtggacccaggacagagccaagcccgtgacccagatcgtgtctgccgaagcctggggcagagccgatgatgtgattaagatccactggcaggaaaagaagtccaacaccatcctgggcagccaggaaggcaacaccatgaagaccaacgacacctacatgaagttcagctggctgaccgtgcccgagaagtccctggacaaagaacacagatgcatcgtgcggcacgaaaacaacaagaacggcgtggaccaggaaatcatcttcccacccatcaagaccgatgtgattacaatggaccccaaggacaactgctccaaggacgccaacgataccctgctgctccagctgaccaacaccagcgcctactacatgtacttgttgctgctgctgaagtccgtggtgtacttcgccatcatcacatgctgcctgctgcggagaaccgccttctgctgcaacggcgagaagtct

SEQ ID NO: 38355 - DNA, 2574 bp, synthetic construct
  source 1..2574: mol_type = other DNA
atggccttaccagtgaccgccttgctcctgccgctggccttgctgctccacgccgccaggccggaagtgcagctggttgaatctggcggaggactggttcagcctggcggatctctgagactgtcttgtgccgccagcggcttcagcttcagcgacttttggatgagctgggtccgacaggcccctggcaaaggacttgaatgggtcgccacaatcagccaggccggcagcgagaaggactacgtggactctgtgaagggcagattcaccatcagccgggacaacgccaagaagtccctgtacctccagatgaacagcctgagagccgaggacaccgccgtgtactattgtgcctctggcgtgtacagcttcgactacagaggccagggcaccctggtcacagtctcttctggtaccggcggaggcggatctggcggcggaggtagcggtggcggaggatctgaattcgacatcgtgatgacacagagccctgatagcctggccgtgtctctgggagagagagccaccattaactgcaaggccagccagagcgtggactacgacggcgacagcttcctgaactggtatcagcagaagcccggccagcctcctaagctgctgatctacgccgccagcaatctggaaagcggcgtgccaagcagattttccggctctggcagcggcaccgatttcaccctgacaatatccagcctccagcctgaggacgtggccgtgtactactgccagcagagcaacgacgaccctctgacctttggacagggcaccaaggtggaaatcaaactcgaggacctgaagaacgtgttcccacctgaggtggccgtgttcgagcctagcgaggccgagatcagccacacccagaaagccaccctcgtgtgcctggctaccggcttctaccccgaccatgtggaactgtcttggtgggtcaacggcaaagaggtgcacagcggcgtgtgtaccgacccccagccactgaaagaacagcccgccctgaacgacagccggtactgcctgagcagcagactgagagtgtccgccaccttctggcagaacccccggaaccacttcagatgccaggtgcagttctacggcctgagcgagaacgacgagtggacccaggacagagccaagcccgtgacccagatcgtgtctgccgaagcctggggcagagccgatgatgtgattaagatccactggcaggaaaagaagtccaacaccatcctgggcagccaggaaggcaacaccatgaagaccaacgacacctacatgaagttcagctggctgaccgtgcccgagaagtccctggacaaagaacacagatgcatcgtgcggcacgaaaacaacaagaacggcgtggaccaggaaatcatcttcccacccatcaagaccgatgtgattacaatggaccccaaggacaactgctccaaggacgccaacgataccctgctgctccagctgaccaacaccagcgcctactacatgtacttgttgctgctgctgaagtccgtggtgtacttcgccatcatcacatgctgcctgctgcggagaaccgccttctgctgcaacggcgagaagtctagggccaagcgatctggatctggagcaacaaacttctcactactcaaacaagcaggtgacgtggaggagaatcccgggcctactagtatggactggatttggcgcatccttttccttgtcggcgctgctaccggcgcgcattccttcgaagaagtccaacttgtggagtctggagggggcctggtgcagcccggcggctctctcagactgtcttgtgcggcaagcggctacaccttcacctcttactggatagaatgggtgaggcaggcacctggaaagggactggagtggattggagagattctgccaggagggggagatacaaattacaatgaaatcttcaaggggcgggccaccttttcagcggataccagcaagaatacagcttacctgcagatgaatagcctccgggcagaagataccgctgtttattattgcacgagacgggtgccaataagactggactattgggggcaagggactcttgtcaccgtcagttcaacgcgtatccagaaccctgatcctgccgtgtaccagctgcgggatagcaagagcagcgacaagagcgtgtgtctgttcaccgacttcgacagccagaccaacgtgtcccagagcaaggactccgacgtgtacatcaccgataagtgcgtgctggacatgcggagcatggacttcaagagcaactccgccgtggcctggtccaacaagtccgatttcgcctgcgccaacgccttcaacaacagcattatccccgaggacacattcttcccaagccccgagagcagcgactccaccgaccacgtgaagcccaaagagacagagaacaccaagcagcccagcaagagctgccacaagcccaaggccatcgtgcacaccgagaaagtgaacatgatgagcctgaccgtgctgggcctgcggatgctgttcgccaaaaccgtggccgtgaacttcctgctgaccgccaagctgttcttcctc

SEQ ID NO: 38356 - DNA, 2985 bp, synthetic construct
  source 1..2985: mol_type = other DNA
atggccttaccagtgaccgccttgctcctgccgctggccttgctgctccacgccgccaggccggaagtgcagctggttgaatctggcggaggactggttcagcctggcggatctctgagactgtcttgtgccgccagcggcttcagcttcagcgacttttggatgagctgggtccgacaggcccctggcaaaggacttgaatgggtcgccacaatcagccaggccggcagcgagaaggactacgtggactctgtgaagggcagattcaccatcagccgggacaacgccaagaagtccctgtacctccagatgaacagcctgagagccgaggacaccgccgtgtactattgtgcctctggcgtgtacagcttcgactacagaggccagggcaccctggtcacagtctcttctggtaccggcggaggcggatctggcggcggaggtagcggtggcggaggatctgaattcgacatcgtgatgacacagagccctgatagcctggccgtgtctctgggagagagagccaccattaactgcaaggccagccagagcgtggactacgacggcgacagcttcctgaactggtatcagcagaagcccggccagcctcctaagctgctgatctacgccgccagcaatctggaaagcggcgtgccaagcagattttccggctctggcagcggcaccgatttcaccctgacaatatccagcctccagcctgaggacgtggccgtgtactactgccagcagagcaacgacgaccctctgacctttggacagggcaccaaggtggaaatcaaactcgaggacctgaagaacgtgttcccacctgaggtggccgtgttcgagcctagcgaggccgagatcagccacacccagaaagccaccctcgtgtgcctggctaccggcttctaccccgaccatgtggaactgtcttggtgggtcaacggcaaagaggtgcacagcggcgtgtgtaccgacccccagccactgaaagaacagcccgccctgaacgacagccggtactgcctgagcagcagactgagagtgtccgccaccttctggcagaacccccggaaccacttcagatgccaggtgcagttctacggcctgagcgagaacgacgagtggacccaggacagagccaagcccgtgacccagatcgtgtctgccgaagcctggggcagagccgatgatgtgattaagatccactggcaggaaaagaagtccaacaccatcctgggcagccaggaaggcaacaccatgaagaccaacgacacctacatgaagttcagctggctgaccgtgcccgagaagtccctggacaaagaacacagatgcatcgtgcggcacgaaaacaacaagaacggcgtggaccaggaaatcatcttcccacccatcaagaccgatgtgattacaatggaccccaaggacaactgctccaaggacgccaacgataccctgctgctccagctgaccaacaccagcgcctactacatgtacttgttgctgctgctgaagtccgtggtgtacttcgccatcatcacatgctgcctgctgcggagaaccgccttctgctgcaacggcgagaagtctagggccaagcgatctggatctggagcaacaaacttctcactactcaaacaagcaggtgacgtggaggagaatcccgggcctactagtatggactggatttggcgcatccttttccttgtcggcgctgctaccggcgcgcattccgggccccagctccagctgcaagagtctggacctggcctggtcaagcctagcgagacactgagcctgacctgtaccgtgtccggcgatagcatcagcagcggcgattactactggggctggatcagacagcctcctggcaaaggactggaatggatcggccacatctactacagcggcgtgacctactacaaccccagcctgaagtccagagtgaccatcagcgtggacaccagccggaaccagttctccctgaagctgtctagcgtgacagccgccgataccgccgtgtactactgcaccagagaggacagcagcaactggcggagtagaggccagggaacactggtcacagttagctctggatccggcggaggcggaagtggaggcggaggatctggcggcggaggctctttcgaagaagtccaacttgtggagtctggagggggcctggtgcagcccggcggctctctcagactgtcttgtgcggcaagcggctacaccttcacctcttactggatagaatgggtgaggcaggcacctggaaagggactggagtggattggagagattctgccaggagggggagatacaaattacaatgaaatcttcaaggggcgggccaccttttcagcggataccagcaagaatacagcttacctgcagatgaatagcctccgggcagaagataccgctgtttattattgcacgagacgggtgccaataagactggactattgggggcaagggactcttgtcaccgtcagttcaacgcgtatccagaaccctgatcctgccgtgtaccagctgcgggatagcaagagcagcgacaagagcgtgtgtctgttcaccgacttcgacagccagaccaacgtgtcccagagcaaggactccgacgtgtacatcaccgataagtgcgtgctggacatgcggagcatggacttcaagagcaactccgccgtggcctggtccaacaagtccgatttcgcctgcgccaacgccttcaacaacagcattatccccgaggacacattcttcccaagccccgagagcagcgactccaccgaccacgtgaagcccaaagagacagagaacaccaagcagcccagcaagagctgccacaagcccaaggccatcgtgcacaccgagaaagtgaacatgatgagcctgaccgtgctgggcctgcggatgctgttcgccaaaaccgtggccgtgaacttcctgctgaccgccaagctgttcttcctc

SEQ ID NO: 38357 - DNA, 1863 bp, synthetic construct
  source 1..1863: mol_type = other DNA
atggccttaccagtgaccgccttgctcctgccgctggccttgctgctccacgccgccaggccggacatcgtgatgacacagagccctgatagcctggccgtgtctctgggagagagagccaccattaactgcaaggccagccagagcgtggactacgacggcgacagcttcctgaactggtatcagcagaagcccggccagcctcctaagctgctgatctacgccgccagcaatctggaaagcggcgtgccaagcagattttccggctctggcagcggcaccgatttcaccctgacaatatccagcctccagcctgaggacgtggccgtgtactactgccagcagagcaacgacgaccctctgacctttggacagggcaccaaggtggaaatcaaactcgaggacctgaagaacgtgttcccacctgaggtggccgtgttcgagcctagcgaggccgagatcagccacacccagaaagccaccctcgtgtgcctggctaccggcttctaccccgaccatgtggaactgtcttggtgggtcaacggcaaagaggtgcacagcggcgtgtctaccgacccccagccactgaaagaacagcccgccctgaacgacagccggtactgcctgagcagcagactgagagtgtccgccaccttctggcagaacccccggaaccacttcagatgccaggtgcagttctacggcctgagcgagaacgacgagtggacccaggacagagccaagcccgtgacccagatcgtgtctgccgaagcctggggcagagccgattgcgacgtgaagctggtggaaaagagcttcgagacagacaccaacctgaacttccagaacctgagcgtgatcggcttcagaatcctgctgctgaaagtggccggctttaacctgctgatgaccctgcggctgtggtccagcagggccaagcgatctggatctggagcaacaaacttctcactactcaaacaagcaggtgacgtggaggagaatcccgggcctactagtatggactggatttggcgcatccttttccttgtcggcgctgctaccggcgcgcattccttcgaagaagtccaacttgtggagtctggagggggcctggtgcagcccggcggctctctcagactgtcttgtgcggcaagcggctacaccttcacctcttactggatagaatgggtgaggcaggcacctggaaagggactggagtggattggagagattctgccaggagggggagatacaaattacaatgaaatcttcaaggggcgggccaccttttcagcggataccagcaagaatacagcttacctgcagatgaatagcctccgggcagaagataccgctgtttattattgcacgagacgggtgccaataagactggactattgggggcaagggactcttgtcaccgtcagttcaacgcgtatccagaaccctgatcctgccgtgtaccagctgcgggatagcaagagcagcgacaagagcgtgtgtctgttcaccgacttcgacagccagaccaacgtgtcccagagcaaggactccgacgtgtacatcaccgataagaccgtgctggacatgcggagcatggacttcaagagcaactccgccgtggcctggtccaacaagtccgatttcgcctgcgccaacgccttcaacaacagcattatccccgaggacacattcttcccaagccccgagagcagctgcggctttaccagcgagagctaccagcagggcgtgctgagcgccaccatcctgtacgagatcctgctgggcaaggccaccctgtacgccgtgctggtgtctgccctggtgctgatggctatggtcaagcggaaggacagccgggga

SEQ ID NO: 38358 - DNA, 1863 bp, synthetic construct
  source 1..1863: mol_type = other DNA
atggccttaccagtgaccgccttgctcctgccgctggccttgctgctccacgccgccaggccggacatcgtgatgacacagagccctgatagcctggccgtgtctctgggagagagagccaccattaactgcaaggccagccagagcgtggactacgacggcgacagcttcctgaactggtatcagcagaagcccggccagcctcctaagctgctgatctacgccgccagcaatctggaaagcggcgtgccaagcagattttccggctctggcagcggcaccgatttcaccctgacaatatccagcctccagcctgaggacgtggccgtgtactactgccagcagagcaacgacgaccctctgacctttggacagggcaccaaggtggaaatcaaactcgaggacctgaagaacgtgttcccacctgaggtggccgtgttcgagcctagcgaggccgagatcagccacacccagaaagccaccctcgtgtgcctggctaccggcttctaccccgaccatgtggaactgtcttggtgggtcaacggcaaagaggtgcacagcggcgtgtctaccgacccccagccactgaaagaacagcccgccctgaacgacagccggtactgcctgagcagcagactgagagtgtccgccaccttctggcagaacccccggaaccacttcagatgccaggtgcagttctacggcctgagcgagaacgacgagtggacccaggacagagccaagcccgtgacccagatcgtgtctgccgaagcctggggcagagccgattgcggctttaccagcgagagctaccagcagggcgtgctgagcgccaccaacctgagcgtgatcggcttcagaatcctgctgctgaaagtggccggctttaacctgctgatgaccctgcggctgtggtccagcagggccaagcgatctggatctggagcaacaaacttctcactactcaaacaagcaggtgacgtggaggagaatcccgggcctactagtatggactggatttggcgcatccttttccttgtcggcgctgctaccggcgcgcattccttcgaagaagtccaacttgtggagtctggagggggcctggtgcagcccggcggctctctcagactgtcttgtgcggcaagcggctacaccttcacctcttactggatagaatgggtgaggcaggcacctggaaagggactggagtggattggagagattctgccaggagggggagatacaaattacaatgaaatcttcaaggggcgggccaccttttcagcggataccagcaagaatacagcttacctgcagatgaatagcctccgggcagaagataccgctgtttattattgcacgagacgggtgccaataagactggactattgggggcaagggactcttgtcaccgtcagttcaacgcgtatccagaaccctgatcctgccgtgtaccagctgcgggatagcaagagcagcgacaagagcgtgtgtctgttcaccgacttcgacagccagaccaacgtgtcccagagcaaggactccgacgtgtacatcaccgataagaccgtgctggacatgcggagcatggacttcaagagcaactccgccgtggcctggtccaacaagtccgatttcgcctgcgccaacgccttcaacaacagcattatccccgaggacacattcttcccaagccccgagagcagctgcgacgtgaagctggtggaaaagagcttcgagacagacaccaacctgaacttccagatcctgtacgagatcctgctgggcaaggccaccctgtacgccgtgctggtgtctgccctggtgctgatggctatggtcaagcggaaggacagccgggga

SEQ ID NO: 38359 - DNA, 2175 bp, synthetic construct
  source 1..2175: mol_type = other DNA
atggccttaccagtgaccgccttgctcctgccgctggccttgctgctccacgccgccaggccggacatcgtgatgacacagagccctgatagcctggccgtgtctctgggagagagagccaccattaactgcaaggccagccagagcgtggactacgacggcgacagcttcctgaactggtatcagcagaagcccggccagcctcctaagctgctgatctacgccgccagcaatctggaaagcggcgtgccaagcagattttccggctctggcagcggcaccgatttcaccctgacaatatccagcctccagcctgaggacgtggccgtgtactactgccagcagagcaacgacgaccctctgacctttggacagggcaccaaggtggaaatcaaactcgaggacctgaagaacgtgttcccacctgaggtggccgtgttcgagcctagcgaggccgagatcagccacacccagaaagccaccctcgtgtgcctggctaccggcttctaccccgaccatgtggaactgtcttggtgggtcaacggcaaagaggtgcacagcggcgtgtctaccgacccccagccactgaaagaacagcccgccctgaacgacagccggtactgcctgagcagcagactgagagtgtccgccaccttctggcagaacccccggaaccacttcagatgccaggtgcagttctacggcctgagcgagaacgacgagtggacccaggacagagccaagcccgtgacccagatcgtgtctgccgaagcctggggcagagccgatgatgtgattaagatccactggcaggaaaagaagtccaacaccatcctgggcagccaggaaggcaacaccatgaagaccaacgacacctacatgaagttcagctggctgaccgtgcccgagaagtccctggacaaagaacacagatgcatcgtgcggcacgaaaacaacaagaacggcgtggaccaggaaatcatcttcccacccatcaagaccgatgtgattacaatggaccccaaggacaactgctccaaggacgccaacgataccctgctgctccagctgaccaacaccagcgcctactacatgtacttgttgctgctgctgaagtccgtggtgtacttcgccatcatcacatgctgcctgctgatggctatggtcaagcggaaggacagccggggaagggccaagcgatctggatctggagcaacaaacttctcactactcaaacaagcaggtgacgtggaggagaatcccgggcctactagtatggactggatttggcgcatccttttccttgtcggcgctgctaccggcgcgcattccttcgaagaagtccaacttgtggagtctggagggggcctggtgcagcccggcggctctctcagactgtcttgtgcggcaagcggctacaccttcacctcttactggatagaatgggtgaggcaggcacctggaaagggactggagtggattggagagattctgccaggagggggagatacaaattacaatgaaatcttcaaggggcgggccaccttttcagcggataccagcaagaatacagcttacctgcagatgaatagcctccgggcagaagataccgctgtttattattgcacgagacgggtgccaataagactggactattgggggcaagggactcttgtcaccgtcagttcaacgcgtatccagaaccctgatcctgccgtgtaccagctgcgggatagcaagagcagcgacaagagcgtgtgtctgttcaccgacttcgacagccagaccaacgtgtcccagagcaaggactccgacgtgtacatcaccgataagaccgtgctggacatgcggagcatggacttcaagagcaactccgccgtggcctggtccaacaagtccgatttcgcctgcgccaacgccttcaacaacagcattatccccgaggacacattcttcccaagccccgagagcagcgactccaccgaccacgtgaagcccaaagagacagagaacaccaagcagcccagcaagagctgccacaagcccaaggccatcgtgcacaccgagaaagtgaacatgatgagcctgaccgtgctgggcctgcggatgctgttcgccaaaaccgtggccgtgaacttcctgctgaccgccaagctgttcttcctcctcaccgcc

SEQ ID NO: 38360 - DNA, 2169 bp, synthetic construct
  source 1..2169: mol_type = other DNA
atggccttaccagtgaccgccttgctcctgccgctggccttgctgctccacgccgccaggccggacatcgtgatgacacagagccctgatagcctggccgtgtctctgggagagagagccaccattaactgcaaggccagccagagcgtggactacgacggcgacagcttcctgaactggtatcagcagaagcccggccagcctcctaagctgctgatctacgccgccagcaatctggaaagcggcgtgccaagcagattttccggctctggcagcggcaccgatttcaccctgacaatatccagcctccagcctgaggacgtggccgtgtactactgccagcagagcaacgacgaccctctgacctttggacagggcaccaaggtggaaatcaaactcgaggacctgaagaacgtgttcccacctgaggtggccgtgttcgagcctagcgaggccgagatcagccacacccagaaagccaccctcgtgtgcctggctaccggcttctaccccgaccatgtggaactgtcttggtgggtcaacggcaaagaggtgcacagcggcgtgtctaccgacccccagccactgaaagaacagcccgccctgaacgacagccggtactgcctgagcagcagactgagagtgtccgccaccttctggcagaacccccggaaccacttcagatgccaggtgcagttctacggcctgagcgagaacgacgagtggacccaggacagagccaagcccgtgacccagatcgtgtctgccgaagcctggggcagagccgatgatgtgattaagatccactggcaggaaaagaagtccaacaccatcctgggcagccaggaaggcaacaccatgaagaccaacgacacctacatgaagttcagctggctgaccgtgcccgagaagtccctggacaaagaacacagatgcatcgtgcggcacgaaaacaacaagaacggcgtggaccaggaaatcatcttcccacccatcaagaccgatgtgattacaatggaccccaaggacaactgctccaaggacgccaacgataccctgctgctccagctgaccaacaccagcgcctactacatgtacttgttgctgctgctgaagtccgtggtgtacttcgccatcatcacatgctgcctgctgcggagaaccgccttctgctgcaacggcgagaagtctagggccaagcgatctggatctggagcaacaaacttctcactactcaaacaagcaggtgacgtggaggagaatcccgggcctactagtatggactggatttggcgcatccttttccttgtcggcgctgctaccggcgcgcattccttcgaagaagtccaacttgtggagtctggagggggcctggtgcagcccggcggctctctcagactgtcttgtgcggcaagcggctacaccttcacctcttactggatagaatgggtgaggcaggcacctggaaagggactggagtggattggagagattctgccaggagggggagatacaaattacaatgaaatcttcaaggggcgggccaccttttcagcggataccagcaagaatacagcttacctgcagatgaatagcctccgggcagaagataccgctgtttattattgcacgagacgggtgccaataagactggactattgggggcaagggactcttgtcaccgtcagttcaacgcgtatccagaaccctgatcctgccgtgtaccagctgcgggatagcaagagcagcgacaagagcgtgtgtctgttcaccgacttcgacagccagaccaacgtgtcccagagcaaggactccgacgtgtacatcaccgataagaccgtgctggacatgcggagcatggacttcaagagcaactccgccgtggcctggtccaacaagtccgatttcgcctgcgccaacgccttcaacaacagcattatccccgaggacacattcttcccaagccccgagagcagcgactccaccgaccacgtgaagcccaaagagacagagaacaccaagcagcccagcaagagctgccacaagcccaaggccatcgtgcacaccgagaaagtgaacatgatgagcctgaccgtgctgggcctgcggatgctgttcgccaaaaccgtggccgtgaacttcctgctgaccgccaagctgttcttcctc

SEQ ID NO: 38361 - DNA, 2601 bp, synthetic construct
  source 1..2601: mol_type = other DNA
atggccttaccagtgaccgccttgctcctgccgctggccttgctgctccacgccgccaggccgctcgaggaggacctgaagaacgtgttcccacctgaggtggccgtgttcgagcctagcgaggccgagatcagccacacccagaaagccaccctcgtgtgcctggctaccggcttctaccccgaccatgtggaactgtcttggtgggtcaacggcaaagaggtgcacagcggcgtgtgtaccgacccccagccactgaaagaacagcccgccctgaacgacagccggtactgcctgagcagcagactgagagtgtccgccaccttctggcagaacccccggaaccacttcagatgccaggtgcagttctacggcctgagcgagaacgacgagtggacccaggacagagccaagcccgtgacccagatcgtgtctgccgaagcctggggcagagccgattgcggctttaccagcgagagctaccagcagggcgtgctgagcgccaccaacctgagcgtgatcggcttcagaatcctgctgctgaaagtggccggctttaacctgctgatgaccctgcggctgtggtccagcagggccaagcgatctggatctggagcaacaaacttctcactactcaaacaagcaggtgacgtggaggagaatcccgggcctactagcatggccttaccagtgaccgccttgctcctgccgctggccttgctgctccacgccgccaggccggacatcgtgatgacacagagccctgatagcctggccgtgtctctgggagagagagccaccattaactgcaaggccagccagagcgtggactacgacggcgacagcttcctgaactggtatcagcagaagcccggccagcctcctaagctgctgatctacgccgccagcaatctggaaagcggcgtgccaagcagattttccggctctggcagcggcaccgatttcaccctgacaatatccagcctccagcctgaggacgtggccgtgtactactgccagcagagcaacgacgaccctctgacctttggacagggcaccaaggtggaaatcaaaggcggaggcggaagtggaggcggaggatctggcggcggaggctctgaagtccaacttgtggagtctggagggggcctggtgcagcccggcggctctctcagactgtcttgtgcggcaagcggctacaccttcacctcttactggatagaatgggtgaggcaggcacctggaaagggactggagtggattggagagattctgccaggagggggagatacaaattacaatgaaatcttcaaggggcgggccaccttttcagcggataccagcaagaatacagcttacctgcagatgaatagcctccgggcagaagataccgctgtttattattgcacgagacgggtgccaataagactggactattgggggcaagggactcttgtcaccgtcagttcaacgcgtatccagaaccctgatcctgccgtgtaccagctgcgggatagcaagagcagcgacaagagcgtgtgtctgttcaccgacttcgacagccagaccaacgtgtcccagagcaaggactccgacgtgtacatcaccgataagtgcgtgctggacatgcggagcatggacttcaagagcaactccgccgtggcctggtccaacaagtccgatttcgcctgcgccaacgccttcaacaacagcattatccccgaggacacattcttcccaagccccgagagcagctgcgacgtgaagctggtggaaaagagcttcgagacagacaccaacctgaacttccagatcctgtacgaggtgatcggcttcagaatcctgctgctgaaagtggccggctttaacctgctgatgaccctgcggctgtggtccagccgcgccaagagaagcggatctggcgtgaagcagaccctgaatttcgacctgctgaagctggctggcgacgtggaatccaacccaggcccttctagaggccatatgaccgagtacaagcccacggtgcgcctcgccacccgcgacgacgtccccagggccgtacgcaccctcgccgccgcgttcgccgactaccccgccacgcgccacaccgtcgatccggaccgccacatcgagcgggtcaccgagctgcaagaactcttcctcacgcgcgtcgggctcgacatcggcaaggtgtgggtcgcggacgacggcgccgcggtggcggtctggaccacgccggagagcgtcgaagcgggggcggtgttcgccgagatcggcccgcgcatggccgagttgagcggttcccggctggccgcgcagcaacagatggaaggcctcctggcgccgcaccggcccaaggagcccgcgtggttcctggccaccgtcggcgtctcgcccgaccaccagggcaagggtctgggcagcgccgtcgtgctccccggagtggaggcggccgagcgcgccggggtgcccgccttcctggagacctccgcgccccgcaacctccccttctacgagcggctcggcttcaccgtcaccgccgacgtcgaggtgcccgaaggaccgcgcacctggtgcatgacccgcaagcccggtgcctga

SEQ ID NO: 38362 - DNA, 2601 bp, synthetic construct
  source 1..2601: mol_type = other DNA
atggccttaccagtgaccgccttgctcctgccgctggccttgctgctccacgccgccaggccgctcgagatccagaaccctgatcctgccgtgtaccagctgcgggatagcaagagcagcgacaagagcgtgtgtctgttcaccgacttcgacagccagaccaacgtgtcccagagcaaggactccgacgtgtacatcaccgataagtgcgtgctggacatgcggagcatggacttcaagagcaactccgccgtggcctggtccaacaagtccgatttcgcctgcgccaacgccttcaacaacagcattatccccgaggacacattcttcccaagccccgagagcagctgcgacgtgaagctggtggaaaagagcttcgagacagacaccaacctgaacttccagatcctgtacgaggtgatcggcttcagaatcctgctgctgaaagtggccggctttaacctgctgatgaccctgcggctgtggtccagcagggccaagcgatctggatctggagcaacaaacttctcactactcaaacaagcaggtgacgtggaggagaatcccgggcctactagcatggccttaccagtgaccgccttgctcctgccgctggccttgctgctccacgccgccaggccggacatcgtgatgacacagagccctgatagcctggccgtgtctctgggagagagagccaccattaactgcaaggccagccagagcgtggactacgacggcgacagcttcctgaactggtatcagcagaagcccggccagcctcctaagctgctgatctacgccgccagcaatctggaaagcggcgtgccaagcagattttccggctctggcagcggcaccgatttcaccctgacaatatccagcctccagcctgaggacgtggccgtgtactactgccagcagagcaacgacgaccctctgacctttggacagggcaccaaggtggaaatcaaaggcggaggcggaagtggaggcggaggatctggcggcggaggctctgaagtccaacttgtggagtctggagggggcctggtgcagcccggcggctctctcagactgtcttgtgcggcaagcggctacaccttcacctcttactggatagaatgggtgaggcaggcacctggaaagggactggagtggattggagagattctgccaggagggggagatacaaattacaatgaaatcttcaaggggcgggccaccttttcagcggataccagcaagaatacagcttacctgcagatgaatagcctccgggcagaagataccgctgtttattattgcacgagacgggtgccaataagactggactattgggggcaagggactcttgtcaccgtcagttcaacgcgtgaggacctgaagaacgtgttcccacctgaggtggccgtgttcgagcctagcgaggccgagatcagccacacccagaaagccaccctcgtgtgcctggctaccggcttctaccccgaccatgtggaactgtcttggtgggtcaacggcaaagaggtgcacagcggcgtgtgtaccgacccccagccactgaaagaacagcccgccctgaacgacagccggtactgcctgagcagcagactgagagtgtccgccaccttctggcagaacccccggaaccacttcagatgccaggtgcagttctacggcctgagcgagaacgacgagtggacccaggacagagccaagcccgtgacccagatcgtgtctgccgaagcctggggcagagccgattgcggctttaccagcgagagctaccagcagggcgtgctgagcgccaccaacctgagcgtgatcggcttcagaatcctgctgctgaaagtggccggctttaacctgctgatgaccctgcggctgtggtccagccgcgccaagagaagcggatctggcgtgaagcagaccctgaatttcgacctgctgaagctggctggcgacgtggaatccaacccaggcccttctagaggccatatgaccgagtacaagcccacggtgcgcctcgccacccgcgacgacgtccccagggccgtacgcaccctcgccgccgcgttcgccgactaccccgccacgcgccacaccgtcgatccggaccgccacatcgagcgggtcaccgagctgcaagaactcttcctcacgcgcgtcgggctcgacatcggcaaggtgtgggtcgcggacgacggcgccgcggtggcggtctggaccacgccggagagcgtcgaagcgggggcggtgttcgccgagatcggcccgcgcatggccgagttgagcggttcccggctggccgcgcagcaacagatggaaggcctcctggcgccgcaccggcccaaggagcccgcgtggttcctggccaccgtcggcgtctcgcccgaccaccagggcaagggtctgggcagcgccgtcgtgctccccggagtggaggcggccgagcgcgccggggtgcccgccttcctggagacctccgcgccccgcaacctccccttctacgagcggctcggcttcaccgtcaccgccgacgtcgaggtgcccgaaggaccgcgcacctggtgcatgacccgcaagcccggtgcctga

SEQ ID NO: 38363 - DNA, 2601 bp, synthetic construct; identical to SEQ ID NO: 38361
  source 1..2601: mol_type = other DNA

SEQ ID NO: 38364 - DNA, 2925 bp, synthetic construct
  source 1..2925: mol_type = other DNA
atggccttaccagtgaccgccttgctcctgccgctggccttgctgctccacgccgccaggccgctcgaggaggacctgaagaacgtgttcccacctgaggtggccgtgttcgagcctagcgaggccgagatcagccacacccagaaagccaccctcgtgtgcctggctaccggcttctaccccgaccatgtggaactgtcttggtgggtcaacggcaaagaggtgcacagcggcgtgtctaccgacccccagccactgaaagaacagcccgccctgaacgacagccggtactgcctgagcagcagactgagagtgtccgccaccttctggcagaacccccggaaccacttcagatgccaggtgcagttctacggcctgagcgagaacgacgagtggacccaggacagagccaagcccgtgacccagatcgtgtctgccgaagcctggggcagagccgatgatgtgattaagatccactggcaggaaaagaagtccaacaccatcctgggcagccaggaaggcaacaccatgaagaccaacgacacctacatgaagttcagctggctgaccgtgcccgagaagtccctggacaaagaacacagatgcatcgtgcggcacgaaaacaacaagaacggcgtggaccaggaaatcatcttcccacccatcaagaccgatgtgattacaatggaccccaaggacaactgctccaaggacgccaacgataccctgctgctccagctgaccaacaccagcgcctactacatgtacttgttgctgctgctgaagtccgtggtgtacttcgccatcatcacatgctgcctgctgatggctatggtcaagcggaaggacagccggggaagggccaagcgatctggatctggagcaacaaacttctcactactcaaacaagcaggtgacgtggaggagaatcccgggcctactagcatggccttaccagtgaccgccttgctcctgccgctggccttgctgctccacgccgccaggccggacatcgtgatgacacagagccctgatagcctggccgtgtctctgggagagagagccaccattaactgcaaggccagccagagcgtggactacgacggcgacagcttcctgaactggtatcagcagaagcccggccagcctcctaagctgctgatctacgccgccagcaatctggaaagcggcgtgccaagcagattttccggctctggcagcggcaccgatttcaccctgacaatatccagcctccagcctgaggacgtggccgtgtactactgccagcagagcaacgacgaccctctgacctttggacagggcaccaaggtggaaatcaaaggcggaggcggaagtggaggcggaggatctggcggcggaggctctgaagtccaacttgtggagtctggagggggcctggtgcagcccggcggctctctcagactgtcttgtgcggcaagcggctacaccttcacctcttactggatagaatgggtgaggcaggcacctggaaagggactggagtggattggagagattctgccaggagggggagatacaaattacaatgaaatcttcaaggggcgggccaccttttcagcggataccagcaagaatacagcttacctgcagatgaatagcctccgggcagaagataccgctgtttattattgcacgagacgggtgccaataagactggactattgggggcaagggactcttgtcaccgtcagttcaacgcgtatccagaaccctgatcctgccgtgtaccagctgcgggatagcaagagcagcgacaagagcgtgtgtctgttcaccgacttcgacagccagaccaacgtgtcccagagcaaggactccgacgtgtacatcaccgataagaccgtgctggacatgcggagcatggacttcaagagcaactccgccgtggcctggtccaacaagtccgatttcgcctgcgccaacgccttcaacaacagcattatccccgaggacacattcttcccaagccccgagagcagcgactccaccgaccacgtgaagcccaaagagacagagaacaccaagcagcccagcaagagctgccacaagcccaaggccatcgtgcacaccgagaaagtgaacatgatgagcctgaccgtgctgggcctgcggatgctgttcgccaaaaccgtggccgtgaacttcctgctgaccgccaagctgttcttcctcctcaccgcccgcgccaagagaagcggatctggcgtgaagcagaccctgaatttcgacctgctgaagctggctggcgacgtggaatccaacccaggcccttctagaggccatatgaccgagtacaagcccacggtgcgcctcgccacccgcgacgacgtccccagggccgtacgcaccctcgccgccgcgttcgccgactaccccgccacgcgccacaccgtcgatccggaccgccacatcgagcgggtcaccgagctgcaagaactcttcctcacgcgcgtcgggctcgacatcggcaaggtgtgggtcgcggacgacggcgccgcggtggcggtctggaccacgccggagagcgtcgaagcgggggcggtgttcgccgagatcggcccgcgcatggccgagttgagcggttcccggctggccgcgcagcaacagatggaaggcctcctggcgccgcaccggcccaaggagcccgcgtggttcctggccaccgtcggcgtctcgcccgaccaccagggcaagggtctgggcagcgccgtcgtgctccccggagtggaggcggccgagcgcgccggggtgcccgccttcctggagacctccgcgccccgcaacctccccttctacgagcggctcggcttcaccgtcaccgccgacgtcgaggtgcccgaaggaccgcgcacctggtgcatgacccgcaagcccggtgcctga

SEQ ID NO: 38365 - DNA, 2925 bp, synthetic construct
  source 1..2925: mol_type = other DNA
atggccttaccagtgaccgccttgctcctgccgctggccttgctgctccacgccgccaggccgctcgagatccagaaccctgatcctgccgtgtaccagctgcgggatagcaagagcagcgacaagagcgtgtgtctgttcaccgacttcgacagccagaccaacgtgtcccagagcaaggactccgacgtgtacatcaccgataagaccgtgctggacatgcggagcatggacttcaagagcaactccgccgtggcctggtccaacaagtccgatttcgcctgcgccaacgccttcaacaacagcattatccccgaggacacattcttcccaagccccgagagcagcgactccaccgaccacgtgaagcccaaagagacagagaacaccaagcagcccagcaagagctgccacaagcccaaggccatcgtgcacaccgagaaagtgaacatgatgagcctgaccgtgctgggcctgcggatgctgttcgccaaaaccgtggccgtgaacttcctgctgaccgccaagctgttcttcctcctcaccgccagggccaagcgatctggatctggagcaacaaacttctcactactcaaacaagcaggtgacgtggaggagaatcccgggcctactagcatggccttaccagtgaccgccttgctcctgccgctggccttgctgctccacgccgccaggccggacatcgtgatgacacagagccctgatagcctggccgtgtctctgggagagagagccaccattaactgcaaggccagccagagcgtggactacgacggcgacagcttcctgaactggtatcagcagaagcccggccagcctcctaagctgctgatctacgccgccagcaatctggaaagcggcgtgccaagcagattttccggctctggcagcggcaccgatttcaccctgacaatatccagcctccagcctgaggacgtggccgtgtactactgccagcagagcaacgacgaccctctgacctttggacagggcaccaaggtggaaatcaaaggcggaggcggaagtggaggcggaggatctggcggcggaggctctgaagtccaacttgtggagtctggagggggcctggtgcagcccggcggctctctcagactgtcttgtgcggcaagcggctacaccttcacctcttactggatagaatgggtgaggcaggcacctggaaagggactggagtggattggagagattctgccaggagggggagatacaaattacaatgaaatcttcaaggggcgggccaccttttcagcggataccagcaagaatacagcttacctgcagatgaatagcctccgggcagaagataccgctgtttattattgcacgagacgggtgccaataagactggactattgggggcaagggactcttgtcaccgtcagttcaacgcgtgaggacctgaagaacgtgttcccacctgaggtggccgtgttcgagcctagcgaggccgagatcagccacacccagaaagccaccctcgtgtgcctggctaccggcttctaccccgaccatgtggaactgtcttggtgggtcaacggcaaagaggtgcacagcggcgtgtctaccgacccccagccactgaaagaacagcccgccctgaacgacagccggtactgcctgagcagcagactgagagtgtccgccaccttctggcagaacccccggaaccacttcagatgccaggtgcagttctacggcctgagcgagaacgacgagtggacccaggacagagccaagcccgtgacccagatcgtgtctgccgaagcctggggcagagccgatgatgtgattaagatccactggcaggaaaagaagtccaacaccatcctgggcagccaggaaggcaacaccatgaagaccaacgacacctacatgaagttcagctggctgaccgtgcccgagaagtccctggacaaagaacacagatgcatcgtgcggcacgaaaacaacaagaacggcgtggaccaggaaatcatcttcccacccatcaagaccgatgtgattacaatggaccccaaggacaactgctccaaggacgccaacgataccctgctgctccagctgaccaacaccagcgcctactacatgtacttgttgctgctgctgaagtccgtggtgtacttcgccatcatcacatgctgcctgctgatggctatggtcaagcggaaggacagccggggacgcgccaagagaagcggatctggcgtgaagcagaccctgaatttcgacctgctgaagctggctggcgacgtggaatccaacccaggcccttctagaggccatatgaccgagtacaagcccacggtgcgcctcgccacccgcgacgacgtccccagggccgtacgcaccctcgccgccgcgttcgccgactaccccgccacgcgccacaccgtcgatccggaccgccacatcgagcgggtcaccgagctgcaagaactcttcctcacgcgcgtcgggctcgacatcggcaaggtgtgggtcgcggacgacggcgccgcggtggcggtctggaccacgccggagagcgtcgaagcgggggcggtgttcgccgagatcggcccgcgcatggccgagttgagcggttcccggctggccgcgcagcaacagatggaaggcctcctggcgccgcaccggcccaaggagcccgcgtggttcctggccaccgtcggcgtctcgcccgaccaccagggcaagggtctgggcagcgccgtcgtgctccccggagtggaggcggccgagcgcgccggggtgcccgccttcctggagacctccgcgccccgcaacctccccttctacgagcggctcggcttcaccgtcaccgccgacgtcgaggtgcccgaaggaccgcgcacctggtgcatgacccgcaagcccggtgcctga

SEQ ID NO: 38366 - DNA, 2919 bp, synthetic construct
  source 1..2919: mol_type = other DNA
atggccttaccagtgaccgccttgctcctgccgctggccttgctgctccacgccgccaggccgctcgaggaggacctgaagaacgtgttcccacctgaggtggccgtgttcgagcctagcgaggccgagatcagccacacccagaaagccaccctcgtgtgcctggctaccggcttctaccccgaccatgtggaactgtcttggtgggtcaacggcaaagaggtgcacagcggcgtgtgtaccgacccccagccactgaaagaacagcccgccctgaacgacagccggtactgcctgagcagcagactgagagtgtccgccaccttctggcagaacccccggaaccacttcagatgccaggtgcagttctacggcctgagcgagaacgacgagtggacccaggacagagccaagcccgtgacccagatcgtgtctgccgaagcctggggcagagccgatgatgtgattaagatccactggcaggaaaagaagtccaacaccatcctgggcagccaggaaggcaacaccatgaagaccaacgacacctacatgaagttcagctggctgaccgtgcccgagaagtccctggacaaagaacacagatgcatcgtgcggcacgaaaacaacaagaacggcgtggaccaggaaatcatcttcccacccatcaagaccgatgtgattacaatggaccccaaggacaactgctccaaggacgccaacgataccctgctgctccagctgaccaacaccagcgcctactacatgtacttgttgctgctgctgaagtccgtggtgtacttcgccatcatcacatgctgcctgctgcggagaaccgccttctgctgcaacggcgagaagtctagggccaagcgatctggatctggagcaacaaacttctcactactcaaacaagcaggtgacgtggaggagaatcccgggcctactagcatggccttaccagtgaccgccttgctcctgccgctggccttgctgctccacgccgccaggccggacatcgtgatgacacagagccctgatagcctggccgtgtctctgggagagagagccaccattaactgcaaggccagccagagcgtggactacgacggcgacagcttcctgaactggtatcagcagaagcccggccagcctcctaagctgctgatctacgccgccagcaatctggaaagcggcgtgccaagcagattttccggctctggcagcggcaccgatttcaccctgacaatatccagcctccagcctgaggacgtggccgtgtactactgccagcagagcaacgacgaccctctgacctttggacagggcaccaaggtggaaatcaaaggcggaggcggaagtggaggcggaggatctggcggcggaggctctgaagtccaacttgtggagtctggagggggcctggtgcagcccggcggctctctcagactgtcttgtgcggcaagcggctacaccttcacctcttactggatagaatgggtgaggcaggcacctggaaagggactggagtggattggagagattctgccaggagggggagatacaaattacaatgaaatcttcaaggggcgggccaccttttcagcggataccagcaagaatacagcttacctgcagatgaatagcctccgggcagaagataccgctgtttattattgcacgagacgggtgccaataagactggactattgggggcaagggactcttgtcaccgtcagttcaacgcgtatccagaaccctgatcctgccgtgtaccagctgcgggatagcaagagcagcgacaagagcgtgtgtctgttcaccgacttcgacagccagaccaacgtgtcccagagcaaggactccgacgtgtacatcaccgataagtgcgtgctggacatgcggagcatggacttcaagagcaactccgccgtggcctggtccaacaagtccgatttcgcctgcgccaacgccttcaacaacagcattatccccgaggacacattcttcccaagccccgagagcagcgactccaccgaccacgtgaagcccaaagagacagagaacaccaagcagcccagcaagagctgccacaagcccaaggccatcgtgcacaccgagaaagtgaacatgatgagcctgaccgtgctgggcctgcggatgctgttcgccaaaaccgtggccgtgaacttcctgctgaccgccaagctgttcttcctccgcgccaagagaagcggatctggcgtgaagcagaccctgaatttcgacctgctgaagctggctggcgacgtggaatccaacccaggcccttctagaggccatatgaccgagtacaagcccacggtgcgcctcgccacccgcgacgacgtccccagggccgtacgcaccctcgccgccgcgttcgccgactaccccgccacgcgccacaccgtcgatccggaccgccacatcgagcgggtcaccgagctgcaagaactcttcctcacgcgcgtcgggctcgacatcggcaaggtgtgggtcgcggacgacggcgccgcggtggcggtctggaccacgccggagagcgtcgaagcgggggcggtgttcgccgagatcggcccgcgcatggccgagttgagcggttcccggctggccgcgcagcaacagatggaaggcctcctggcgccgcaccggcccaaggagcccgcgtggttcctggccaccgtcggcgtctcgcccgaccaccagggcaagggtctgggcagcgccgtcgtgctccccggagtggaggcggccgagcgcgccggggtgcccgccttcctggagacctccgcgccccgcaacctccccttctacgagcggctcggcttcaccgtcaccgccgacgtcgaggtgcccgaaggaccgcgcacctggtgcatgacccgcaagcccggtgcctga

SEQ ID NO: 38367 - DNA, 2919 bp, synthetic construct
  source 1..2919: mol_type = other DNA
atggccttaccagtgaccgccttgctcctgccgctggccttgctgctccacgccgccaggccgctcgagatccagaaccctgatcctgccgtgtaccagctgcgggatagcaagagcagcgacaagagcgtgtgtctgttcaccgacttcgacagccagaccaacgtgtcccagagcaaggactccgacgtgtacatcaccgataagtgcgtgctggacatgcggagcatggacttcaagagcaactccgccgtggcctggtccaacaagtccgatttcgcctgcgccaacgccttcaacaacagcattatccccgaggacacattcttcccaagccccgagagcagcgactccaccgaccacgtgaagcccaaagagacagagaacaccaagcagcccagcaagagctgccacaagcccaaggccatcgtgcacaccgagaaagtgaacatgatgagcctgaccgtgctgggcctgcggatgctgttcgccaaaaccgtggccgtgaacttcctgctgaccgccaagctgttcttcctcagggccaagcgatctggatctggagcaacaaacttctcactactcaaacaagcaggtgacgtggaggagaatcccgggcctactagcatggccttaccagtgaccgccttgctcctgccgctggccttgctgctccacgccgccaggccggacatcgtgatgacacagagccctgatagcctggccgtgtctctgggagagagagccaccattaactgcaaggccagccagagcgtggactacgacggcgacagcttcctgaactggtatcagcagaagcccggccagcctcctaagctgctgatctacgccgccagcaatctggaaagcggcgtgccaagcagattttccggctctggcagcggcaccgatttcaccctgacaatatccagcctccagcctgaggacgtggccgtgtactactgccagcagagcaacgacgaccctctgacctttggacagggcaccaaggtggaaatcaaaggcggaggcggaagtggaggcggaggatctggcggcggaggctctgaagtccaacttgtggagtctggagggggcctggtgcagcccggcggctctctcagactgtcttgtgcggcaagcggctacaccttcacctcttactggatagaatgggtgaggcaggcacctggaaagggactggagtggattggagagattctgccaggagggggagatacaaattacaatgaaatcttcaaggggcgggccaccttttcagcggataccagcaagaatacagcttacctgcagatgaatagcctccgggcagaagataccgctgtttattattgcacgagacgggtgccaataagactggactattgggggcaagggactcttgtcaccgtcagttcaacgcgtgaggacctgaagaacgtgttcccacctgaggtggccgtgttcgagcctagcgaggccgagatcagccacacccagaaagccaccctcgtgtgcctggctaccggcttctaccccgaccatgtggaactgtcttggtgggtcaacggcaaagaggtgcacagcggcgtgtgtaccgacccccagccactgaaagaacagcccgccctgaacgacagccggtactgcctgagcagcagactgagagtgtccgccaccttctggcagaacccccggaaccacttcagatgccaggtgcagttctacggcctgagcgagaacgacgagtggacccaggacagagccaagcccgtgacccagatcgtgtctgccgaagcctggggcagagccgatgatgtgattaagatccactggcaggaaaagaagtccaacaccatcctgggcagccaggaaggcaacaccatgaagaccaacgacacctacatgaagttcagctggctgaccgtgcccgagaagtccctggacaaagaacacagatgcatcgtgcggcacgaaaacaacaagaacggcgtggaccaggaaatcatcttcccacccatcaagaccgatgtgattacaatggaccccaaggacaactgctccaaggacgccaacgataccctgctgctccagctgaccaacaccagcgcctactacatgtacttgttgctgctgctgaagtccgtggtgtacttcgccatcatcacatgctgcctgctgcggagaaccgccttctgctgcaacggcgagaagtctcgcgccaagagaagcggatctggcgtgaagcagaccctgaatttcgacctgctgaagctggctggcgacgtggaatccaacccaggcccttctagaggccatatgaccgagtacaagcccacggtgcgcctcgccacccgcgacgacgtccccagggccgtacgcaccctcgccgccgcgttcgccgactaccccgccacgcgccacaccgtcgatccggaccgccacatcgagcgggtcaccgagctgcaagaactcttcctcacgcgcgtcgggctcgacatcggcaaggtgtgggtcgcggacgacggcgccgcggtggcggtctggaccacgccggagagcgtcgaagcgggggcggtgttcgccgagatcggcccgcgcatggccgagttgagcggttcccggctggccgcgcagcaacagatggaaggcctcctggcgccgcaccggcccaaggagcccgcgtggttcctggccaccgtcggcgtctcgcccgaccaccagggcaagggtctgggcagcgccgtcgtgctccccggagtggaggcggccgagcgcgccggggtgcccgccttcctggagacctccgcgccccgcaacctccccttctacgagcggctcggcttcaccgtcaccgccgacgtcgaggtgcccgaaggaccgcgcacctggtgcatgacccgcaagcccggtgcctga

SEQ ID NO: 38368 - DNA, 2919 bp, synthetic construct
  source 1..2919: mol_type = other DNA
atggccttaccagtgaccgccttgctcctgccgctggccttgctgctccacgccgccaggccgctcgaggaggacctgaagaacgtgttcccacctgaggtggccgtgttcgagcctagcgaggccgagatcagccacacccagaaagccaccctcgtgtgcctggctaccggcttctaccccgaccatgtggaactgtcttggtgggtcaacggcaaagaggtgcacagcggcgtgtctaccgacccccagccactgaaagaacagcccgccctgaacgacagccggtactgcctgagcagcagactgagagtgtccgccaccttctggcagaacccccggaaccacttcagatgccaggtgcagttctacggcctgagcgagaacgacgagtggacccaggacagagccaagcccgtgacccagatcgtgtctgccgaagcctggggcagagccgatgatgtgattaagatccactggcaggaaaagaagtccaacaccatcctgggcagccaggaaggcaacaccatgaagaccaacgacacctacatgaagttcagctggctgaccgtgcccgagaagtccctggacaaagaacacagatgcatcgtgcggcacgaaaacaacaagaacggcgtggaccaggaaatcatcttcccacccatcaagaccgatgtgattacaatggaccccaaggacaactgctccaaggacgccaacgataccctgctgctccagctgaccaacaccagcgcctactacatgtacttgttgctgctgctgaagtccgtggtgtacttcgccatcatcacatgctgcctgctgcggagaaccgccttctgctgcaacggcgagaagtctagggccaagcgatctggatctggagcaacaaacttctcactactcaaacaagcaggtgacgtggaggagaatcccgggcctactagcatggccttaccagtgaccgccttgctcctgccgctggccttgctgctccacgccgccaggccggacatcgtgatgacacagagccctgatagcctggccgtgtctctgggagagagagccaccattaactgcaaggccagccagagcgtggactacgacggcgacagcttcctgaactggtatcagcagaagcccggccagcctcctaagctgctgatctacgccgccagcaatctggaaagcggcgtgccaagcagattttccggctctggcagcggcaccgatttcaccctgacaatatccagcctccagcctgaggacgtggccgtgtactactgccagcagagcaacgacgaccctctgacctttggacagggcaccaaggtggaaatcaaaggcggaggcggaagtggaggcggaggatctggcggcggaggctctgaagtccaacttgtggagtctggagggggcctggtgcagcccggcggctctctcagactgtcttgtgcggcaagcggctacaccttcacctcttactggatagaatgggtgaggcaggcacctggaaagggactggagtggattggagagattctgccaggagggggagatacaaattacaatgaaatcttcaaggggcgggccaccttttcagcggataccagcaagaatacagcttacctgcagatgaatagcctccgggcagaagataccgctgtttattattgcacgagacgggtgccaataagactggactattgggggcaagggactcttgtcaccgtcagttcaacgcgtatccagaaccctgatcctgccgtgtaccagctgcgggatagcaagagcagcgacaagagcgtgtgtctgttcaccgacttcgacagccagaccaacgtgtcccagagcaaggactccgacgtgtacatcaccgataagaccgtgctggacatgcggagcatggacttcaagagcaactccgccgtggcctggtccaacaagtccgatttcgcctgcgccaacgccttcaacaacagcattatccccgaggacacattcttcccaagccccgagagcagcgactccaccgaccacgtgaagcccaaagagacagagaacaccaagcagcccagcaagagctgccacaagcccaaggccatcgtgcacaccgagaaagtgaacatgatgagcctgaccgtgctgggcctgcggatgctgttcgccaaaaccgtggccgtgaacttcctgctgaccgccaagctgttcttcctccgcgccaagagaagcggatctggcgtgaagcagaccctgaatttcgacctgctgaagctggctggcgacgtggaatccaacccaggcccttctagaggccatatgaccgagtacaagcccacggtgcgcctcgccacccgcgacgacgtccccagggccgtacgcaccctcgccgccgcgttcgccgactaccccgccacgcgccacaccgtcgatccggaccgccacatcgagcgggtcaccgagctgcaagaactcttcctcacgcgcgtcgggctcgacatcggcaaggtgtgggtcgcggacgacggcgccgcggtggcggtctggaccacgccggagagcgtcgaagcgggggcggtgttcgccgagatcggcccgcgcatggccgagttgagcggttcccggctggccgcgcagcaacagatggaaggcctcctggcgccgcaccggcccaaggagcccgcgtggttcctggccaccgtcggcgtctcgcccgaccaccagggcaagggtctgggcagcgccgtcgtgctccccggagtggaggcggccgagcgcgccggggtgcccgccttcctggagacctccgcgccccgcaacctccccttctacgagcggctcggcttcaccgtcaccgccgacgtcgaggtgcccgaaggaccgcgcacctggtgcatgacccgcaagcccggtgcctga

SEQ ID NO: 38369 - DNA, 2919 bp, synthetic construct
  source 1..2919: mol_type = other DNA
atggccttaccagtgaccgccttgctcctgccgctggccttgctgctccacgccgccaggccgctcgagatccagaaccctgatcctgccgtgtaccagctgcgggatagcaagagcagcgacaagagcgtgtgtctgttcaccgacttcgacagccagaccaacgtgtcccagagcaaggactccgacgtgtacatcaccgataagaccgtgctggacatgcggagcatggacttcaagagcaactccgccgtggcctggtccaacaagtccgatttcgcctgcgccaacgccttcaacaacagcattatccccgaggacacattcttcccaagccccgagagcagcgactccaccgaccacgtgaagcccaaagagacagagaacaccaagcagcccagcaagagctgccacaagcccaaggccatcgtgcacaccgagaaagtgaacatgatgagcctgaccgtgctgggcctgcggatgctgttcgccaaaaccgtggccgtgaacttcctgctgaccgccaagctgttcttcctcagggccaagcgatctggatctggagcaacaaacttctcactactcaaacaagcaggtgacgtggaggagaatcccgggcctactagcatggccttaccagtgaccgccttgctcctgccgctggccttgctgctccacgccgccaggccggacatcgtgatgacacagagccctgatagcctggccgtgtctctgggagagagagccaccattaactgcaaggccagccagagcgtggactacgacggcgacagcttcctgaactggtatcagcagaagcccggccagcctcctaagctgctgatctacgccgccagcaatctggaaagcggcgtgccaagcagattttccggctctggcagcggcaccgatttcaccctgacaatatccagcctccagcctgaggacgtggccgtgtactactgccagcagagcaacgacgaccctctgacctttggacagggcaccaaggtggaaatcaaaggcggaggcggaagtggaggcggaggatctggcggcggaggctctgaagtccaacttgtggagtctggagggggcctggtgcagcccggcggctctctcagactgtcttgtgcggcaagcggctacaccttcacctcttactggatagaatgggtgaggcaggcacctggaaagggactggagtggattggagagattctgccaggagggggagatacaaattacaatgaaatcttcaaggggcgggccaccttttcagcggataccagcaagaatacagcttacctgcagatgaatagcctccgggcagaagataccgctgtttattattgcacgagacgggtgccaataagactggactattgggggcaagggactcttgtcaccgtcagttcaacgcgtgaggacctgaagaacgtgttcccacctgaggtggccgtgttcgagcctagcgaggccgagatcagccacacccagaaagccaccctcgtgtgcctggctaccggcttctaccccgaccatgtggaactgtcttggtgggtcaacggcaaagaggtgcacagcggcgtgtctaccgacccccagccactgaaagaacagcccgccctgaacgacagccggtactgcctgagcagcagactgagagtgtccgccaccttctggcagaacccccggaaccacttcagatgccaggtgcagttctacggcctgagcgagaacgacgagtggacccaggacagagccaagcccgtgacccagatcgtgtctgccgaagcctggggcagagccgatgatgtgattaagatccactggcaggaaaagaagtccaacaccatcctgggcagccaggaaggcaacaccatgaagaccaacgacacctacatgaagttcagctggctgaccgtgcccgagaagtccctggacaaagaacacagatgcatcgtgcggcacgaaaacaacaagaacggcgtggaccaggaaatcatcttcccacccatcaagaccgatgtgattacaatggaccccaaggacaactgctccaaggacgccaacgataccctgctgctccagctgaccaacaccagcgcctactacatgtacttgttgctgctgctgaagtccgtggtgtacttcgccatcatcacatgctgcctgctgcggagaaccgccttctgctgcaacggcgagaagtctcgcgccaagagaagcggatctggcgtgaagcagaccctgaatttcgacctgctgaagctggctggcgacgtggaatccaacccaggcccttctagaggccatatgaccgagtacaagcccacggtgcgcctcgccacccgcgacgacgtccccagggccgtacgcaccctcgccgccgcgttcgccgactaccccgccacgcgccacaccgtcgatccggaccgccacatcgagcgggtcaccgagctgcaagaactcttcctcacgcgcgtcgggctcgacatcggcaaggtgtgggtcgcggacgacggcgccgcggtggcggtctggaccacgccggagagcgtcgaagcgggggcggtgttcgccgagatcggcccgcgcatggccgagttgagcggttcccggctggccgcgcagcaacagatggaaggcctcctggcgccgcaccggcccaaggagcccgcgtggttcctggccaccgtcggcgtctcgcccgaccaccagggcaagggtctgggcagcgccgtcgtgctccccggagtggaggcggccgagcgcgccggggtgcccgccttcctggagacctccgcgccccgcaacctccccttctacgagcggctcggcttcaccgtcaccgccgacgtcgaggtgcccgaaggaccgcgcacctggtgcatgacccgcaagcccggtgcctga

SEQ ID NO: 38370 - DNA, 2613 bp, synthetic construct
  source 1..2613: mol_type = other DNA
atggccttaccagtgaccgccttgctcctgccgctggccttgctgctccacgccgccaggccgctcgaggaggacctgaagaacgtgttcccacctgaggtggccgtgttcgagcctagcaaggccgagatcgcccacacccagaaagccaccctcgtgtgcctggctaccggcttctaccccgaccatgtggaactgtcttggtgggtcaacggcaaagaggtgcacagcggcgtgtgtaccgacccccagccactgaaagaacagcccgccctgaacgacagccggtactgcctgagcagcagactgagagtgtccgccaccttctggcagaacccccggaaccacttcagatgccaggtgcagttctacggcctgagcgagaacgacgagtggacccaggacagagccaagcccgtgacccagatcgtgtctgccgaagcctggggcagagccgattgcggcatcaccagcgccagctaccaccagggcgtgctgagcgccaccatcctgtacgagatcctgctgggcaaggccaccctgtacgccgtgctggtgtctgccctggtgctgatggctatggtcaagcggaaggacagccggggaagggccaagcgatctggatctggagcaacaaacttctcactactcaaacaagcaggtgacgtggaggagaatcccgggcctactagcatggccttaccagtgaccgccttgctcctgccgctggccttgctgctccacgccgccaggccggacatcgtgatgacacagagccctgatagcctggccgtgtctctgggagagagagccaccattaactgcaaggccagccagagcgtggactacgacggcgacagcttcctgaactggtatcagcagaagcccggccagcctcctaagctgctgatctacgccgccagcaatctggaaagcggcgtgccaagcagattttccggctctggcagcggcaccgatttcaccctgacaatatccagcctccagcctgaggacgtggccgtgtactactgccagcagagcaacgacgaccctctgacctttggacagggcaccaaggtggaaatcaaaggcggaggcggaagtggaggcggaggatctggcggcggaggctctgaagtccaacttgtggagtctggagggggcctggtgcagcccggcggctctctcagactgtcttgtgcggcaagcggctacaccttcacctcttactggatagaatgggtgaggcaggcacctggaaagggactggagtggattggagagattctgccaggagggggagatacaaattacaatgaaatcttcaaggggcgggccaccttttcagcggataccagcaagaatacagcttacctgcagatgaatagcctccgggcagaagataccgctgtttattattgcacgagacgggtgccaataagactggactattgggggcaagggactcttgtcaccgtcagttcaacgcgtatccagaaccctgatcctgccgtgtaccagctgcgggatagcaagagcagcgacaagagcgtgtgtctgttcaccgacttcgacagccagaccaacgtgtcccagagcaaggactccgacgtgtacatcaccgataagtgcgtgctggacatgcggagcatggacttcaagagcaactccgccgtggcctggtccaacaagtccgatttcgcctgcgccaacgccttcaacaacagcattatccccgaggacacattcttcccaagcagcgacgtgccctgcgacgtgaagctggtggaaaagagcttcgagacagacaccaacctgaacttccagaacctgagcgtgatcggcttcagaatcctgctgctgaaagtggccggctttaacctgctgatgaccctgcggctgtggtccagccgcgccaagagaagcggatctggcgtgaagcagaccctgaatttcgacctgctgaagctggctggcgacgtggaatccaacccaggcccttctagaggccatatgaccgagtacaagcccacggtgcgcctcgccacccgcgacgacgtccccagggccgtacgcaccctcgccgccgcgttcgccgactaccccgccacgcgccacaccgtcgatccggaccgccacatcgagcgggtcaccgagctgcaagaactcttcctcacgcgcgtcgggctcgacatcggcaaggtgtgggtcgcggacgacggcgccgcggtggcggtctggaccacgccggagagcgtcgaagcgggggcggtgttcgccgagatcggcccgcgcatggccgagttgagcggttcccggctggccgcgcagcaacagatggaaggcctcctggcgccgcaccggcccaaggagcccgcgtggttcctggccaccgtcggcgtctcgcccgaccaccagggcaagggtctgggcagcgccgtcgtgctccccggagtggaggcggccgagcgcgccggggtgcccgccttcctggagacctccgcgccccgcaacctccccttctacgagcggctcggcttcaccgtcaccgccgacgtcgaggtgcccgaaggaccgcgcacctggtgcatgacccgcaagcccggtgcctga

SEQ ID NO: 38371 - DNA, 2613 bp, synthetic construct
  source 1..2613: mol_type = other DNA
atggccttaccagtgaccgccttgctcctgccgctggccttgctgctccacgccgccaggccgctcgagatccagaaccctgatcctgccgtgtaccagctgcgggatagcaagagcagcgacaagagcgtgtgtctgttcaccgacttcgacagccagaccaacgtgtcccagagcaaggactccgacgtgtacatcaccgataagtgcgtgctggacatgcggagcatggacttcaagagcaactccgccgtggcctggtccaacaagtccgatttcgcctgcgccaacgccttcaacaacagcattatccccgaggacacattcttcccaagcagcgacgtgccctgcgacgtgaagctggtggaaaagagcttcgagacagacaccaacctgaacttccagaacctgagcgtgatcggcttcagaatcctgctgctgaaagtggccggctttaacctgctgatgaccctgcggctgtggtccagcagggccaagcgatctggatctggagcaacaaacttctcactactcaaacaagcaggtgacgtggaggagaatcccgggcctactagcatggccttaccagtgaccgccttgctcctgccgctggccttgctgctccacgccgccaggccggacatcgtgatgacacagagccctgatagcctggccgtgtctctgggagagagagccaccattaactgcaaggccagccagagcgtggactacgacggcgacagcttcctgaactggtatcagcagaagcccggccagcctcctaagctgctgatctacgccgccagcaatctggaaagcggcgtgccaagcagattttccggctctggcagcggcaccgatttcaccctgacaatatccagcctccagcctgaggacgtggccgtgtactactgccagcagagcaacgacgaccctctgacctttggacagggcaccaaggtggaaatcaaaggcggaggcggaagtggaggcggaggatctggcggcggaggctctgaagtccaacttgtggagtctggagggggcctggtgcagcccggcggctctctcagactgtcttgtgcggcaagcggctacaccttcacctcttactggatagaatgggtgaggcaggcacctggaaagggactggagtggattggagagattctgccaggagggggagatacaaattacaatgaaatcttcaaggggcgggccaccttttcagcggataccagcaagaatacagcttacctgcagatgaatagcctccgggcagaagataccgctgtttattattgcacgagacgggtgccaataagactggactattgggggcaagggactcttgtcaccgtcagttcaacgcgtgaggacctgaagaacgtgttcccacctgaggtggccgtgttcgagcctagcaaggccgagatcgcccacacccagaaagccaccctcgtgtgcctggctaccggcttctaccccgaccatgtggaactgtcttggtgggtcaacggcaaagaggtgcacagcggcgtgtgtaccgacccccagccactgaaagaacagcccgccctgaacgacagccggtactgcctgagcagcagactgagagtgtccgccaccttctggcagaacccccggaaccacttcagatgccaggtgcagttctacggcctgagcgagaacgacgagtggacccaggacagagccaagcccgtgacccagatcgtgtctgccgaagcctggggcagagccgattgcggcatcaccagcgccagctaccaccagggcgtgctgagcgccaccatcctgtacgagatcctgctgggcaaggccaccctgtacgccgtgctggtgtctgccctggtgctgatggctatggtcaagcggaaggacagccggggacgcgccaagagaagcggatctggcgtgaagcagaccctgaatttcgacctgctgaagctggctggcgacgtggaatccaacccaggcccttctagaggccatatgaccgagtacaagcccacggtgcgcctcgccacccgcgacgacgtccccagggccgtacgcaccctcgccgccgcgttcgccgactaccccgccacgcgccacaccgtcgatccggaccgccacatcgagcgggtcaccgagctgcaagaactcttcctcacgcgcgtcgggctcgacatcggcaaggtgtgggtcgcggacgacggcgccgcggtggcggtctggaccacgccggagagcgtcgaagcgggggcggtgttcgccgagatcggcccgcgcatggccgagttgagcggttcccggctggccgcgcagcaacagatggaaggcctcctggcgccgcaccggcccaaggagcccgcgtggttcctggccaccgtcggcgtctcgcccgaccaccagggcaagggtctgggcagcgccgtcgtgctccccggagtggaggcggccgagcgcgccggggtgcccgccttcctggagacctccgcgccccgcaacctccccttctacgagcggctcggcttcaccgtcaccgccgacgtcgaggtgcccgaaggaccgcgcacctggtgcatgacccgcaagcccggtgcctga

SEQ ID NO: 38372 - DNA, 2292 bp, synthetic construct
  source 1..2292: mol_type = other DNA
atggccttaccagtgaccgccttgctcctgccgctggccttgctgctccacgccgccaggccgctcgagcagagttttgggttgttggaccctaaattgtgctatctgttggacggaatcctgttcatttacggagtgatcctgaccgcattgttcctgcgggttaagttttccagatccgcagacgcacccgcttaccaacaagggcagaaccaactctacaatgaacttaatttggggcggagggaagagtacgacgttctggacaaaaggaggggacgagatcccgagatgggcggaaagcctcagcgaaggaagaatccgcaagaggggctttataacgaactccagaaagataaaatggcagaagcctatagtgagattgggatgaagggagaaaggaggaggggtaaaggtcacgatgggttgtaccaaggattgagcacagccactaaagatacctatgatgcgctccacatgcaggccctgccgccaagaagggccaagcgatctggatctggagcaacaaacttctcactactcaaacaagcaggtgacgtggaggagaatcccgggcctactagcatggccttaccagtgaccgccttgctcctgccgctggccttgctgctccacgccgccaggccggacatcgtgatgacacagagccctgatagcctggccgtgtctctgggagagagagccaccattaactgcaaggccagccagagcgtggactacgacggcgacagcttcctgaactggtatcagcagaagcccggccagcctcctaagctgctgatctacgccgccagcaatctggaaagcggcgtgccaagcagattttccggctctggcagcggcaccgatttcaccctgacaatatccagcctccagcctgaggacgtggccgtgtactactgccagcagagcaacgacgaccctctgacctttggacagggcaccaaggtggaaatcaaaggcggaggcggaagtggaggcggaggatctggcggcggaggctctgaagtccaacttgtggagtctggagggggcctggtgcagcccggcggctctctcagactgtcttgtgcggcaagcggctacaccttcacctcttactggatagaatgggtgaggcaggcacctggaaagggactggagtggattggagagattctgccaggagggggagatacaaattacaatgaaatcttcaaggggcgggccaccttttcagcggataccagcaagaatacagcttacctgcagatgaatagcctccgggcagaagataccgctgtttattattgcacgagacgggtgccaataagactggactattgggggcaagggactcttgtcaccgtcagttcaacgcgtgagctgggagagcctcagctgtgctatatcctggacgccatcctgtttctgtacggcatcgtgctgaccctgctgtactgccggctgaagatccaagtgcggaaggccgccatcaccagctacgagaaatccgacggcgtgtacaccggcctgagcaccagaaatcaagagacatacgagacactgaagcacgaaaagcctccacaacgcgccaagagaagcggatctggcgtgaagcagaccctgaatttcgacctgctgaagctggctggcgacgtggaatccaacccaggcccttctagaggccatatgaccgagtacaagcccacggtgcgcctcgccacccgcgacgacgtccccagggccgtacgcaccctcgccgccgcgttcgccgactaccccgccacgcgccacaccgtcgatccggaccgccacatcgagcgggtcaccgagctgcaagaactcttcctcacgcgcgtcgggctcgacatcggcaaggtgtgggtcgcggacgacggcgccgcggtggcggtctggaccacgccggagagcgtcgaagcgggggcggtgttcgccgagatcggcccgcgcatggccgagttgagcggttcccggctggccgcgcagcaacagatggaaggcctcctggcgccgcaccggcccaaggagcccgcgtggttcctggccaccgtcggcgtctcgcccgaccaccagggcaagggtctgggcagcgccgtcgtgctccccggagtggaggcggccgagcgcgccggggtgcccgccttcctggagacctccgcgccccgcaacctccccttctacgagcggctcggcttcaccgtcaccgccgacgtcgaggtgcccgaaggaccgcgcacctggtgcatgacccgcaagcccggtgcctga

SEQ ID NO: 38373 - DNA, 2925 bp, synthetic construct; identical to SEQ ID NO: 38364
  source 1..2925: mol_type = other DNA

SEQ ID NO: 38374 - DNA, 2925 bp, synthetic construct; identical to SEQ ID NO: 38365
  source 1..2925: mol_type = other DNA

SEQ ID NO: 38375 - DNA, 2922 bp, synthetic construct
  source 1..2922: mol_type = other DNA
atggccttaccagtgaccgccttgctcctgccgctggccttgctgctccacgccgccaggccgctcgaggaggaggacctgaagaacgtgttcccacctgaggtggccgtgttcgagcctagcgaggccgagatcagccacacccagaaagccaccctcgtgtgcctggctaccggcttctaccccgaccatgtggaactgtcttggtgggtcaacggcaaagaggtgcacagcggcgtgtgtaccgacccccagccactgaaagaacagcccgccctgaacgacagccggtactgcctgagcagcagactgagagtgtccgccaccttctggcagaacccccggaaccacttcagatgccaggtgcagttctacggcctgagcgagaacgacgagtggacccaggacagagccaagcccgtgacccagatcgtgtctgccgaagcctggggcagagccgatgatgtgattaagatccactggcaggaaaagaagtccaacaccatcctgggcagccaggaaggcaacaccatgaagaccaacgacacctacatgaagttcagctggctgaccgtgcccgagaagtccctggacaaagaacacagatgcatcgtgcggcacgaaaacaacaagaacggcgtggaccaggaaatcatcttcccacccatcaagaccgatgtgattacaatggaccccaaggacaactgctccaaggacgccaacgataccctgctgctccagctgaccaacaccagcgcctactacatgtacttgttgctgctgctgaagtccgtggtgtacttcgccatcatcacatgctgcctgctgcggagaaccgccttctgctgcaacggcgagaagtctagggccaagcgatctggatctggagcaacaaacttctcactactcaaacaagcaggtgacgtggaggagaatcccgggcctactagcatggccttaccagtgaccgccttgctcctgccgctggccttgctgctccacgccgccaggccggacatcgtgatgacacagagccctgatagcctggccgtgtctctgggagagagagccaccattaactgcaaggccagccagagcgtggactacgacggcgacagcttcctgaactggtatcagcagaagcccggccagcctcctaagctgctgatctacgccgccagcaatctggaaagcggcgtgccaagcagattttccggctctggcagcggcaccgatttcaccctgacaatatccagcctccagcctgaggacgtggccgtgtactactgccagcagagcaacgacgaccctctgacctttggacagggcaccaaggtggaaatcaaaggcggaggcggaagtggaggcggaggatctggcggcggaggctctgaagtccaacttgtggagtctggagggggcctggtgcagcccggcggctctctcagactgtcttgtgcggcaagcggctacaccttcacctcttactggatagaatgggtgaggcaggcacctggaaagggactggagtggattggagagattctgccaggagggggagatacaaattacaatgaaatcttcaaggggcgggccaccttttcagcggataccagcaagaatacagcttacctgcagatgaatagcctccgggcagaagataccgctgtttattattgcacgagacgggtgccaataagactggactattgggggcaagggactcttgtcaccgtcagttcaacgcgtatccagaaccctgatcctgccgtgtaccagctgcgggatagcaagagcagcgacaagagcgtgtgtctgttcaccgacttcgacagccagaccaacgtgtcccagagcaaggactccgacgtgtacatcaccgataagtgcgtgctggacatgcggagcatggacttcaagagcaactccgccgtggcctggtccaacaagtccgatttcgcctgcgccaacgccttcaacaacagcattatccccgaggacacattcttcccaagccccgagagcagcgactccaccgaccacgtgaagcccaaagagacagagaacaccaagcagcccagcaagagctgccacaagcccaaggccatcgtgcacaccgagaaagtgaacatgatgagcctgaccgtgctgggcctgcggatgctgttcgccaaaaccgtggccgtgaacttcctgctgaccgccaagctgttcttcctccgcgccaagagaagcggatctggcgtgaagcagaccctgaatttcgacctgctgaagctggctggcgacgtggaatccaacccaggcccttctagaggccatatgaccgagtacaagcccacggtgcgcctcgccacccgcgacgacgtccccagggccgtacgcaccctcgccgccgcgttcgccgactaccccgccacgcgccacaccgtcgatccggaccgccacatcgagcgggtcaccgagctgcaagaactcttcctcacgcgcgtcgggctcgacatcggcaaggtgtgggtcgcggacgacggcgccgcggtggcggtctggaccacgccggagagcgtcgaagcgggggcggtgttcgccgagatcggcccgcgcatggccgagttgagcggttcccggctggccgcgcagcaacagatggaaggcctcctggcgccgcaccggcccaaggagcccgcgtggttcctggccaccgtcggcgtctcgcccgaccaccagggcaagggtctgggcagcgccgtcgtgctccccggagtggaggcggccgagcgcgccggggtgcccgccttcctggagacctccgcgccccgcaacctccccttctacgagcggctcggcttcaccgtcaccgccgacgtcgaggtgcccgaaggaccgcgcacctggtgcatgacccgcaagcccggtgcctga

SEQ ID NO: 38376 - DNA, 2922 bp, synthetic construct
  source 1..2922: mol_type = other DNA
atggccttaccagtgaccgccttgctcctgccgctggccttgctgctccacgccgccaggccgctcgagatccagaaccctgatcctgccgtgtaccagctgcgggatagcaagagcagcgacaagagcgtgtgtctgttcaccgacttcgacagccagaccaacgtgtcccagagcaaggactccgacgtgtacatcaccgataagtgcgtgctggacatgcggagcatggacttcaagagcaactccgccgtggcctggtccaacaagtccgatttcgcctgcgccaacgccttcaacaacagcattatccccgaggacacattcttcccaagccccgagagcagcgactccaccgaccacgtgaagcccaaagagacagagaacaccaagcagcccagcaagagctgccacaagcccaaggccatcgtgcacaccgagaaagtgaacatgatgagcctgaccgtgctgggcctgcggatgctgttcgccaaaaccgtggccgtgaacttcctgctgaccgccaagctgttcttcctcagggccaagcgatctggatctggagcaacaaacttctcactactcaaacaagcaggtgacgtggaggagaatcccgggcctactagcatggccttaccagtgaccgccttgctcctgccgctggccttgctgctccacgccgccaggccggacatcgtgatgacacagagccctgatagcctggccgtgtctctgggagagagagccaccattaactgcaaggccagccagagcgtggactacgacggcgacagcttcctgaactggtatcagcagaagcccggccagcctcctaagctgctgatctacgccgccagcaatctggaaagcggcgtgccaagcagattttccggctctggcagcggcaccgatttcaccctgacaatatccagcctccagcctgaggacgtggccgtgtactactgccagcagagcaacgacgaccctctgacctttggacagggcaccaaggtggaaatcaaaggcggaggcggaagtggaggcggaggatctggcggcggaggctctgaagtccaacttgtggagtctggagggggcctggtgcagcccggcggctctctcagactgtcttgtgcggcaagcggctacaccttcacctcttactggatagaatgggtgaggcaggcacctggaaagggactggagtggattggagagattctgccaggagggggagatacaaattacaatgaaatcttcaaggggcgggccaccttttcagcggataccagcaagaatacagcttacctgcagatgaatagcctccgggcagaagataccgctgtttattattgcacgagacgggtgccaataagactggactattgggggcaagggactcttgtcaccgtcagttcaacgcgtgaggaggacctgaagaacgtgttcccacctgaggtggccgtgttcgagcctagcgaggccgagatcagccacacccagaaagccaccctcgtgtgcctggctaccggcttctaccccgaccatgtggaactgtcttggtgggtcaacggcaaagaggtgcacagcggcgtgtgtaccgacccccagccactgaaagaacagcccgccctgaacgacagccggtactgcctgagcagcagactgagagtgtccgccaccttctggcagaacccccggaaccacttcagatgccaggtgcagttctacggcctgagcgagaacgacgagtggacccaggacagagccaagcccgtgacccagatcgtgtctgccgaagcctggggcagagccgatgatgtgattaagatccactggcaggaaaagaagtccaacaccatcctgggcagccaggaaggcaacaccatgaagaccaacgacacctacatgaagttcagctggctgaccgtgcccgagaagtccctggacaaagaacacagatgcatcgtgcggcacgaaaacaacaagaacggcgtggaccaggaaatcatcttcccacccatcaagaccgatgtgattacaatggaccccaaggacaactgctccaaggacgccaacgataccctgctgctccagctgaccaacaccagcgcctactacatgtacttgttgctgctgctgaagtccgtggtgtacttcgccatcatcacatgctgcctgctgcggagaaccgccttctgctgcaacggcgagaagtctcgcgccaagagaagcggatctggcgtgaagcagaccctgaatttcgacctgctgaagctggctggcgacgtggaatccaacccaggcccttctagaggccatatgaccgagtacaagcccacggtgcgcctcgccacccgcgacgacgtccccagggccgtacgcaccctcgccgccgcgttcgccgactaccccgccacgcgccacaccgtcgatccggaccgccacatcgagcgggtcaccgagctgcaagaactcttcctcacgcgcgtcgggctcgacatcggcaaggtgtgggtcgcggacgacggcgccgcggtggcggtctggaccacgccggagagcgtcgaagcgggggcggtgttcgccgagatcggcccgcgcatggccgagttgagcggttcccggctggccgcgcagcaacagatggaaggcctcctggcgccgcaccggcccaaggagcccgcgtggttcctggccaccgtcggcgtctcgcccgaccaccagggcaagggtctgggcagcgccgtcgtgctccccggagtggaggcggccgagcgcgccggggtgcccgccttcctggagacctccgcgccccgcaacctccccttctacgagcggctcggcttcaccgtcaccgccgacgtcgaggtgcccgaaggaccgcgcacctggtgcatgacccgcaagcccggtgcctga

SEQ ID NO: 38377 - DNA, 2613 bp, synthetic construct
  source 1..2613: mol_type = other DNA
atggccttaccagtgaccgccttgctcctgccgctggccttgctgctccacgccgccaggccgctcgaggaggacctgaagaacgtgttcccacctgaggtggccgtgttcgagcctagcgaggccgagatcagccacacccagaaagccaccctcgtgtgcctggctaccggcttctaccccgaccatgtggaactgtcttggtgggtcaacggcaaagaggtgcacagcggcgtgtctaccgacccccagccactgaaagaacagcccgccctgaacgacagccggtactgcctgagcagcagactgagagtgtccgccaccttctggcagaacccccggaaccacttcagatgccaggtgcagttctacggcctgagcgagaacgacgagtggacccaggacagagccaagcccgtgacccagatcgtgtctgccgaagcctggggcagagccgattgcggctttaccagcgagagctaccagcagggcgtgctgagcgccaccaacctgagcgtgatcggcttcagaatcctgctgctgaaagtggccggctttaacctgctgatgaccctgcggctgtggtccagcagggccaagcgatctggatctggagcaacaaacttctcactactcaaacaagcaggtgacgtggaggagaatcccgggcctactagcatggccttaccagtgaccgccttgctcctgccgctggccttgctgctccacgccgccaggccggacatcgtgatgacacagagccctgatagcctggccgtgtctctgggagagagagccaccattaactgcaaggccagccagagcgtggactacgacggcgacagcttcctgaactggtatcagcagaagcccggccagcctcctaagctgctgatctacgccgccagcaatctggaaagcggcgtgccaagcagattttccggctctggcagcggcaccgatttcaccctgacaatatccagcctccagcctgaggacgtggccgtgtactactgccagcagagcaacgacgaccctctgacctttggacagggcaccaaggtggaaatcaaaggcggaggcggaagtggaggcggaggatctggcggcggaggctctgaagtccaacttgtggagtctggagggggcctggtgcagcccggcggctctctcagactgtcttgtgcggcaagcggctacaccttcacctcttactggatagaatgggtgaggcaggcacctggaaagggactggagtggattggagagattctgccaggagggggagatacaaattacaatgaaatcttcaaggggcgggccaccttttcagcggataccagcaagaatacagcttacctgcagatgaatagcctccgggcagaagataccgctgtttattattgcacgagacgggtgccaataagactggactattgggggcaagggactcttgtcaccgtcagttcaacgcgtatccagaaccctgatcctgccgtgtaccagctgcgggatagcaagagcagcgacaagagcgtgtgtctgttcaccgacttcgacagccagaccaacgtgtcccagagcaaggactccgacgtgtacatcaccgataagaccgtgctggacatgcggagcatggacttcaagagcaactccgccgtggcctggtccaacaagtccgatttcgcctgcgccaacgccttcaacaacagcattatccccgaggacacattcttcccaagccccgagagcagctgcgacgtgaagctggtggaaaagagcttcgagacagacaccaacctgaacttccagatcctgtacgagatcctgctgggcaaggccaccctgtacgccgtgctggtgtctgccctggtgctgatggctatggtcaagcggaaggacagccggggacgcgccaagagaagcggatctggcgtgaagcagaccctgaatttcgacctgctgaagctggctggcgacgtggaatccaacccaggcccttctagaggccatatgaccgagtacaagcccacggtgcgcctcgccacccgcgacgacgtccccagggccgtacgcaccctcgccgccgcgttcgccgactaccccgccacgcgccacaccgtcgatccggaccgccacatcgagcgggtcaccgagctgcaagaactcttcctcacgcgcgtcgggctcgacatcggcaaggtgtgggtcgcggacgacggcgccgcggtggcggtctggaccacgccggagagcgtcgaagcgggggcggtgttcgccgagatcggcccgcgcatggccgagttgagcggttcccggctggccgcgcagcaacagatggaaggcctcctggcgccgcaccggcccaaggagcccgcgtggttcctggccaccgtcggcgtctcgcccgaccaccagggcaagggtctgggcagcgccgtcgtgctccccggagtggaggcggccgagcgcgccggggtgcccgccttcctggagacctccgcgccccgcaacctccccttctacgagcggctcggcttcaccgtcaccgccgacgtcgaggtgcccgaaggaccgcgcacctggtgcatgacccgcaagcccggtgcctga

SEQ ID NO: 38378 - DNA, 2613 bp, synthetic construct
  source 1..2613: mol_type = other DNA
atggccttaccagtgaccgccttgctcctgccgctggccttgctgctccacgccgccaggccgctcgagatccagaaccctgatcctgccgtgtaccagctgcgggatagcaagagcagcgacaagagcgtgtgtctgttcaccgacttcgacagccagaccaacgtgtcccagagcaaggactccgacgtgtacatcaccgataagaccgtgctggacatgcggagcatggacttcaagagcaactccgccgtggcctggtccaacaagtccgatttcgcctgcgccaacgccttcaacaacagcattatccccgaggacacattcttcccaagccccgagagcagctgcgacgtgaagctggtggaaaagagcttcgagacagacaccaacctgaacttccagatcctgtacgagatcctgctgggcaaggccaccctgtacgccgtgctggtgtctgccctggtgctgatggctatggtcaagcggaaggacagccggggaagggccaagcgatctggatctggagcaacaaacttctcactactcaaacaagcaggtgacgtggaggagaatcccgggcctactagcatggccttaccagtgaccgccttgctcctgccgctggccttgctgctccacgccgccaggccggacatcgtgatgacacagagccctgatagcctggccgtgtctctgggagagagagccaccattaactgcaaggccagccagagcgtggactacgacggcgacagcttcctgaactggtatcagcagaagcccggccagcctcctaagctgctgatctacgccgccagcaatctggaaagcggcgtgccaagcagattttccggctctggcagcggcaccgatttcaccctgacaatatccagcctccagcctgaggacgtggccgtgtactactgccagcagagcaacgacgaccctctgacctttggacagggcaccaaggtggaaatcaaaggcggaggcggaagtggaggcggaggatctggcggcggaggctctgaagtccaacttgtggagtctggagggggcctggtgcagcccggcggctctctcagactgtcttgtgcggcaagcggctacaccttcacctcttactggatagaatgggtgaggcaggcacctggaaagggactggagtggattggagagattctgccaggagggggagatacaaattacaatgaaatcttcaaggggcgggccaccttttcagcggataccagcaagaatacagcttacctgcagatgaatagcctccgggcagaagataccgctgtttattattgcacgagacgggtgccaataagactggactattgggggcaagggactcttgtcaccgtcagttcaacgcgtgaggacctgaagaacgtgttcccacctgaggtggccgtgttcgagcctagcgaggccgagatcagccacacccagaaagccaccctcgtgtgcctggctaccggcttctaccccgaccatgtggaactgtcttggtgggtcaacggcaaagaggtgcacagcggcgtgtctaccgacccccagccactgaaagaacagcccgccctgaacgacagccggtactgcctgagcagcagactgagagtgtccgccaccttctggcagaacccccggaaccacttcagatgccaggtgcagttctacggcctgagcgagaacgacgagtggacccaggacagagccaagcccgtgacccagatcgtgtctgccgaagcctggggcagagccgattgcggctttaccagcgagagctaccagcagggcgtgctgagcgccaccaacctgagcgtgatcggcttcagaatcctgctgctgaaagtggccggctttaacctgctgatgaccctgcggctgtggtccagccgcgccaagagaagcggatctggcgtgaagcagaccctgaatttcgacctgctgaagctggctggcgacgtggaatccaacccaggcccttctagaggccatatgaccgagtacaagcccacggtgcgcctcgccacccgcgacgacgtccccagggccgtacgcaccctcgccgccgcgttcgccgactaccccgccacgcgccacaccgtcgatccggaccgccacatcgagcgggtcaccgagctgcaagaactcttcctcacgcgcgtcgggctcgacatcggcaaggtgtgggtcgcggacgacggcgccgcggtggcggtctggaccacgccggagagcgtcgaagcgggggcggtgttcgccgagatcggcccgcgcatggccgagttgagcggttcccggctggccgcgcagcaacagatggaaggcctcctggcgccgcaccggcccaaggagcccgcgtggttcctggccaccgtcggcgtctcgcccgaccaccagggcaagggtctgggcagcgccgtcgtgctccccggagtggaggcggccgagcgcgccggggtgcccgccttcctggagacctccgcgccccgcaacctccccttctacgagcggctcggcttcaccgtcaccgccgacgtcgaggtgcccgaaggaccgcgcacctggtgcatgacccgcaagcccggtgcctga

SEQ ID NO: 38379 - DNA, 2613 bp, synthetic construct
  source 1..2613: mol_type = other DNA
atggccttaccagtgaccgccttgctcctgccgctggccttgctgctccacgccgccaggccgctcgaggaggacctgaagaacgtgttcccacctgaggtggccgtgttcgagcctagcgaggccgagatcagccacacccagaaagccaccctcgtgtgcctggctaccggcttctaccccgaccatgtggaactgtcttggtgggtcaacggcaaagaggtgcacagcggcgtgtgtaccgacccccagccactgaaagaacagcccgccctgaacgacagccggtactgcctgagcagcagactgagagtgtccgccaccttctggcagaacccccggaaccacttcagatgccaggtgcagttctacggcctgagcgagaacgacgagtggacccaggacagagccaagcccgtgacccagatcgtgtctgccgaagcctggggcagagccgattgcgacgtgaagctggtggaaaagagcttcgagacagacaccaacctgaacttccagaacctgagcgtgatcggcttcagaatcctgctgctgaaagtggccggctttaacctgctgatgaccctgcggctgtggtccagcagggccaagcgatctggatctggagcaacaaacttctcactactcaaacaagcaggtgacgtggaggagaatcccgggcctactagcatggccttaccagtgaccgccttgctcctgccgctggccttgctgctccacgccgccaggccggacatcgtgatgacacagagccctgatagcctggccgtgtctctgggagagagagccaccattaactgcaaggccagccagagcgtggactacgacggcgacagcttcctgaactggtatcagcagaagcccggccagcctcctaagctgctgatctacgccgccagcaatctggaaagcggcgtgccaagcagattttccggctctggcagcggcaccgatttcaccctgacaatatccagcctccagcctgaggacgtggccgtgtactactgccagcagagcaacgacgaccctctgacctttggacagggcaccaaggtggaaatcaaaggcggaggcggaagtggaggcggaggatctggcggcggaggctctgaagtccaacttgtggagtctggagggggcctggtgcagcccggcggctctctcagactgtcttgtgcggcaagcggctacaccttcacctcttactggatagaatgggtgaggcaggcacctggaaagggactggagtggattggagagattctgccaggagggggagatacaaattacaatgaaatcttcaaggggcgggccaccttttcagcggataccagcaagaatacagcttacctgcagatgaatagcctccgggcagaagataccgctgtttattattgcacgagacgggtgccaataagactggactattgggggcaagggactcttgtcaccgtcagttcaacgcgtatccagaaccctgatcctgccgtgtaccagctgcgggatagcaagagcagcgacaagagcgtgtgtctgttcaccgacttcgacagccagaccaacgtgtcccagagcaaggactccgacgtgtacatcaccgataagtgcgtgctggacatgcggagcatggacttcaagagcaactccgccgtggcctggtccaacaagtccgatttcgcctgcgccaacgccttcaacaacagcattatccccgaggacacattcttcccaagccccgagagcagctgcggctttaccagcgagagctaccagcagggcgtgctgagcgccaccatcctgtacgagatcctgctgggcaaggccaccctgtacgccgtgctggtgtctgccctggtgctgatggctatggtcaagcggaaggacagccggggacgcgccaagagaagcggatctggcgtgaagcagaccctgaatttcgacctgctgaagctggctggcgacgtggaatccaacccaggcccttctagaggccatatgaccgagtacaagcccacggtgcgcctcgccacccgcgacgacgtccccagggccgtacgcaccctcgccgccgcgttcgccgactaccccgccacgcgccacaccgtcgatccggaccgccacatcgagcgggtcaccgagctgcaagaactcttcctcacgcgcgtcgggctcgacatcggcaaggtgtgggtcgcggacgacggcgccgcggtggcggtctggaccacgccggagagcgtcgaagcgggggcggtgttcgccgagatcggcccgcgcatggccgagttgagcggttcccggctggccgcgcagcaacagatggaaggcctcctggcgccgcaccggcccaaggagcccgcgtggttcctggccaccgtcggcgtctcgcccgaccaccagggcaagggtctgggcagcgccgtcgtgctccccggagtggaggcggccgagcgcgccggggtgcccgccttcctggagacctccgcgccccgcaacctccccttctacgagcggctcggcttcaccgtcaccgccgacgtcgaggtgcccgaaggaccgcgcacctggtgcatgacccgcaagcccggtgcctga

SEQ ID NO: 38380 - DNA, 2613 bp, synthetic construct
  source 1..2613: mol_type = other DNA
atggccttaccagtgaccgccttgctcctgccgctggccttgctgctccacgccgccaggccgctcgaggaggacctgaagaacgtgttcccacctgaggtggccgtgttcgagcctagcgaggccgagatcagccacacccagaaagccaccctcgtgtgcctggctaccggcttctaccccgaccatgtggaactgtcttggtgggtcaacggcaaagaggtgcacagcggcgtgtctaccgacccccagccactgaaagaacagcccgccctgaacgacagccggtactgcctgagcagcagactgagagtgtccgccaccttctggcagaacccccggaaccacttcagatgccaggtgcagttctacggcctgagcgagaacgacgagtggacccaggacagagccaagcccgtgacccagatcgtgtctgccgaagcctggggcagagccgattgcgacgtgaagctggtggaaaagagcttcgagacagacaccaacctgaacttccagaacctgagcgtgatcggcttcagaatcctgctgctgaaagtggccggctttaacctgctgatgaccctgcggctgtggtccagcagggccaagcgatctggatctggagcaacaaacttctcactactcaaacaagcaggtgacgtggaggagaatcccgggcctactagcatggccttaccagtgaccgccttgctcctgccgctggccttgctgctccacgccgccaggccggacatcgtgatgacacagagccctgatagcctggccgtgtctctgggagagagagccaccattaactgcaaggccagccagagcgtggactacgacggcgacagcttcctgaactggtatcagcagaagcccggccagcctcctaagctgctgatctacgccgccagcaatctggaaagcggcgtgccaagcagattttccggctctggcagcggcaccgatttcaccctgacaatatccagcctccagcctgaggacgtggccgtgtactactgccagcagagcaacgacgaccctctgacctttggacagggcaccaaggtggaaatcaaaggcggaggcggaagtggaggcggaggatctggcggcggaggctctgaagtccaacttgtggagtctggagggggcctggtgcagcccggcggctctctcagactgtcttgtgcggcaagcggctacaccttcacctcttactggatagaatgggtgaggcaggcacctggaaagggactggagtggattggagagattctgccaggagggggagatacaaattacaatgaaatcttcaaggggcgggccaccttttcagcggataccagcaagaatacagcttacctgcagatgaatagcctccgggcagaagataccgctgtttattattgcacgagacgggtgccaataagactggactattgggggcaagggactcttgtcaccgtcagttcaacgcgtatccagaaccctgatcctgccgtgtaccagctgcgggatagcaagagcagcgacaagagcgtgtgtctgttcaccgacttcgacagccagaccaacgtgtcccagagcaaggactccgacgtgtacatcaccgataagaccgtgctggacatgcggagcatggacttcaagagcaactccgccgtggcctggtccaacaagtccgatttcgcctgcgccaacgccttcaacaacagcattatccccgaggacacattcttcccaagccccgagagcagctgcggctttaccagcgagagctaccagcagggcgtgctgagcgccaccatcctgtacgagatcctgctgggcaaggccaccctgtacgccgtgctggtgtctgccctggtgctgatggctatggtcaagcggaaggacagccggggacgcgccaagagaagcggatctggcgtgaagcagaccctgaatttcgacctgctgaagctggctggcgacgtggaatccaacccaggcccttctagaggccatatgaccgagtacaagcccacggtgcgcctcgccacccgcgacgacgtccccagggccgtacgcaccctcgccgccgcgttcgccgactaccccgccacgcgccacaccgtcgatccggaccgccacatcgagcgggtcaccgagctgcaagaactcttcctcacgcgcgtcgggctcgacatcggcaaggtgtgggtcgcggacgacggcgccgcggtggcggtctggaccacgccggagagcgtcgaagcgggggcggtgttcgccgagatcggcccgcgcatggccgagttgagcggttcccggctggccgcgcagcaacagatggaaggcctcctggcgccgcaccggcccaaggagcccgcgtggttcctggccaccgtcggcgtctcgcccgaccaccagggcaagggtctgggcagcgccgtcgtgctccccggagtggaggcggccgagcgcgccggggtgcccgccttcctggagacctccgcgccccgcaacctccccttctacgagcggctcggcttcaccgtcaccgccgacgtcgaggtgcccgaaggaccgcgcacctggtgcatgacccgcaagcccggtgcctga

SEQ ID NO: 38381 - DNA, 2922 bp, synthetic construct
  source 1..2922: mol_type = other DNA
atggccttaccagtgaccgccttgctcctgccgctggccttgctgctccacgccgccaggccgctcgaggaggaggacctgaagaacgtgttcccacctgaggtggccgtgttcgagcctagcgaggccgagatcagccacacccagaaagccaccctcgtgtgcctggctaccggcttctaccccgaccatgtggaactgtcttggtgggtcaacggcaaagaggtgcacagcggcgtgtctaccgacccccagccactgaaagaacagcccgccctgaacgacagccggtactgcctgagcagcagactgagagtgtccgccaccttctggcagaacccccggaaccacttcagatgccaggtgcagttctacggcctgagcgagaacgacgagtggacccaggacagagccaagcccgtgacccagatcgtgtctgccgaagcctggggcagagccgatgatgtgattaagatccactggcaggaaaagaagtccaacaccatcctgggcagccaggaaggcaacaccatgaagaccaacgacacctacatgaagttcagctggctgaccgtgcccgagaagtccctggacaaagaacacagatgcatcgtgcggcacgaaaacaacaagaacggcgtggaccaggaaatcatcttcccacccatcaagaccgatgtgattacaatggaccccaaggacaactgctccaaggacgccaacgataccctgctgctccagctgaccaacaccagcgcctactacatgtacttgttgctgctgctgaagtccgtggtgtacttcgccatcatcacatgctgcctgctgcggagaaccgccttctgctgcaacggcgagaagtctagggccaagcgatctggatctggagcaacaaacttctcactactcaaacaagcaggtgacgtggaggagaatcccgggcctactagcatggccttaccagtgaccgccttgctcctgccgctggccttgctgctccacgccgccaggccggacatcgtgatgacacagagccctgatagcctggccgtgtctctgggagagagagccaccattaactgcaaggccagccagagcgtggactacgacggcgacagcttcctgaactggtatcagcagaagcccggccagcctcctaagctgctgatctacgccgccagcaatctggaaagcggcgtgccaagcagattttccggctctggcagcggcaccgatttcaccctgacaatatccagcctccagcctgaggacgtggccgtgtactactgccagcagagcaacgacgaccctctgacctttggacagggcaccaaggtggaaatcaaaggcggaggcggaagtggaggcggaggatctggcggcggaggctctgaagtccaacttgtggagtctggagggggcctggtgcagcccggcggctctctcagactgtcttgtgcggcaagcggctacaccttcacctcttactggatagaatgggtgaggcaggcacctggaaagggactggagtggattggagagattctgccaggagggggagatacaaattacaatgaaatcttcaaggggcgggccaccttttcagcggataccagcaagaatacagcttacctgcagatgaatagcctccgggcagaagataccgctgtttattattgcacgagacgggtgccaataagactggactattgggggcaagggactcttgtcaccgtcagttcaacgcgtatccagaaccctgatcctgccgtgtaccagctgcgggatagcaagagcagcgacaagagcgtgtgtctgttcaccgacttcgacagccagaccaacgtgtcccagagcaaggactccgacgtgtacatcaccgataagaccgtgctggacatgcggagcatggacttcaagagcaactccgccgtggcctggtccaacaagtccgatttcgcctgcgccaacgccttcaacaacagcattatccccgaggacacattcttcccaagccccgagagcagcgactccaccgaccacgtgaagcccaaagagacagagaacaccaagcagcccagcaagagctgccacaagcccaaggccatcgtgcacaccgagaaagtgaacatgatgagcctgaccgtgctgggcctgcggatgctgttcgccaaaaccgtggccgtgaacttcctgctgaccgccaagctgttcttcctccgcgccaagagaagcggatctggcgtgaagcagaccctgaatttcgacctgctgaagctggctggcgacgtggaatccaacccaggcccttctagaggccatatgaccgagtacaagcccacggtgcgcctcgccacccgcgacgacgtccccagggccgtacgcaccctcgccgccgcgttcgccgactaccccgccacgcgccacaccgtcgatccggaccgccacatcgagcgggtcaccgagctgcaagaactcttcctcacgcgcgtcgggctcgacatcggcaaggtgtgggtcgcggacgacggcgccgcggtggcggtctggaccacgccggagagcgtcgaagcgggggcggtgttcgccgagatcggcccgcgcatggccgagttgagcggttcccggctggccgcgcagcaacagatggaaggcctcctggcgccgcaccggcccaaggagcccgcgtggttcctggccaccgtcggcgtctcgcccgaccaccagggcaagggtctgggcagcgccgtcgtgctccccggagtggaggcggccgagcgcgccggggtgcccgccttcctggagacctccgcgccccgcaacctccccttctacgagcggctcggcttcaccgtcaccgccgacgtcgaggtgcccgaaggaccgcgcacctggtgcatgacccgcaagcccggtgcctga

SEQ ID NO: 38382 - DNA, 2613 bp, synthetic construct
  source 1..2613: mol_type = other DNA
atggccttaccagtgaccgccttgctcctgccgctggccttgctgctccacgccgccaggccgctcgaggaggacctgaagaacgtgttcccacctgaggtggccgtgttcgagcctagcgaggccgagatcagccacacccagaaagccaccctcgtgtgcctggctaccggcttctaccccgaccatgtggaactgtcttggtgggtcaacggcaaagaggtgcacagcggcgtgtgtaccgacccccagccactgaaagaacagcccgccctgaacgacagccggtactgcctgagcagcagactgagagtgtccgccaccttctggcagaacccccggaaccacttcagatgccaggtgcagttctacggcctgagcgagaacgacgagtggacccaggacagagccaagcccgtgacccagatcgtgtctgccgaagcctggggcagagccgattgcggctttaccagcgagagctaccagcagggcgtgctgagcgccaccaacctgagcgtgatcggcttcagaatcctgctgctgaaagtggccggctttaacctgctgatgaccctgcggctgtggtccagcagggccaagcgatctggatctggagcaacaaacttctcactactcaaacaagcaggtgacgtggaggagaatcccgggcctactagcatggccttaccagtgaccgccttgctcctgccgctggccttgctgctccacgccgccaggccggacatcgtgatgacacagagccctgatagcctggccgtgtctctgggagagagagccaccattaactgcaaggccagccagagcgtggactacgacggcgacagcttcctgaactggtatcagcagaagcccggccagcctcctaagctgctgatctacgccgccagcaatctggaaagcggcgtgccaagcagattttccggctctggcagcggcaccgatttcaccctgacaatatccagcctccagcctgaggacgtggccgtgtactactgccagcagagcaacgacgaccctctgacctttggacagggcaccaaggtggaaatcaaaggcggaggcggaagtggaggcggaggatctggcggcggaggctctgaagtccaacttgtggagtctggagggggcctggtgcagcccggcggctctctcagactgtcttgtgcggcaagcggctacaccttcacctcttactggatagaatgggtgaggcaggcacctggaaagggactggagtggattggagagattctgccaggagggggagatacaaattacaatgaaatcttcaaggggcgggccaccttttcagcggataccagcaagaatacagcttacctgcagatgaatagcctccgggcagaagataccgctgtttattattgcacgagacgggtgccaataagactggactattgggggcaagggactcttgtcaccgtcagttcaacgcgtatccagaaccctgatcctgccgtgtaccagctgcgggatagcaagagcagcgacaagagcgtgtgtctgttcaccgacttcgacagccagaccaacgtgtcccagagcaaggactccgacgtgtacatcaccgataagtgcgtgctggacatgcggagcatggacttcaagagcaactccgccgtggcctggtccaacaagtccgatttcgcctgcgccaacgccttcaacaacagcattatccccgaggacacattcttcccaagccccgagagcagctgcgacgtgaagctggtggaaaagagcttcgagacagacaccaacctgaacttccagatcctgtacgagatcctgctgggcaaggccaccctgtacgccgtgctggtgtctgccctggtgctgatggctatggtcaagcggaaggacagccggggacgcgccaagagaagcggatctggcgtgaagcagaccctgaatttcgacctgctgaagctggctggcgacgtggaatccaacccaggcccttctagaggccatatgaccgagtacaagcccacggtgcgcctcgccacccgcgacgacgtccccagggccgtacgcaccctcgccgccgcgttcgccgactaccccgccacgcgccacaccgtcgatccggaccgccacatcgagcgggtcaccgagctgcaagaactcttcctcacgcgcgtcgggctcgacatcggcaaggtgtgggtcgcggacgacggcgccgcggtggcggtctggaccacgccggagagcgtcgaagcgggggcggtgttcgccgagatcggcccgcgcatggccgagttgagcggttcccggctggccgcgcagcaacagatggaaggcctcctggcgccgcaccggcccaaggagcccgcgtggttcctggccaccgtcggcgtctcgcccgaccaccagggcaagggtctgggcagcgccgtcgtgctccccggagtggaggcggccgagcgcgccggggtgcccgccttcctggagacctccgcgccccgcaacctccccttctacgagcggctcggcttcaccgtcaccgccgacgtcgaggtgcccgaaggaccgcgcacctggtgcatgacccgcaagcccggtgcctga

SEQ ID NO: 38383 - DNA, 2700 bp, synthetic construct
  source 1..2700: mol_type = other DNA
atggccttaccagtgaccgccttgctcctgccgctggccttgctgctccacgccgccaggccgctcgaggaggaggacctgaagaacgtgttcccacctgaggtggccgtgttcgagcctagcgaggccgagatcagccacacccagaaagccaccctcgtgtgcctggctaccggcttctaccccgaccatgtggaactgtcttggtgggtcaacggcaaagaggtgcacagcggcgtgtgtaccgacccccagccactgaaagaacagcccgccctgaacgacagccggtactgcctgagcagcagactgagagtgtccgccaccttctggcagaacccccggaaccacttcagatgccaggtgcagttctacggcctgagcgagaacgacgagtggacccaggacagagccaagcccgtgacccagatcgtgtctgccgaagcctggggcagagccgattgcggctttaccagcgagagctaccagcagggcgtgctgagcgccaccaacctgagcgtgatcggcttcagaatcctgctgctgaaagtggccggctttaacctgctgatgaccctgcggctgtggtccagcagggccaagcgatctggatctggagcaacaaacttctcactactcaaacaagcaggtgacgtggaggagaatcccgggcctactagcatggccttaccagtgaccgccttgctcctgccgctggccttgctgctccacgccgccaggccggacatcgtgatgacacagagccctgatagcctggccgtgtctctgggagagagagccaccattaactgcaaggccagccagagcgtggactacgacggcgacagcttcctgaactggtatcagcagaagcccggccagcctcctaagctgctgatctacgccgccagcaatctggaaagcggcgtgccaagcagattttccggctctggcagcggcaccgatttcaccctgacaatatccagcctccagcctgaggacgtggccgtgtactactgccagcagagcaacgacgaccctctgacctttggacagggcaccaaggtggaaatcaaaggcggaggcggaagtggaggcggaggatctggcggcggaggctctgaagtccaacttgtggagtctggagggggcctggtgcagcccggcggctctctcagactgtcttgtgcggcaagcggctacaccttcacctcttactggatagaatgggtgaggcaggcacctggaaagggactggagtggattggagagattctgccaggagggggagatacaaattacaatgaaatcttcaaggggcgggccaccttttcagcggataccagcaagaatacagcttacctgcagatgaatagcctccgggcagaagataccgctgtttattattgcacgagacgggtgccaataagactggactattgggggcaagggactcttgtcaccgtcagttcaacgcgtggacagcctaaggccaatcctaccgtgacactgttccctccaagcagcgaagaactccaggccaacaaggccacacttgtgtgcctgatctccgacttctaccctggggctgtgacagtggcttggaaggccgatggatctcctgtgaaagccggcgtggaaaccaccaagccatccaagcagagcaacaacaaatacgccgccagctcctacctgagcctgacacctgagcagtggaagtcccacagatcctacagctgccaagtgacccacgaaggcagcaccgtggaaaagacagtggcccctacagagtgcagccccatcaagaccgatgtgattacaatggaccccaaggacaactgctccaaggacgccaacgataccctgctgctccagctgaccaacaccagcgcctactacatgtacttgttgctgctgctgaagtccgtggtgtacttcgccatcatcacatgctgcctgctgcggagaaccgccttctgctgcaacggcgagaagtctcgcgccaagagaagcggatctggcgtgaagcagaccctgaatttcgacctgctgaagctggctggcgacgtggaatccaacccaggcccttctagaggccatatgaccgagtacaagcccacggtgcgcctcgccacccgcgacgacgtccccagggccgtacgcaccctcgccgccgcgttcgccgactaccccgccacgcgccacaccgtcgatccggaccgccacatcgagcgggtcaccgagctgcaagaactcttcctcacgcgcgtcgggctcgacatcggcaaggtgtgggtcgcggacgacggcgccgcggtggcggtctggaccacgccggagagcgtcgaagcgggggcggtgttcgccgagatcggcccgcgcatggccgagttgagcggttcccggctggccgcgcagcaacagatggaaggcctcctggcgccgcaccggcccaaggagcccgcgtggttcctggccaccgtcggcgtctcgcccgaccaccagggcaagggtctgggcagcgccgtcgtgctccccggagtggaggcggccgagcgcgccggggtgcccgccttcctggagacctccgcgccccgcaacctccccttctacgagcggctcggcttcaccgtcaccgccgacgtcgaggtgcccgaaggaccgcgcacctggtgcatgacccgcaagcccggtgcctga

SEQ ID NO: 38384 - DNA, 2700 bp, synthetic construct
  source 1..2700: mol_type = other DNA
atggccttaccagtgaccgccttgctcctgccgctggccttgctgctccacgccgccaggccgctcgagggacagcctaaggccaatcctaccgtgacactgttccctccaagcagcgaagaactccaggccaacaaggccacacttgtgtgcctgatctccgacttctaccctggggctgtgacagtggcttggaaggccgatggatctcctgtgaaagccggcgtggaaaccaccaagccatccaagcagagcaacaacaaatacgccgccagctcctacctgagcctgacacctgagcagtggaagtcccacagatcctacagctgccaagtgacccacgaaggcagcaccgtggaaaagacagtggcccctacagagtgcagccccatcaagaccgatgtgattacaatggaccccaaggacaactgctccaaggacgccaacgataccctgctgctccagctgaccaacaccagcgcctactacatgtacttgttgctgctgctgaagtccgtggtgtacttcgccatcatcacatgctgcctgctgcggagaaccgccttctgctgcaacggcgagaagtctagggccaagcgatctggatctggagcaacaaacttctcactactcaaacaagcaggtgacgtggaggagaatcccgggcctactagcatggccttaccagtgaccgccttgctcctgccgctggccttgctgctccacgccgccaggccggacatcgtgatgacacagagccctgatagcctggccgtgtctctgggagagagagccaccattaactgcaaggccagccagagcgtggactacgacggcgacagcttcctgaactggtatcagcagaagcccggccagcctcctaagctgctgatctacgccgccagcaatctggaaagcggcgtgccaagcagattttccggctctggcagcggcaccgatttcaccctgacaatatccagcctccagcctgaggacgtggccgtgtactactgccagcagagcaacgacgaccctctgacctttggacagggcaccaaggtggaaatcaaaggcggaggcggaagtggaggcggaggatctggcggcggaggctctgaagtccaacttgtggagtctggagggggcctggtgcagcccggcggctctctcagactgtcttgtgcggcaagcggctacaccttcacctcttactggatagaatgggtgaggcaggcacctggaaagggactggagtggattggagagattctgccaggagggggagatacaaattacaatgaaatcttcaaggggcgggccaccttttcagcggataccagcaagaatacagcttacctgcagatgaatagcctccgggcagaagataccgctgtttattattgcacgagacgggtgccaataagactggactattgggggcaagggactcttgtcaccgtcagttcaacgcgtgaggaggacctgaagaacgtgttcccacctgaggtggccgtgttcgagcctagcgaggccgagatcagccacacccagaaagccaccctcgtgtgcctggctaccggcttctaccccgaccatgtggaactgtcttggtgggtcaacggcaaagaggtgcacagcggcgtgtgtaccgacccccagccactgaaagaacagcccgccctgaacgacagccggtactgcctgagcagcagactgagagtgtccgccaccttctggcagaacccccggaaccacttcagatgccaggtgcagttctacggcctgagcgagaacgacgagtggacccaggacagagccaagcccgtgacccagatcgtgtctgccgaagcctggggcagagccgattgcggctttaccagcgagagctaccagcagggcgtgctgagcgccaccaacctgagcgtgatcggcttcagaatcctgctgctgaaagtggccggctttaacctgctgatgaccctgcggctgtggtccagccgcgccaagagaagcggatctggcgtgaagcagaccctgaatttcgacctgctgaagctggctggcgacgtggaatccaacccaggcccttctagaggccatatgaccgagtacaagcccacggtgcgcctcgccacccgcgacgacgtccccagggccgtacgcaccctcgccgccgcgttcgccgactaccccgccacgcgccacaccgtcgatccggaccgccacatcgagcgggtcaccgagctgcaagaactcttcctcacgcgcgtcgggctcgacatcggcaaggtgtgggtcgcggacgacggcgccgcggtggcggtctggaccacgccggagagcgtcgaagcgggggcggtgttcgccgagatcggcccgcgcatggccgagttgagcggttcccggctggccgcgcagcaacagatggaaggcctcctggcgccgcaccggcccaaggagcccgcgtggttcctggccaccgtcggcgtctcgcccgaccaccagggcaagggtctgggcagcgccgtcgtgctccccggagtggaggcggccgagcgcgccggggtgcccgccttcctggagacctccgcgccccgcaacctccccttctacgagcggctcggcttcaccgtcaccgccgacgtcgaggtgcccgaaggaccgcgcacctggtgcatgacccgcaagcccggtgcctga

SEQ ID NO: 38385 - DNA, 2691 bp, synthetic construct
  source 1..2691: mol_type = other DNA
atggccttaccagtgaccgccttgctcctgccgctggccttgctgctccacgccgccaggccgctcgaggaggcctctacaaagggaccctccgtgtttcctctggctcccagcagcaagtctacaagcggaggaacagccgctctgggctgcctggtcaaggattactttcccgagcctgtgaccgtgtcctggaatagcggagcactgacaagcggcgtgcacacctttccagccgtgctgcaaagcagcggcctgtactctctgagcagcgtggtcacagtgcctagctctagcctgggcacccagacctacatctgcaatgtgaaccacaagcctagcaacaccaaggtggacaagagagtggaacccaagagctgtcccatcaagaccgatgtgattacaatggaccccaaggacaactgctccaaggacgccaacgataccctgctgctccagctgaccaacaccagcgcctactacatgtacttgttgctgctgctgaagtccgtggtgtacttcgccatcatcacatgctgcctgctgcggagaaccgccttctgctgcaacggcgagaagtctagggccaagcgatctggatctggagcaacaaacttctcactactcaaacaagcaggtgacgtggaggagaatcccgggcctactagcatggccttaccagtgaccgccttgctcctgccgctggccttgctgctccacgccgccaggccggacatcgtgatgacacagagccctgatagcctggccgtgtctctgggagagagagccaccattaactgcaaggccagccagagcgtggactacgacggcgacagcttcctgaactggtatcagcagaagcccggccagcctcctaagctgctgatctacgccgccagcaatctggaaagcggcgtgccaagcagattttccggctctggcagcggcaccgatttcaccctgacaatatccagcctccagcctgaggacgtggccgtgtactactgccagcagagcaacgacgaccctctgacctttggacagggcaccaaggtggaaatcaaaggcggaggcggaagtggaggcggaggatctggcggcggaggctctgaagtccaacttgtggagtctggagggggcctggtgcagcccggcggctctctcagactgtcttgtgcggcaagcggctacaccttcacctcttactggatagaatgggtgaggcaggcacctggaaagggactggagtggattggagagattctgccaggagggggagatacaaattacaatgaaatcttcaaggggcgggccaccttttcagcggataccagcaagaatacagcttacctgcagatgaatagcctccgggcagaagataccgctgtttattattgcacgagacgggtgccaataagactggactattgggggcaagggactcttgtcaccgtcagttcaacgcgtggacagcctaaggccaatcctaccgtgacactgttccctccaagcagcgaagaactccaggccaacaaggccacacttgtgtgcctgatctccgacttctaccctggggctgtgacagtggcttggaaggccgatggatctcctgtgaaagccggcgtggaaaccaccaagccatccaagcagagcaacaacaaatacgccgccagctcctacctgagcctgacacctgagcagtggaagtcccacagatcctacagctgccaagtgacccacgaaggcagcaccgtggaaaagacagtggcccctacagagtgcagcgaagtgaaaaccgactccaccgaccacgtgaagcccaaagagacagagaacaccaagcagcccagcaagagctgccacaagcccaaggccatcgtgcacaccgagaaagtgaacatgatgagcctgaccgtgctgggcctgcggatgctgttcgccaaaaccgtggccgtgaacttcctgctgaccgccaagctgttcttcctccgcgccaagagaagcggatctggcgtgaagcagaccctgaatttcgacctgctgaagctggctggcgacgtggaatccaacccaggcccttctagaggccatatgaccgagtacaagcccacggtgcgcctcgccacccgcgacgacgtccccagggccgtacgcaccctcgccgccgcgttcgccgactaccccgccacgcgccacaccgtcgatccggaccgccacatcgagcgggtcaccgagctgcaagaactcttcctcacgcgcgtcgggctcgacatcggcaaggtgtgggtcgcggacgacggcgccgcggtggcggtctggaccacgccggagagcgtcgaagcgggggcggtgttcgccgagatcggcccgcgcatggccgagttgagcggttcccggctggccgcgcagcaacagatggaaggcctcctggcgccgcaccggcccaaggagcccgcgtggttcctggccaccgtcggcgtctcgcccgaccaccagggcaagggtctgggcagcgccgtcgtgctccccggagtggaggcggccgagcgcgccggggtgcccgccttcctggagacctccgcgccccgcaacctccccttctacgagcggctcggcttcaccgtcaccgccgacgtcgaggtgcccgaaggaccgcgcacctggtgcatgacccgcaagcccggtgcctga

SEQ ID NO: 38386 - DNA, 2625 bp, synthetic construct
  source 1..2625: mol_type = other DNA
atggccttaccagtgaccgccttgctcctgccgctggccttgctgctccacgccgccaggccgctcgaggaggcctctacaaagggaccctccgtgtttcctctggctcccagcagcaagtctacaagcggaggaacagccgctctgggctgcctggtcaaggattactttcccgagcctgtgaccgtgtcctggaatagcggagcactgacaagcggcgtgcacacctttccagccgtgctgcaaagcagcggcctgtactctctgagcagcgtggtcacagtgcctagctctagcctgggcacccagacctacatctgcaatgtgaaccacaagcctagcaacaccaaggtggacaagagagtggaacccaagagctgtggcagagccgattgcggctttaccagcgagagctaccagcagggcgtgctgagcgccaccatcctgtacgagatcctgctgggcaaggccaccctgtacgccgtgctggtgtctgccctggtgctgatggctatggtcaagcggaaggacagccggggaagggccaagcgatctggatctggagcaacaaacttctcactactcaaacaagcaggtgacgtggaggagaatcccgggcctactagcatggccttaccagtgaccgccttgctcctgccgctggccttgctgctccacgccgccaggccggacatcgtgatgacacagagccctgatagcctggccgtgtctctgggagagagagccaccattaactgcaaggccagccagagcgtggactacgacggcgacagcttcctgaactggtatcagcagaagcccggccagcctcctaagctgctgatctacgccgccagcaatctggaaagcggcgtgccaagcagattttccggctctggcagcggcaccgatttcaccctgacaatatccagcctccagcctgaggacgtggccgtgtactactgccagcagagcaacgacgaccctctgacctttggacagggcaccaaggtggaaatcaaaggcggaggcggaagtggaggcggaggatctggcggcggaggctctgaagtccaacttgtggagtctggagggggcctggtgcagcccggcggctctctcagactgtcttgtgcggcaagcggctacaccttcacctcttactggatagaatgggtgaggcaggcacctggaaagggactggagtggattggagagattctgccaggagggggagatacaaattacaatgaaatcttcaaggggcgggccaccttttcagcggataccagcaagaatacagcttacctgcagatgaatagcctccgggcagaagataccgctgtttattattgcacgagacgggtgccaataagactggactattgggggcaagggactcttgtcaccgtcagttcaacgcgtggacagcctaaggccaatcctaccgtgacactgttccctccaagcagcgaagaactccaggccaacaaggccacacttgtgtgcctgatctccgacttctaccctggggctgtgacagtggcttggaaggccgatggatctcctgtgaaagccggcgtggaaaccaccaagccatccaagcagagcaacaacaaatacgccgccagctcctacctgagcctgacacctgagcagtggaagtcccacagatcctacagctgccaagtgacccacgaaggcagcaccgtggaaaagacagtggcccctacagagtgcagcatccccgaggacacattcttcccaagccccgagagcagctgcgacgtgaagctggtggaaaagagcttcgagacagacaccaacctgaacttccagaacctgagcgtgatcggcttcagaatcctgctgctgaaagtggccggctttaacctgctgatgaccctgcggctgtggtccagccgcgccaagagaagcggatctggcgtgaagcagaccctgaatttcgacctgctgaagctggctggcgacgtggaatccaacccaggcccttctagaggccatatgaccgagtacaagcccacggtgcgcctcgccacccgcgacgacgtccccagggccgtacgcaccctcgccgccgcgttcgccgactaccccgccacgcgccacaccgtcgatccggaccgccacatcgagcgggtcaccgagctgcaagaactcttcctcacgcgcgtcgggctcgacatcggcaaggtgtgggtcgcggacgacggcgccgcggtggcggtctggaccacgccggagagcgtcgaagcgggggcggtgttcgccgagatcggcccgcgcatggccgagttgagcggttcccggctggccgcgcagcaacagatggaaggcctcctggcgccgcaccggcccaaggagcccgcgtggttcctggccaccgtcggcgtctcgcccgaccaccagggcaagggtctgggcagcgccgtcgtgctccccggagtggaggcggccgagcgcgccggggtgcccgccttcctggagacctccgcgccccgcaacctccccttctacgagcggctcggcttcaccgtcaccgccgacgtcgaggtgcccgaaggaccgcgcacctggtgcatgacccgcaagcccggtgcctga

SEQ ID NO: 38387 - DNA, 2625 bp, synthetic construct
  source 1..2625: mol_type = other DNA
atggccttaccagtgaccgccttgctcctgccgctggccttgctgctccacgccgccaggccgctcgaggaggcctctacaaagggaccctccgtgtttcctctggctcccagcagcaagtctacaagcggaggaacagccgctctgggctgcctggtcaaggattactttcccgagcctgtgaccgtgtcctggaatagcggagcactgacaagcggcgtgcacacctttccagccgtgctgcaaagcagcggcctgtactctctgagcagcgtggtcacagtgcctagctctagcctgggcacccagacctacatctgcaatgtgaaccacaagcctagcaacaccaaggtggacaagagagtggaacccaagagctgtatccccgaggacacattcttcccaagccccgagagcagctgcgacgtgaagctggtggaaaagagcttcgagacagacaccaacctgaacttccagaacctgagcgtgatcggcttcagaatcctgctgctgaaagtggccggctttaacctgctgatgaccctgcggctgtggtccagcagggccaagcgatctggatctggagcaacaaacttctcactactcaaacaagcaggtgacgtggaggagaatcccgggcctactagcatggccttaccagtgaccgccttgctcctgccgctggccttgctgctccacgccgccaggccggacatcgtgatgacacagagccctgatagcctggccgtgtctctgggagagagagccaccattaactgcaaggccagccagagcgtggactacgacggcgacagcttcctgaactggtatcagcagaagcccggccagcctcctaagctgctgatctacgccgccagcaatctggaaagcggcgtgccaagcagattttccggctctggcagcggcaccgatttcaccctgacaatatccagcctccagcctgaggacgtggccgtgtactactgccagcagagcaacgacgaccctctgacctttggacagggcaccaaggtggaaatcaaaggcggaggcggaagtggaggcggaggatctggcggcggaggctctgaagtccaacttgtggagtctggagggggcctggtgcagcccggcggctctctcagactgtcttgtgcggcaagcggctacaccttcacctcttactggatagaatgggtgaggcaggcacctggaaagggactggagtggattggagagattctgccaggagggggagatacaaattacaatgaaatcttcaaggggcgggccaccttttcagcggataccagcaagaatacagcttacctgcagatgaatagcctccgggcagaagataccgctgtttattattgcacgagacgggtgccaataagactggactattgggggcaagggactcttgtcaccgtcagttcaacgcgtggacagcctaaggccaatcctaccgtgacactgttccctccaagcagcgaagaactccaggccaacaaggccacacttgtgtgcctgatctccgacttctaccctggggctgtgacagtggcttggaaggccgatggatctcctgtgaaagccggcgtggaaaccaccaagccatccaagcagagcaacaacaaatacgccgccagctcctacctgagcctgacacctgagcagtggaagtcccacagatcctacagctgccaagtgacccacgaaggcagcaccgtggaaaagacagtggcccctacagagtgcagcggcagagccgattgcggctttaccagcgagagctaccagcagggcgtgctgagcgccaccatcctgtacgagatcctgctgggcaaggccaccctgtacgccgtgctggtgtctgccctggtgctgatggctatggtcaagcggaaggacagccggggacgcgccaagagaagcggatctggcgtgaagcagaccctgaatttcgacctgctgaagctggctggcgacgtggaatccaacccaggcccttctagaggccatatgaccgagtacaagcccacggtgcgcctcgccacccgcgacgacgtccccagggccgtacgcaccctcgccgccgcgttcgccgactaccccgccacgcgccacaccgtcgatccggaccgccacatcgagcgggtcaccgagctgcaagaactcttcctcacgcgcgtcgggctcgacatcggcaaggtgtgggtcgcggacgacggcgccgcggtggcggtctggaccacgccggagagcgtcgaagcgggggcggtgttcgccgagatcggcccgcgcatggccgagttgagcggttcccggctggccgcgcagcaacagatggaaggcctcctggcgccgcaccggcccaaggagcccgcgtggttcctggccaccgtcggcgtctcgcccgaccaccagggcaagggtctgggcagcgccgtcgtgctccccggagtggaggcggccgagcgcgccggggtgcccgccttcctggagacctccgcgccccgcaacctccccttctacgagcggctcggcttcaccgtcaccgccgacgtcgaggtgcccgaaggaccgcgcacctggtgcatgacccgcaagcccggtgcctga

SEQ ID NO: 38388 - DNA, 1863 bp, synthetic construct
  source 1..1863: mol_type = other DNA
atggccttaccagtgaccgccttgctcctgccgctggccttgctgctccacgccgccaggccggacatcgtgatgacacagagccctgatagcctggccgtgtctctgggagagagagccaccattaactgcaaggccagccagagcgtggactacgacggcgacagcttcctgaactggtatcagcagaagcccggccagcctcctaagctgctgatctacgccgccagcaatctggaaagcggcgtgccaagcagattttccggctctggcagcggcaccgatttcaccctgacaatatccagcctccagcctgaggacgtggccgtgtactactgccagcagagcaacgacgaccctctgacctttggacagggcaccaaggtggaaatcaaactcgaggacctgaagaacgtgttcccacctgaggtggccgtgttcgagcctagcgaggccgagatcagccacacccagaaagccaccctcgtgtgcctggctaccggcttctaccccgaccatgtggaactgtcttggtgggtcaacggcaaagaggtgcacagcggcgtgtgtaccgacccccagccactgaaagaacagcccgccctgaacgacagccggtactgcctgagcagcagactgagagtgtccgccaccttctggcagaacccccggaaccacttcagatgccaggtgcagttctacggcctgagcgagaacgacgagtggacccaggacagagccaagcccgtgacccagatcgtgtctgccgaagcctggggcagagccgatagcggctttaccagcgagagctaccagcagggcgtgctgagcgccaccatcctgtacgagatcctgctgggcaaggccaccctgtacgccgtgctggtgtctgccctggtgctgatggctatggtcaagcggaaggacagccggggaagggccaagcgatctggatctggagcaacaaacttctcactactcaaacaagcaggtgacgtggaggagaatcccgggcctactagtatggactggatttggcgcatccttttccttgtcggcgctgctaccggcgcgcattccttcgaagaagtccaacttgtggagtctggagggggcctggtgcagcccggcggctctctcagactgtcttgtgcggcaagcggctacaccttcacctcttactggatagaatgggtgaggcaggcacctggaaagggactggagtggattggagagattctgccaggagggggagatacaaattacaatgaaatcttcaaggggcgggccaccttttcagcggataccagcaagaatacagcttacctgcagatgaatagcctccgggcagaagataccgctgtttattattgcacgagacgggtgccaataagactggactattgggggcaagggactcttgtcaccgtcagttcaacgcgtatccagaaccctgatcctgccgtgtaccagctgcgggatagcaagagcagcgacaagagcgtgtgtctgttcaccgacttcgacagccagaccaacgtgtcccagagcaaggactccgacgtgtacatcaccgataagtgcgtgctggacatgcggagcatggacttcaagagcaactccgccgtggcctggtccaacaagtccgatttcgcctgcgccaacgccttcaacaacagcattatccccgaggacacattcttcccaagccccgagagcagcagcgacgtgaagctggtggaaaagagcttcgagacagacaccaacctgaacttccagaacctgagcgtgatcggcttcagaatcctgctgctgaaagtggccggctttaacctgctgatgaccctgcggctgtggtccagc

SEQ ID NO: 38389 - DNA, 2703 bp, synthetic construct
  source 1..2703: mol_type = other DNA
atggccttaccagtgaccgccttgctcctgccgctggccttgctgctccacgccgccaggccggaggttcagctgcttgagtctggcggaggactggttcaacctggcggaagcctgagactgtcttgtgccgcctctggcagaaccttcagcatgggctggtatagacaggcccctggcaagggcctcgaatttgtgtctgccatcacatacagcggcggcagcccttactacgccgattctgtgaagggcagattcaccatcagccgggacaacagcaagaacaccgtgtacctccagatgaacagcctgagagccgaggacaccgccgtgtactactgtgccgccaatccaacctacggcagcgactggaatgccgagaattggggccagggcacactggtcacagtgtctagtggtaccggcggaggcggatctggcggcggaggtagcggtggcggaggatctgaattcgacatcgtgatgacacagagccctgatagcctggccgtgtctctgggagagagagccaccattaactgcaaggccagccagagcgtggactacgacggcgacagcttcctgaactggtatcagcagaagcccggccagcctcctaagctgctgatctacgccgccagcaatctggaaagcggcgtgccaagcagattttccggctctggcagcggcaccgatttcaccctgacaatatccagcctccagcctgaggacgtggccgtgtactactgccagcagagcaacgacgaccctctgacctttggacagggcaccaaggtggaaatcaaactcgagatccagaaccctgatcctgccgtgtaccagctgcgggatagcaagagcagcgacaagagcgtgtgtctgttcaccgacttcgacagccagaccaacgtgtcccagagcaaggactccgacgtgtacatcaccgataagtgcgtgctggacatgcggagcatggacttcaagagcaactccgccgtggcctggtccaacaagtccgatttcgcctgcgccaacgccttcaacaacagcattatccccgaggacacattcttcccaagcagcgacgtgccctgcgacgtgaagctggtggaaaagagcttcgagacagacaccaacctgaacttccagaacctgagcgtgatcggcttcagaatcctgctgctgaaagtggccggctttaacctgctgatgaccctgcggctgtggtccagccgcgccaagagaagcggatctggcgtgaagcagaccctgaatttcgacctgctgaagctggctggcgacgtggaatccaacccaggccctactagtaccatggactggatttggcgcatccttttccttgtcggcgctgctaccggcacccattccgggcccgaagtgcaactggttgaatccggtggcggcctggtgcaacccggcggatctctcagacttagctgtgccgcctccggcagaaccttcacaatgggatggtacaggcaggctccagggaaagagagagagttcgtcgccgccatctctctgtctcccacactggcctactacgccgactctgtgaaaggccggttcaccatctccagagataatagcaagaacaccgtggtgctgcaaatgaactctctgagagccgaggatacagccctgtactattgtgccgctgaccggaagtccgtgatgagcatcagacccgattactggggacagggcacactggtcacagtgtctagtggatccggcggcggaggatctggcggaggcggatctgggggcggaggctctttcgaagaagtccaacttgtggagtctggagggggcctggtgcagcccggcggctctctcagactgtcttgtgcggcaagcggctacaccttcacctcttactggatagaatgggtgaggcaggcacctggaaagggactggagtggattggagagattctgccaggagggggagatacaaattacaatgaaatcttcaaggggcgggccaccttttcagcggataccagcaagaatacagcttacctgcagatgaatagcctccgggcagaagataccgctgtttattattgcacgagacgggtgccaataagactggactattgggggcaagggactcttgtcaccgtcagttcaacgcgtgaggacctgaagaacgtgttcccacctgaggtggccgtgttcgagcctagcaaggccgagatcgcccacacccagaaagccaccctcgtgtgcctggctaccggcttctaccccgaccatgtggaactgtcttggtgggtcaacggcaaagaggtgcacagcggcgtgtgtaccgacccccagccactgaaagaacagcccgccctgaacgacagccggtactgcctgagcagcagactgagagtgtccgccaccttctggcagaacccccggaaccacttcagatgccaggtgcagttctacggcctgagcgagaacgacgagtggacccaggacagagccaagcccgtgacccagatcgtgtctgccgaagcctggggcagagccgattgcggcatcaccagcgccagctaccaccagggcgtgctgagcgccaccatcctgtacgagatcctgctgggcaaggccaccctgtacgccgtgctggtgtctgccctggtgctgatggctatggtcaagcggaaggacagccggggataa

SEQ ID NO: 38390 - DNA, 2703 bp, synthetic construct
  source 1..2703: mol_type = other DNA
atggccttaccagtgaccgccttgctcctgccgctggccttgctgctccacgccgccaggccggaagtgcagctggttgaatctggcggaggactggttcaggctggcggatctctgagactgtcttgtgccgccagcggcagaacctttagcatgggctggtttagacaggcccctggcaaagagagagagttcgtcgccgccatcacatactctggcggcagcccttactacgccgactctgtgaagggcagattcaccatcagccgggacaacgccaagaacaccgtgtacctccagatgaacagcctgaagcctgaggacaccgccgtgtactactgcgccgccaatccaacatacggcagcgactggaacgccgagaattggggccagggaacccaagtgacagtgtctagcggtaccggcggaggcggatctggcggcggaggtagcggtggcggaggatctgaattcgacatcgtgatgacacagagccctgatagcctggccgtgtctctgggagagagagccaccattaactgcaaggccagccagagcgtggactacgacggcgacagcttcctgaactggtatcagcagaagcccggccagcctcctaagctgctgatctacgccgccagcaatctggaaagcggcgtgccaagcagattttccggctctggcagcggcaccgatttcaccctgacaatatccagcctccagcctgaggacgtggccgtgtactactgccagcagagcaacgacgaccctctgacctttggacagggcaccaaggtggaaatcaaactcgagatccagaaccctgatcctgccgtgtaccagctgcgggatagcaagagcagcgacaagagcgtgtgtctgttcaccgacttcgacagccagaccaacgtgtcccagagcaaggactccgacgtgtacatcaccgataagtgcgtgctggacatgcggagcatggacttcaagagcaactccgccgtggcctggtccaacaagtccgatttcgcctgcgccaacgccttcaacaacagcattatccccgaggacacattcttcccaagcagcgacgtgccctgcgacgtgaagctggtggaaaagagcttcgagacagacaccaacctgaacttccagaacctgagcgtgatcggcttcagaatcctgctgctgaaagtggccggctttaacctgctgatgaccctgcggctgtggtccagccgcgccaagagaagcggatctggcgtgaagcagaccctgaatttcgacctgctgaagctggctggcgacgtggaatccaacccaggccctactagtaccatggactggatttggcgcatccttttccttgtcggcgctgctaccggcgcccattccgggcccgaagtgcaactggttgaatccggtggcggcctggtgcaacccggcggatctctcagacttagctgtgccgcctccggcagaaccttcacaatgggatggtacaggcaggctccagggaaagagagagagttcgtcgccgccatctctctgtctcccacactggcctactacgccgactctgtgaaaggccggttcaccatctccagagataatagcaagaacaccgtggtgctgcaaatgaactctctgagagccgaggatacagccctgtactattgtgccgctgaccggaagtccgtgatgagcatcagacccgattactggggacagggcacactggtcacagtgtctagtggatccggcggcggaggatctggcggaggcggatctgggggcggaggctctttcgaagaagtccaacttgtggagtctggagggggcctggtgcagcccggcggctctctcagactgtcttgtgcggcaagcggctacaccttcacctcttactggatagaatgggtgaggcaggcacctggaaagggactggagtggattggagagattctgccaggagggggagatacaaattacaatgaaatcttcaaggggcgggccaccttttcagcggataccagcaagaatacagcttacctgcagatgaatagcctccgggcagaagataccgctgtttattattgcacgagacgggtgccaataagactggactattgggggcaagggactcttgtcaccgtcagttcaacgcgtgaggacctgaagaacgtgttcccacctgaggtggccgtgttcgagcctagcaaggccgagatcgcccacacccagaaagccaccctcgtgtgcctggctaccggcttctaccccgaccatgtggaactgtcttggtgggtcaacggcaaagaggtgcacagcggcgtgtgtaccgacccccagccactgaaagaacagcccgccctgaacgacagccggtactgcctgagcagcagactgagagtgtccgccaccttctggcagaacccccggaaccacttcagatgccaggtgcagttctacggcctgagcgagaacgacgagtggacccaggacagagccaagcccgtgacccagatcgtgtctgccgaagcctggggcagagccgattgcggcatcaccagcgccagctaccaccagggcgtgctgagcgccaccatcctgtacgagatcctgctgggcaaggccaccctgtacgccgtgctggtgtctgccctggtgctgatggctatggtcaagcggaaggacagccggggataa

SEQ ID NO: 38391 - DNA, 2694 bp, synthetic construct
  source 1..2694: mol_type = other DNA
atggccttaccagtgaccgccttgctcctgccgctggccttgctgctccacgccgccaggccggaagtgcagctggttgaatctggcggaggactggttcaggctggcggatctctgagactgtcttgtgccgccagcggcagaacctttagcatgggctggtttagacaggcccctggcaaagagagagagttcgtcgccgccatcacatactctggcggcagcccttactacgccgactctgtgaagggcagattcaccatcagccgggacaacgccaagaacaccgtgtacctccagatgaacagcctgaagcctgaggacaccgccgtgtactactgcgccgccaatccaacatacggcagcgactggaacgccgagaattggggccagggaacccaagtgacagtgtctagcggtaccggcggaggcggatctggcggcggaggtagcggtggcggaggatctgaattcgacatcgtgatgacacagagccctgatagcctggccgtgtctctgggagagagagccaccattaactgcaaggccagccagagcgtggactacgacggcgacagcttcctgaactggtatcagcagaagcccggccagcctcctaagctgctgatctacgccgccagcaatctggaaagcggcgtgccaagcagattttccggctctggcagcggcaccgatttcaccctgacaatatccagcctccagcctgaggacgtggccgtgtactactgccagcagagcaacgacgaccctctgacctttggacagggcaccaaggtggaaatcaaactcgaggacctgaagaacgtgttcccacctgaggtggccgtgttcgagcctagcgaggccgagatcagccacacccagaaagccaccctcgtgtgcctggctaccggcttctaccccgaccatgtggaactgtcttggtgggtcaacggcaaagaggtgcacagcggcgtgtgtaccgacccccagccactgaaagaacagcccgccctgaacgacagccggtactgcctgagcagcagactgagagtgtccgccaccttctggcagaacccccggaaccacttcagatgccaggtgcagttctacggcctgagcgagaacgacgagtggacccaggacagagccaagcccgtgacccagatcgtgtctgccgaagcctggggcagagccgattgcggctttaccagcgagagctaccagcagggcgtgctgagcgccaccatcctgtacgagatcctgctgggcaaggccaccctgtacgccgtgctggtgtctgccctggtgctgatggctatggtcaagcggaaggacagccggggaagggccaagcgatctggatctggagcaacaaacttctcactactcaaacaagcaggtgacgtggaggagaatcccgggcctactagtgccaccatggactggatttggcgcatccttttccttgtcggcgctgctaccggcgcccattccgggcccgaagtgcaactggttgaatccggtggcggcctggtgcaagcaggcggatctctcagacttagctgtgccgcctccggcagaaccttcacaatgggatggtttaggcaggctccagggaaagagagagagttcgtcgccgccatctctctgtctcccacactggcctactacgccgactctgtgaaaggccggttcaccatctccagagataatgccaagaacaccgtggtgctgcaaatgaactctctgaaacccgaggatacagccctgtactattgtgccgctgaccggaagtccgtgatgagcatcagacccgattactggggacagggcacacaagtcacagtgtcctctggatccggcggcggaggatctggcggaggcggatctgggggcggaggctctttcgaagaagtccaacttgtggagtctggagggggcctggtgcagcccggcggctctctcagactgtcttgtgcggcaagcggctacaccttcacctcttactggatagaatgggtgaggcaggcacctggaaagggactggagtggattggagagattctgccaggagggggagatacaaattacaatgaaatcttcaaggggcgggccaccttttcagcggataccagcaagaatacagcttacctgcagatgaatagcctccgggcagaagataccgctgtttattattgcacgagacgggtgccaataagactggactattgggggcaagggactcttgtcaccgtcagttcaacgcgtatccagaaccctgatcctgccgtgtaccagctgcgggatagcaagagcagcgacaagagcgtgtgtctgttcaccgacttcgacagccagaccaacgtgtcccagagcaaggactccgacgtgtacatcaccgataagtgcgtgctggacatgcggagcatggacttcaagagcaactccgccgtggcctggtccaacaagtccgatttcgcctgcgccaacgccttcaacaacagcattatccccgaggacacattcttcccaagccccgagagcagctgcgacgtgaagctggtggaaaagagcttcgagacagacaccaacctgaacttccagaacctgagcgtgatcggcttcagaatcctgctgctgaaagtggccggctttaacctgctgatgaccctgcggctgtggtccagctaa

SEQ ID NO: 38392 - DNA, 2307 bp, synthetic construct
  source 1..2307: mol_type = other DNA
atggccttaccagtgaccgccttgctcctgccgctggccttgctgctccacgccgccaggccggaagtgcagctggttgaatctggcggaggactggttcagcctggcggatctctgagactgagctgtgaagccagcggcttcgccagcgacgattacatcatcggctggttcagacaggcccctggcaaagagagagagggcgtcagctgcatcagctctaagtacgccaacaccgtgtacaccgacagcgtgaagggcagattcagactgagcagaggcaccgccaagaataccgtgtacctccagatgagcgccctgaagcctgaggataccgccgtgtactactgcgctatggacagccgcagagtgacatgccctgagatcagcaccatgcaccggaacttcgattcttggggccagggcacactggtcacagtgtcatctggtaccggcggaggcggatctggcggcggaggtagcggtggcggaggatctgaattcgacatcgtgatgacacagagccctgatagcctggccgtgtctctgggagagagagccaccattaactgcaaggccagccagagcgtggactacgacggcgacagcttcctgaactggtatcagcagaagcccggccagcctcctaagctgctgatctacgccgccagcaatctggaaagcggcgtgccaagcagattttccggctctggcagcggcaccgatttcaccctgacaatatccagcctccagcctgaggacgtggccgtgtactactgccagcagagcaacgacgaccctctgacctttggacagggcaccaaggtggaaatcaaactcgaggacctgaagaacgtgttcccacctgaggtggccgtgttcgagcctagcaaggccgagatcgcccacacccagaaagccaccctcgtgtgcctggctaccggcttctaccccgaccatgtggaactgtcttggtgggtcaacggcaaagaggtgcacagcggcgtgtgtaccgacccccagccactgaaagaacagcccgccctgaacgacagccggtactgcctgagcagcagactgagagtgtccgccaccttctggcagaacccccggaaccacttcagatgccaggtgcagttctacggcctgagcgagaacgacgagtggacccaggacagagccaagcccgtgacccagatcgtgtctgccgaagcctggggcagagccgattgcggcatcaccagcgccagctaccaccagggcgtgctgagcgccaccatcctgtacgagatcctgctgggcaaggccaccctgtacgccgtgctggtgtctgccctggtgctgatggctatggtcaagcggaaggacagccggggaagggccaagcgatctggatctggagcaacaaacttctcactactcaaacaagcaggtgacgtggaggagaatcccgggcctactagtatggactggatttggcgcatccttttccttgtcggcgctgctaccggcgcgcattccttcgaagaagtccaacttgtggagtctggagggggcctggtgcagcccggcggctctctcagactgtcttgtgcggcaagcggctacaccttcacctcttactggatagaatgggtgaggcaggcacctggaaagggactggagtggattggagagattctgccaggagggggagatacaaattacaatgaaatcttcaaggggcgggccaccttttcagcggataccagcaagaatacagcttacctgcagatgaatagcctccgggcagaagataccgctgtttattattgcacgagacgggtgccaataagactggactattgggggcaagggactcttgtcaccgtcagttcaacgcgtatccagaaccctgatcctgccgtgtaccagctgcgggatagcaagagcagcgacaagagcgtgtgtctgttcaccgacttcgacagccagaccaacgtgtcccagagcaaggactccgacgtgtacatcaccgataagtgcgtgctggacatgcggagcatggacttcaagagcaactccgccgtggcctggtccaacaagtccgatttcgcctgcgccaacgccttcaacaacagcattatccccgaggacacattcttcccaagcagcgacgtgccctgcgacgtgaagctggtggaaaagagcttcgagacagacaccaacctgaacttccagaacctgagcgtgatcggcttcagaatcctgctgctgaaagtggccggctttaacctgctgatgaccctgcggctgtggtccagctaa

SEQ ID NO: 38393 - DNA, 2280 bp, synthetic construct
  source 1..2280: mol_type = other DNA
atggccttaccagtgaccgccttgctcctgccgctggccttgctgctccacgccgccaggccggacatcgtgatgacacagagccctgatagcctggccgtgtctctgggagagagagccaccattaactgcaaggccagccagagcgtggactacgacggcgacagcttcctgaactggtatcagcagaagcccggccagcctcctaagctgctgatctacgccgccagcaatctggaaagcggcgtgccaagcagattttccggctctggcagcggcaccgatttcaccctgacaatatccagcctccagcctgaggacgtggccgtgtactactgccagcagagcaacgacgaccctctgacctttggacagggcaccaaggtggaaatcaaactcgaggacctgaagaacgtgttcccacctgaggtggccgtgttcgagcctagcgaggccgagatcagccacacccagaaagccaccctcgtgtgcctggctaccggcttctaccccgaccatgtggaactgtcttggtgggtcaacggcaaagaggtgcacagcggcgtgtgtaccgacccccagccactgaaagaacagcccgccctgaacgacagccggtactgcctgagcagcagactgagagtgtccgccaccttctggcagaacccccggaaccacttcagatgccaggtgcagttctacggcctgagcgagaacgacgagtggacccaggacagagccaagcccgtgacccagatcgtgtctgccgaagcctggggcagagccgattgcggctttaccagcgagagctaccagcagggcgtgctgagcgccaccatcctgtacgagatcctgctgggcaaggccaccctgtacgccgtgctggtgtctgccctggtgctgatggctatggtcaagcggaaggacagccggggaagggccaagcgatctggatctggagcaacaaacttctcactactcaaacaagcaggtgacgtggaggagaatcccgggcctactagtaccatggactggatttggcgcatccttttccttgtcggcgctgctaccggcgcccattccgggcccgaagtgcaactggttgaatccggtggcggcctggtgcaacccggcggatctctcagacttagctgtgccgcctccggcagaaccttcacaatgggatggtacaggcaggctccagggaaagagagagagttcgtcgccgccatctctctgtctcccacactggcctactacgccgactctgtgaaaggccggttcaccatctccagagataatagcaagaacaccgtggtgctgcaaatgaactctctgagagccgaggatacagccctgtactattgtgccgctgaccggaagtccgtgatgagcatcagacccgattactggggacagggcacactggtcacagtgtctagtggatccggcggcggaggatctggcggaggcggatctgggggcggaggctctttcgaagaagtccaacttgtggagtctggagggggcctggtgcagcccggcggctctctcagactgtcttgtgcggcaagcggctacaccttcacctcttactggatagaatgggtgaggcaggcacctggaaagggactggagtggattggagagattctgccaggagggggagatacaaattacaatgaaatcttcaaggggcgggccaccttttcagcggataccagcaagaatacagcttacctgcagatgaatagcctccgggcagaagataccgctgtttattattgcacgagacgggtgccaataagactggactattgggggcaagggactcttgtcaccgtcagttcaacgcgtatccagaaccctgatcctgccgtgtaccagctgcgggatagcaagagcagcgacaagagcgtgtgtctgttcaccgacttcgacagccagaccaacgtgtcccagagcaaggactccgacgtgtacatcaccgataagtgcgtgctggacatgcggagcatggacttcaagagcaactccgccgtggcctggtccaacaagtccgatttcgcctgcgccaacgccttcaacaacagcattatccccgaggacacattcttcccaagccccgagagcagctgcgacgtgaagctggtggaaaagagcttcgagacagacaccaacctgaacttccagaacctgagcgtgatcggcttcagaatcctgctgctgaaagtggccggctttaacctgctgatgaccctgcggctgtggtccagctaa

SEQ ID NO: 38394 - DNA, 2298 bp, synthetic construct
  source 1..2298: mol_type = other DNA
atggccttaccagtgaccgccttgctcctgccgctggccttgctgctccacgccgccaggccggacatcgtgatgacacagagccctgatagcctggccgtgtctctgggagagagagccaccattaactgcaaggccagccagagcgtggactacgacggcgacagcttcctgaactggtatcagcagaagcccggccagcctcctaagctgctgatctacgccgccagcaatctggaaagcggcgtgccaagcagattttccggctctggcagcggcaccgatttcaccctgacaatatccagcctccagcctgaggacgtggccgtgtactactgccagcagagcaacgacgaccctctgacctttggacagggcaccaaggtggaaatcaaactcgaggacctgaagaacgtgttcccacctgaggtggccgtgttcgagcctagcgaggccgagatcagccacacccagaaagccaccctcgtgtgcctggctaccggcttctaccccgaccatgtggaactgtcttggtgggtcaacggcaaagaggtgcacagcggcgtgtgtaccgacccccagccactgaaagaacagcccgccctgaacgacagccggtactgcctgagcagcagactgagagtgtccgccaccttctggcagaacccccggaaccacttcagatgccaggtgcagttctacggcctgagcgagaacgacgagtggacccaggacagagccaagcccgtgacccagatcgtgtctgccgaagcctggggcagagccgattgcggctttaccagcgagagctaccagcagggcgtgctgagcgccaccatcctgtacgagatcctgctgggcaaggccaccctgtacgccgtgctggtgtctgccctggtgctgatggctatggtcaagcggaaggacagccggggaagggccaagcgatctggatctggagcaacaaacttctcactactcaaacaagcaggtgacgtggaggagaatcccgggcctactagtaccatggactggatttggcgcatccttttccttgtcggcgctgctaccggcgcccattccgggccccaggtgcagctggttgaatctggcggaggactggttcagcctggcggatctctgagactgtcttgtgccgccagcggcaacatcaacagcagaaactgcatgggctggttcagacaggcccctggcaagggaagagaaggcgtggcagctatcggccaagtgaccggcagaacctactacgtggacagcgtgaagggcagattcaccatcagcctggacaacagcaagaacaccctgtacctccagatgaacagcctgagagccgaggacaccgccgtgtactattgtgctgctgcccctggctgtctgctgtctgcacttagaagcgccgactacagaaactggggccagggcacactggtcaccgtttcttctggatccggcggcggaggatctggcggaggcggatctgggggcggaggctctttcgaagaagtccaacttgtggagtctggagggggcctggtgcagcccggcggctctctcagactgtcttgtgcggcaagcggctacaccttcacctcttactggatagaatgggtgaggcaggcacctggaaagggactggagtggattggagagattctgccaggagggggagatacaaattacaatgaaatcttcaaggggcgggccaccttttcagcggataccagcaagaatacagcttacctgcagatgaatagcctccgggcagaagataccgctgtttattattgcacgagacgggtgccaataagactggactattgggggcaagggactcttgtcaccgtcagttcaacgcgtatccagaaccctgatcctgccgtgtaccagctgcgggatagcaagagcagcgacaagagcgtgtgtctgttcaccgacttcgacagccagaccaacgtgtcccagagcaaggactccgacgtgtacatcaccgataagtgcgtgctggacatgcggagcatggacttcaagagcaactccgccgtggcctggtccaacaagtccgatttcgcctgcgccaacgccttcaacaacagcattatccccgaggacacattcttcccaagccccgagagcagctgcgacgtgaagctggtggaaaagagcttcgagacagacaccaacctgaacttccagaacctgagcgtgatcggcttcagaatcctgctgctgaaagtggccggctttaacctgctgatgaccctgcggctgtggtccagc

SEQ ID NO: 38395 - DNA, 2301 bp, synthetic construct
  source 1..2301: mol_type = other DNA
atggccttaccagtgaccgccttgctcctgccgctggccttgctgctccacgccgccaggccggacatcgtgatgacacagagccctgatagcctggccgtgtctctgggagagagagccaccattaactgcaaggccagccagagcgtggactacgacggcgacagcttcctgaactggtatcagcagaagcccggccagcctcctaagctgctgatctacgccgccagcaatctggaaagcggcgtgccaagcagattttccggctctggcagcggcaccgatttcaccctgacaatatccagcctccagcctgaggacgtggccgtgtactactgccagcagagcaacgacgaccctctgacctttggacagggcaccaaggtggaaatcaaactcgaggacctgaagaacgtgttcccacctgaggtggccgtgttcgagcctagcgaggccgagatcagccacacccagaaagccaccctcgtgtgcctggctaccggcttctaccccgaccatgtggaactgtcttggtgggtcaacggcaaagaggtgcacagcggcgtgtgtaccgacccccagccactgaaagaacagcccgccctgaacgacagccggtactgcctgagcagcagactgagagtgtccgccaccttctggcagaacccccggaaccacttcagatgccaggtgcagttctacggcctgagcgagaacgacgagtggacccaggacagagccaagcccgtgacccagatcgtgtctgccgaagcctggggcagagccgattgcggctttaccagcgagagctaccagcagggcgtgctgagcgccaccatcctgtacgagatcctgctgggcaaggccaccctgtacgccgtgctggtgtctgccctggtgctgatggctatggtcaagcggaaggacagccggggaagggccaagcgatctggatctggagcaacaaacttctcactactcaaacaagcaggtgacgtggaggagaatcccgggcctactagtaccatggactggatttggcgcatccttttccttgtcggcgctgctaccggcgcccattccgggccccaggtgcagctggttgaatctggcggaggatctgttcaggctggcggctctctgagactgtcttgtggcgcttccggcaacatcagcagcagaaactgcatgggctggttcagacaggcccctggcaaagagagagaaggcgttgccgccatcggacaagtgaccggcagatcctactacgtggacagcgtgaagggcagattcaccatcagcctggacaacgccaagaacaccctgtacctccagatgaacacactgaagcccgaggacaccgccatgtactactgtgctgctgcccctggctgtctgctgtctgcacttagaagcgccgactacagaaactggggccagggaacccaagtgacagtgtctagtggatccggcggcggaggatctggcggaggcggatctgggggcggaggctctttcgaagaagtccaacttgtggagtctggagggggcctggtgcagcccggcggctctctcagactgtcttgtgcggcaagcggctacaccttcacctcttactggatagaatgggtgaggcaggcacctggaaagggactggagtggattggagagattctgccaggagggggagatacaaattacaatgaaatcttcaaggggcgggccaccttttcagcggataccagcaagaatacagcttacctgcagatgaatagcctccgggcagaagataccgctgtttattattgcacgagacgggtgccaataagactggactattgggggcaagggactcttgtcaccgtcagttcaacgcgtatccagaaccctgatcctgccgtgtaccagctgcgggatagcaagagcagcgacaagagcgtgtgtctgttcaccgacttcgacagccagaccaacgtgtcccagagcaaggactccgacgtgtacatcaccgataagtgcgtgctggacatgcggagcatggacttcaagagcaactccgccgtggcctggtccaacaagtccgatttcgcctgcgccaacgccttcaacaacagcattatccccgaggacacattcttcccaagccccgagagcagctgcgacgtgaagctggtggaaaagagcttcgagacagacaccaacctgaacttccagaacctgagcgtgatcggcttcagaatcctgctgctgaaagtggccggctttaacctgctgatgaccctgcggctgtggtccagctaa

SEQ ID NO: 38396 - DNA, 2724 bp, synthetic construct
  source 1..2724: mol_type = other DNA
atggccttaccagtgaccgccttgctcctgccgctggccttgctgctccacgccgccaggccggaagtgcagctggttgaatctggcggaggactggttcaggctggcggatctctgagactgtcttgtgccgccagcggcagaacctttagcatgggctggtttagacaggcccctggcaaagagagagagttcgtcgccgccatcacatactctggcggcagcccttactacgccgactctgtgaagggcagattcaccatcagccgggacaacgccaagaacaccgtgtacctccagatgaacagcctgaagcctgaggacaccgccgtgtactactgcgccgccaatccaacatacggcagcgactggaacgccgagaattggggccagggaacccaagtgacagtgtctagcggtaccggcggaggcggatctggcggcggaggtagcggtggcggaggatctgaattcgacatcgtgatgacacagagccctgatagcctggccgtgtctctgggagagagagccaccattaactgcaaggccagccagagcgtggactacgacggcgacagcttcctgaactggtatcagcagaagcccggccagcctcctaagctgctgatctacgccgccagcaatctggaaagcggcgtgccaagcagattttccggctctggcagcggcaccgatttcaccctgacaatatccagcctccagcctgaggacgtggccgtgtactactgccagcagagcaacgacgaccctctgacctttggacagggcaccaaggtggaaatcaaactcgagatccagaaccctgatcctgccgtgtaccagctgcgggatagcaagagcagcgacaagagcgtgtgtctgttcaccgacttcgacagccagaccaacgtgtcccagagcaaggactccgacgtgtacatcaccgataagtgcgtgctggacatgcggagcatggacttcaagagcaactccgccgtggcctggtccaacaagtccgatttcgcctgcgccaacgccttcaacaacagcattatccccgaggacacattcttcccaagcagcgacgtgccctgcgacgtgaagctggtggaaaagagcttcgagacagacaccaacctgaacttccagaacctgagcgtgatcggcttcagaatcctgctgctgaaagtggccggctttaacctgctgatgaccctgcggctgtggtccagccgcgccaagagaagcggatctggcgtgaagcagaccctgaatttcgacctgctgaagctggctggcgacgtggaatccaacccaggccctactagtaccatggactggatttggcgcatccttttccttgtcggcgctgctaccggcgcccattccgggccccaggtgcagctggttgaatctggcggaggatctgttcaggctggcggctctctgagactgtcttgtggcgcttccggcaacatcagcagcagaaactgcatgggctggttcagacaggcccctggcaaagagagagaaggcgttgccgccatcggacaagtgaccggcagatcctactacgtggacagcgtgaagggcagattcaccatcagcctggacaacgccaagaacaccctgtacctccagatgaacacactgaagcccgaggacaccgccatgtactactgtgctgctgcccctggctgtctgctgtctgcacttagaagcgccgactacagaaactggggccagggaacccaagtgacagtgtctagtggatccggcggcggaggatctggcggaggcggatctgggggcggaggctctttcgaagaagtccaacttgtggagtctggagggggcctggtgcagcccggcggctctctcagactgtcttgtgcggcaagcggctacaccttcacctcttactggatagaatgggtgaggcaggcacctggaaagggactggagtggattggagagattctgccaggagggggagatacaaattacaatgaaatcttcaaggggcgggccaccttttcagcggataccagcaagaatacagcttacctgcagatgaatagcctccgggcagaagataccgctgtttattattgcacgagacgggtgccaataagactggactattgggggcaagggactcttgtcaccgtcagttcaacgcgtgaggacctgaagaacgtgttcccacctgaggtggccgtgttcgagcctagcaaggccgagatcgcccacacccagaaagccaccctcgtgtgcctggctaccggcttctaccccgaccatgtggaactgtcttggtgggtcaacggcaaagaggtgcacagcggcgtgtgtaccgacccccagccactgaaagaacagcccgccctgaacgacagccggtactgcctgagcagcagactgagagtgtccgccaccttctggcagaacccccggaaccacttcagatgccaggtgcagttctacggcctgagcgagaacgacgagtggacccaggacagagccaagcccgtgacccagatcgtgtctgccgaagcctggggcagagccgattgcggcatcaccagcgccagctaccaccagggcgtgctgagcgccaccatcctgtacgagatcctgctgggcaaggccaccctgtacgccgtgctggtgtctgccctggtgctgatggctatggtcaagcggaaggacagccggggataa

SEQ ID NO: 38397 - DNA, 2715 bp, synthetic construct
  source 1..2715: mol_type = other DNA
atggccttaccagtgaccgccttgctcctgccgctggccttgctgctccacgccgccaggccgcaggtgcagctggttgaatctggcggaggatctgttcaggctggcggctctctgagactgtcttgtggcgcttccggcaacatcagcagcagaaactgcatgggctggttcagacaggcccctggcaaagagagagaaggcgttgccgccatcggacaagtgaccggcagatcctactacgtggacagcgtgaagggcagattcaccatcagcctggacaacgccaagaacaccctgtacctccagatgaacacactgaagcccgaggacaccgccatgtactactgtgctgctgcccctggctgtctgctgtctgcacttagaagcgccgactacagaaactggggccagggaacccaagtgacagtgtctagtggtaccggcggaggcggatctggcggcggaggtagcggtggcggaggatctgaattcgacatcgtgatgacacagagccctgatagcctggccgtgtctctgggagagagagccaccattaactgcaaggccagccagagcgtggactacgacggcgacagcttcctgaactggtatcagcagaagcccggccagcctcctaagctgctgatctacgccgccagcaatctggaaagcggcgtgccaagcagattttccggctctggcagcggcaccgatttcaccctgacaatatccagcctccagcctgaggacgtggccgtgtactactgccagcagagcaacgacgaccctctgacctttggacagggcaccaaggtggaaatcaaactcgaggacctgaagaacgtgttcccacctgaggtggccgtgttcgagcctagcgaggccgagatcagccacacccagaaagccaccctcgtgtgcctggctaccggcttctaccccgaccatgtggaactgtcttggtgggtcaacggcaaagaggtgcacagcggcgtgtgtaccgacccccagccactgaaagaacagcccgccctgaacgacagccggtactgcctgagcagcagactgagagtgtccgccaccttctggcagaacccccggaaccacttcagatgccaggtgcagttctacggcctgagcgagaacgacgagtggacccaggacagagccaagcccgtgacccagatcgtgtctgccgaagcctggggcagagccgattgcggctttaccagcgagagctaccagcagggcgtgctgagcgccaccatcctgtacgagatcctgctgggcaaggccaccctgtacgccgtgctggtgtctgccctggtgctgatggctatggtcaagcggaaggacagccggggaagggccaagcgatctggatctggagcaacaaacttctcactactcaaacaagcaggtgacgtggaggagaatcccgggcctactagtgccaccatggactggatttggcgcatccttttccttgtcggcgctgctaccggcgcccattccgggcccgaagtgcaactggttgaatccggtggcggcctggtgcaagcaggcggatctctcagacttagctgtgccgcctccggcagaaccttcacaatgggatggtttaggcaggctccagggaaagagagagagttcgtcgccgccatctctctgtctcccacactggcctactacgccgactctgtgaaaggccggttcaccatctccagagataatgccaagaacaccgtggtgctgcaaatgaactctctgaaacccgaggatacagccctgtactattgtgccgctgaccggaagtccgtgatgagcatcagacccgattactggggacagggcacacaagtcacagtgtcctctggatccggcggcggaggatctggcggaggcggatctgggggcggaggctctttcgaagaagtccaacttgtggagtctggagggggcctggtgcagcccggcggctctctcagactgtcttgtgcggcaagcggctacaccttcacctcttactggatagaatgggtgaggcaggcacctggaaagggactggagtggattggagagattctgccaggagggggagatacaaattacaatgaaatcttcaaggggcgggccaccttttcagcggataccagcaagaatacagcttacctgcagatgaatagcctccgggcagaagataccgctgtttattattgcacgagacgggtgccaataagactggactattgggggcaagggactcttgtcaccgtcagttcaacgcgtatccagaaccctgatcctgccgtgtaccagctgcgggatagcaagagcagcgacaagagcgtgtgtctgttcaccgacttcgacagccagaccaacgtgtcccagagcaaggactccgacgtgtacatcaccgataagtgcgtgctggacatgcggagcatggacttcaagagcaactccgccgtggcctggtccaacaagtccgatttcgcctgcgccaacgccttcaacaacagcattatccccgaggacacattcttcccaagccccgagagcagctgcgacgtgaagctggtggaaaagagcttcgagacagacaccaacctgaacttccagaacctgagcgtgatcggcttcagaatcctgctgctgaaagtggccggctttaacctgctgatgaccctgcggctgtggtccagctaa

SEQ ID NO: 38398 - DNA, 2304 bp, synthetic construct
  source 1..2304: mol_type = other DNA
atggccttaccagtgaccgccttgctcctgccgctggccttgctgctccacgccgccaggccgcaggtgcagctggttgaatctggcggaggatctgttcaggctggcggctctctgagactgtcttgtggcgcttccggcaacatcagcagcagaaactgcatgggctggttcagacaggcccctggcaaagagagagaaggcgttgccgccatcggacaagtgaccggcagatcctactacgtggacagcgtgaagggcagattcaccatcagcctggacaacgccaagaacaccctgtacctccagatgaacacactgaagcccgaggacaccgccatgtactactgtgctgctgcccctggctgtctgctgtctgcacttagaagcgccgactacagaaactggggccagggaacccaagtgacagtgtctagtggtaccggcggaggcggatctggcggcggaggtagcggtggcggaggatctgaattcgacatcgtgatgacacagagccctgatagcctggccgtgtctctgggagagagagccaccattaactgcaaggccagccagagcgtggactacgacggcgacagcttcctgaactggtatcagcagaagcccggccagcctcctaagctgctgatctacgccgccagcaatctggaaagcggcgtgccaagcagattttccggctctggcagcggcaccgatttcaccctgacaatatccagcctccagcctgaggacgtggccgtgtactactgccagcagagcaacgacgaccctctgacctttggacagggcaccaaggtggaaatcaaactcgaggacctgaagaacgtgttcccacctgaggtggccgtgttcgagcctagcgaggccgagatcagccacacccagaaagccaccctcgtgtgcctggctaccggcttctaccccgaccatgtggaactgtcttggtgggtcaacggcaaagaggtgcacagcggcgtgtgtaccgacccccagccactgaaagaacagcccgccctgaacgacagccggtactgcctgagcagcagactgagagtgtccgccaccttctggcagaacccccggaaccacttcagatgccaggtgcagttctacggcctgagcgagaacgacgagtggacccaggacagagccaagcccgtgacccagatcgtgtctgccgaagcctggggcagagccgattgcggctttaccagcgagagctaccagcagggcgtgctgagcgccaccatcctgtacgagatcctgctgggcaaggccaccctgtacgccgtgctggtgtctgccctggtgctgatggctatggtcaagcggaaggacagccggggaagggccaagcgatctggatctggagcaacaaacttctcactactcaaacaagcaggtgacgtggaggagaatcccgggcctactagtgccaccatggactggatttggcgcatccttttccttgtcggcgctgctaccggcgcccattccttcgaagaagtccaacttgtggagtctggagggggcctggtgcagcccggcggctctctcagactgtcttgtgcggcaagcggctacaccttcacctcttactggatagaatgggtgaggcaggcacctggaaagggactggagtggattggagagattctgccaggagggggagatacaaattacaatgaaatcttcaaggggcgggccaccttttcagcggataccagcaagaatacagcttacctgcagatgaatagcctccgggcagaagataccgctgtttattattgcacgagacgggtgccaataagactggactattgggggcaagggactcttgtcaccgtcagttcaacgcgtatccagaaccctgatcctgccgtgtaccagctgcgggatagcaagagcagcgacaagagcgtgtgtctgttcaccgacttcgacagccagaccaacgtgtcccagagcaaggactccgacgtgtacatcaccgataagtgcgtgctggacatgcggagcatggacttcaagagcaactccgccgtggcctggtccaacaagtccgatttcgcctgcgccaacgccttcaacaacagcattatccccgaggacacattcttcccaagccccgagagcagctgcgacgtgaagctggtggaaaagagcttcgagacagacaccaacctgaacttccagaacctgagcgtgatcggcttcagaatcctgctgctgaaagtggccggctttaacctgctgatgaccctgcggctgtggtccagctaa

SEQ ID NO: 38399 - DNA, 2304 bp, synthetic construct
  source 1..2304: mol_type = other DNA
atggccttaccagtgaccgccttgctcctgccgctggccttgctgctccacgccgccaggccgcaagttcagctggtggaaagcggtggtggcgttgtgcaacctggtggaagtctgaggctgagctgtgccgcttctggcctgagctttagcacctacactgtggcctggttcaggcaggctcccggaaagggtcttgaaggcgtggccgccattccttacaccagccagcacatggtgtacacagacagcgtcagaggccggttcaccatcagcagagacaactccaagaatacgctctatctccagatgaactctctgcgcgccgaagatacagccgtgtattactgcgccaccgacagacggcctggcacctctatgctggctatcaacggctacaacagatggggacagggaaccaccgtgaccgtgtcatctggtaccggcggaggcggatctggcggcggaggtagcggtggcggaggatctgaattcgacatcgtgatgacacagagccctgatagcctggccgtgtctctgggagagagagccaccattaactgcaaggccagccagagcgtggactacgacggcgacagcttcctgaactggtatcagcagaagcccggccagcctcctaagctgctgatctacgccgccagcaatctggaaagcggcgtgccaagcagattttccggctctggcagcggcaccgatttcaccctgacaatatccagcctccagcctgaggacgtggccgtgtactactgccagcagagcaacgacgaccctctgacctttggacagggcaccaaggtggaaatcaaactcgaggacctgaagaacgtgttcccacctgaggtggccgtgttcgagcctagcgaggccgagatcagccacacccagaaagccaccctcgtgtgcctggctaccggcttctaccccgaccatgtggaactgtcttggtgggtcaacggcaaagaggtgcacagcggcgtgtgtaccgacccccagccactgaaagaacagcccgccctgaacgacagccggtactgcctgagcagcagactgagagtgtccgccaccttctggcagaacccccggaaccacttcagatgccaggtgcagttctacggcctgagcgagaacgacgagtggacccaggacagagccaagcccgtgacccagatcgtgtctgccgaagcctggggcagagccgattgcggctttaccagcgagagctaccagcagggcgtgctgagcgccaccatcctgtacgagatcctgctgggcaaggccaccctgtacgccgtgctggtgtctgccctggtgctgatggctatggtcaagcggaaggacagccggggaagggccaagcgatctggatctggagcaacaaacttctcactactcaaacaagcaggtgacgtggaggagaatcccgggcctactagtgccaccatggactggatttggcgcatccttttccttgtcggcgctgctaccggcgcccattccttcgaagaagtccaacttgtggagtctggagggggcctggtgcagcccggcggctctctcagactgtcttgtgcggcaagcggctacaccttcacctcttactggatagaatgggtgaggcaggcacctggaaagggactggagtggattggagagattctgccaggagggggagatacaaattacaatgaaatcttcaaggggcgggccaccttttcagcggataccagcaagaatacagcttacctgcagatgaatagcctccgggcagaagataccgctgtttattattgcacgagacgggtgccaataagactggactattgggggcaagggactcttgtcaccgtcagttcaacgcgtatccagaaccctgatcctgccgtgtaccagctgcgggatagcaagagcagcgacaagagcgtgtgtctgttcaccgacttcgacagccagaccaacgtgtcccagagcaaggactccgacgtgtacatcaccgataagtgcgtgctggacatgcggagcatggacttcaagagcaactccgccgtggcctggtccaacaagtccgatttcgcctgcgccaacgccttcaacaacagcattatccccgaggacacattcttcccaagccccgagagcagctgcgacgtgaagctggtggaaaagagcttcgagacagacaccaacctgaacttccagaacctgagcgtgatcggcttcagaatcctgctgctgaaagtggccggctttaacctgctgatgaccctgcggctgtggtccagctaa

SEQ ID NO: 38400 - DNA, 2301 bp, synthetic construct
  source 1..2301: mol_type = other DNA
atggccttaccagtgaccgccttgctcctgccgctggccttgctgctccacgccgccaggccggacatcgtgatgacacagagccctgatagcctggccgtgtctctgggagagagagccaccattaactgcaaggccagccagagcgtggactacgacggcgacagcttcctgaactggtatcagcagaagcccggccagcctcctaagctgctgatctacgccgccagcaatctggaaagcggcgtgccaagcagattttccggctctggcagcggcaccgatttcaccctgacaatatccagcctccagcctgaggacgtggccgtgtactactgccagcagagcaacgacgaccctctgacctttggacagggcaccaaggtggaaatcaaactcgaggacctgaagaacgtgttcccacctgaggtggccgtgttcgagcctagcgaggccgagatcagccacacccagaaagccaccctcgtgtgcctggctaccggcttctaccccgaccatgtggaactgtcttggtgggtcaacggcaaagaggtgcacagcggcgtgtgtaccgacccccagccactgaaagaacagcccgccctgaacgacagccggtactgcctgagcagcagactgagagtgtccgccaccttctggcagaacccccggaaccacttcagatgccaggtgcagttctacggcctgagcgagaacgacgagtggacccaggacagagccaagcccgtgacccagatcgtgtctgccgaagcctggggcagagccgattgcggctttaccagcgagagctaccagcagggcgtgctgagcgccaccatcctgtacgagatcctgctgggcaaggccaccctgtacgccgtgctggtgtctgccctggtgctgatggctatggtcaagcggaaggacagccggggaagggccaagcgatctggatctggagcaacaaacttctcactactcaaacaagcaggtgacgtggaggagaatcccgggcctactagtaccatggactggatttggcgcatccttttccttgtcggcgctgctaccggcgcccattccgggccccaagttcagctggtggaaagcggtggtggcgttgtgcaacctggtggaagtctgaggctgagctgtgccgcttctggcctgagctttagcacctacactgtggcctggttcaggcaggctcccggaaagggtcttgaaggcgtggccgccattccttacaccagccagcacatggtgtacacagacagcgtcagaggccggttcaccatcagcagagacaactccaagaatacgctctatctccagatgaactctctgcgcgccgaagatacagccgtgtattactgcgccaccgacagacggcctggcacctctatgctggctatcaacggctacaacagatggggacagggaaccaccgtgaccgtgtcatctggatccggcggcggaggatctggcggaggcggatctgggggcggaggctctttcgaagaagtccaacttgtggagtctggagggggcctggtgcagcccggcggctctctcagactgtcttgtgcggcaagcggctacaccttcacctcttactggatagaatgggtgaggcaggcacctggaaagggactggagtggattggagagattctgccaggagggggagatacaaattacaatgaaatcttcaaggggcgggccaccttttcagcggataccagcaagaatacagcttacctgcagatgaatagcctccgggcagaagataccgctgtttattattgcacgagacgggtgccaataagactggactattgggggcaagggactcttgtcaccgtcagttcaacgcgtatccagaaccctgatcctgccgtgtaccagctgcgggatagcaagagcagcgacaagagcgtgtgtctgttcaccgacttcgacagccagaccaacgtgtcccagagcaaggactccgacgtgtacatcaccgataagtgcgtgctggacatgcggagcatggacttcaagagcaactccgccgtggcctggtccaacaagtccgatttcgcctgcgccaacgccttcaacaacagcattatccccgaggacacattcttcccaagccccgagagcagctgcgacgtgaagctggtggaaaagagcttcgagacagacaccaacctgaacttccagaacctgagcgtgatcggcttcagaatcctgctgctgaaagtggccggctttaacctgctgatgaccctgcggctgtggtccagctaa

SEQ ID NO: 38401 - DNA, 2307 bp, synthetic construct
  source 1..2307: mol_type = other DNA
atggccttaccagtgaccgccttgctcctgccgctggccttgctgctccacgccgccaggccggacatcgtgatgacacagagccctgatagcctggccgtgtctctgggagagagagccaccattaactgcaaggccagccagagcgtggactacgacggcgacagcttcctgaactggtatcagcagaagcccggccagcctcctaagctgctgatctacgccgccagcaatctggaaagcggcgtgccaagcagattttccggctctggcagcggcaccgatttcaccctgacaatatccagcctccagcctgaggacgtggccgtgtactactgccagcagagcaacgacgaccctctgacctttggacagggcaccaaggtggaaatcaaactcgaggacctgaagaacgtgttcccacctgaggtggccgtgttcgagcctagcgaggccgagatcagccacacccagaaagccaccctcgtgtgcctggctaccggcttctaccccgaccatgtggaactgtcttggtgggtcaacggcaaagaggtgcacagcggcgtgtgtaccgacccccagccactgaaagaacagcccgccctgaacgacagccggtactgcctgagcagcagactgagagtgtccgccaccttctggcagaacccccggaaccacttcagatgccaggtgcagttctacggcctgagcgagaacgacgagtggacccaggacagagccaagcccgtgacccagatcgtgtctgccgaagcctggggcagagccgattgcggctttaccagcgagagctaccagcagggcgtgctgagcgccaccatcctgtacgagatcctgctgggcaaggccaccctgtacgccgtgctggtgtctgccctggtgctgatggctatggtcaagcggaaggacagccggggaagggccaagcgatctggatctggagcaacaaacttctcactactcaaacaagcaggtgacgtggaggagaatcccgggcctactagtaccatggactggatttggcgcatccttttccttgtcggcgctgctaccggcgcccattccgggcccgaggtgcagctggttgaatctggcggaggatctgttcaggctggcggctctctgagactgtcttgtgccgccagcggctacacctacagcatcaactgcatgggctggttcagacaggcccctggcaaagagagagaaggcgttgccgccatctctaccggcggaggcagaaccgattaccgggattctgtgaagggcagattcaccatcagccaggacaacgccaagaacaccgtgtacctccagatgaacagcctgaagcctgaggacaccgccatgtactactgtgccggcaagaccacctatcctggctacggatgtggcctgggcagaagcgcctacaattattggggccagggcacccaagtgaccgtgtcatctggatccggcggcggaggatctggcggaggcggatctgggggcggaggctctttcgaagaagtccaacttgtggagtctggagggggcctggtgcagcccggcggctctctcagactgtcttgtgcggcaagcggctacaccttcacctcttactggatagaatgggtgaggcaggcacctggaaagggactggagtggattggagagattctgccaggagggggagatacaaattacaatgaaatcttcaaggggcgggccaccttttcagcggataccagcaagaatacagcttacctgcagatgaatagcctccgggcagaagataccgctgtttattattgcacgagacgggtgccaataagactggactattgggggcaagggactcttgtcaccgtcagttcaacgcgtatccagaaccctgatcctgccgtgtaccagctgcgggatagcaagagcagcgacaagagcgtgtgtctgttcaccgacttcgacagccagaccaacgtgtcccagagcaaggactccgacgtgtacatcaccgataagtgcgtgctggacatgcggagcatggacttcaagagcaactccgccgtggcctggtccaacaagtccgatttcgcctgcgccaacgccttcaacaacagcattatccccgaggacacattcttcccaagccccgagagcagctgcgacgtgaagctggtggaaaagagcttcgagacagacaccaacctgaacttccagaacctgagcgtgatcggcttcagaatcctgctgctgaaagtggccggctttaacctgctgatgaccctgcggctgtggtccagctaa

SEQ ID NO: 38402 - DNA, 1863 bp, synthetic construct
  source 1..1863: mol_type = other DNA
atggccttaccagtgaccgccttgctcctgccgctggccttgctgctccacgccgccaggccggacatcgtgatgacacagagccctgatagcctggccgtgtctctgggagagagagccaccattaactgcaaggccagccagagcgtggactacgacggcgacagcttcctgaactggtatcagcagaagcccggccagcctcctaagctgctgatctacgccgccagcaatctggaaagcggcgtgccaagcagattttccggctctggcagcggcaccgatttcaccctgacaatatccagcctccagcctgaggacgtggccgtgtactactgccagcagagcaacgacgaccctctgacctttggacagggcaccaaggtggaaatcaaactcgaggacctgaagcacgtgttcccacctgaggtggccgtgttcgagcctagcgacgccgagatctggcacacccagaaagccaccctcgtgtgcctggctaccggcttctaccccgaccatgtggaactgtcttggtgggtcaacggcaaagaggtgcacagcggcgtgtctaccgacccccagccactgaaagaacagcccgccctgaacgacagccggtactgcctgagcagcagactgagagtgtccgccaccttctggcagaacccccggaaccacttcagatgccaggtgcagttctacggcctgagcgagaacgacgagtggacccaggacagagccaagcccgtgacccagatcgtgtctgccgaagcctggggcagagccgattgcggctttaccagcgagagctaccagcagggcgtgctgagcgccaccatcctgtacgagatcctgctgggcaaggccaccctgtacgccgtgctggtgtctgccctggtgctgatggctatggtcaagcggaaggacagccggggaagggccaagcgatctggatctggagcaacaaacttctcactactcaaacaagcaggtgacgtggaggagaatcccgggcctactagtatggactggatttggcgcatccttttccttgtcggcgctgctaccggcgcgcattccttcgaagaagtccaacttgtggagtctggagggggcctggtgcagcccggcggctctctcagactgtcttgtgcggcaagcggctacaccttcacctcttactggatagaatgggtgaggcaggcacctggaaagggactggagtggattggagagattctgccaggagggggagatacaaattacaatgaaatcttcaaggggcgggccaccttttcagcggataccagcaagaatacagcttacctgcagatgaatagcctccgggcagaagataccgctgtttattattgcacgagacgggtgccaataagactggactattgggggcaagggactcttgtcaccgtcagttcaacgcgtatccagaaccctgatcctgccgtgtaccagctgcgggatagcaagagcagcgacaagagcgtgtgtctgttcaccgacttcgacagccagaccaacgtgtcccagagcaaggactccgacgtgtacatcaccgataagaccgtgctggacatgcggagcatggacttcaagagcaactccgccgtggcctggtccagcaagtccgatttcgcctgcgccaacgccttcaacaacagcattatccccgaggacacattcttcccaagccccgagatggcctgcgacgtgaagctggtggaaaagagcttcgagacagacaccaacctgaacttccagaacctgctcgtgatctggctgagaatcctgctgctgaaagtggccggctttaacctgctgatgaccctgcggctgtggtccagc

SEQ ID NO: 38403 - DNA, 1863 bp, synthetic construct
  source 1..1863: mol_type = other DNA
atggccttaccagtgaccgccttgctcctgccgctggccttgctgctccacgccgccaggccggacatcgtgatgacacagagccctgatagcctggccgtgtctctgggagagagagccaccattaactgcaaggccagccagagcgtggactacgacggcgacagcttcctgaactggtatcagcagaagcccggccagcctcctaagctgctgatctacgccgccagcaatctggaaagcggcgtgccaagcagattttccggctctggcagcggcaccgatttcaccctgacaatatccagcctccagcctgaggacgtggccgtgtactactgccagcagagcaacgacgaccctctgacctttggacagggcaccaaggtggaaatcaaactcgaggacctgaagcacgtgttcccacctgaggtggccgtgttcgagcctagcgacgccgagatctggcacacccagaaagccaccctcgtgtgcctggctaccggcttctaccccgaccatgtggaactgtcttggtgggtcaacggcaaagaggtgcacagcggcgtgtctaccgacccccagccactgaaagaacagcccgccctgaacgacagccggtactgcctgagcagcagactgagagtgtccgccaccttctggcagaacccccggaaccacttcagatgccaggtgcagttctacggcctgagcgagaacgacgagtggacccaggacagagccaagcccgtgacccagatcgtgtctgccgaagcctggggcagagccgattgcggctttaccagcgagagctaccagcagggcgtgctgagcgccaccatcctgtacgagatcctgctgggcaaggccaccctgtacgccgtgctggtgtctgccctggtgctgatggctatggtcaagcggaaggacagccggggaagggccaagcgatctggatctggagcaacaaacttctcactactcaaacaagcaggtgacgtggaggagaatcccgggcctactagtatggactggatttggcgcatccttttccttgtcggcgctgctaccggcgcgcattccttcgaagaagtccaacttgtggagtctggagggggcctggtgcagcccggcggctctctcagactgtcttgtgcggcaagcggctacaccttcacctcttactggatagaatgggtgaggcaggcacctggaaagggactggagtggattggagagattctgccaggagggggagatacaaattacaatgaaatcttcaaggggcgggccaccttttcagcggataccagcaagaatacagcttacctgcagatgaatagcctccgggcagaagataccgctgtttattattgcacgagacgggtgccaataagactggactattgggggcaagggactcttgtcaccgtcagttcaacgcgtatccagaaccctgatcctgccgtgtaccagctgcgggatagcaagagcagcgacaagagcgtgtgtctgttcaccgacttcgacagccagaccaacgtgtcccagagcaaggactccgacgtgtacatcaccgataagaccgtgctggacatgcggagcatggacttcaagagcaactccgccgtggcctggtccaccaagtccgatttcgcctgcgccaacgccttcaacaacagcattatccccgaggacacattcttcccaagccccgaggtggtgtgcgacgtgaagctggtggaaaagagcttcgagacagacaccaacctgaacttccagaacctggtggtgatcggcgccagaatcctgctgctgaaagtggccggctttaacctgctgatgaccctgcggctgtggtccagc

SEQ ID NO: 38404 - DNA, 1863 bp, synthetic construct
  source 1..1863: mol_type = other DNA
atggccttaccagtgaccgccttgctcctgccgctggccttgctgctccacgccgccaggccggacatcgtgatgacacagagccctgatagcctggccgtgtctctgggagagagagccaccattaactgcaaggccagccagagcgtggactacgacggcgacagcttcctgaactggtatcagcagaagcccggccagcctcctaagctgctgatctacgccgccagcaatctggaaagcggcgtgccaagcagattttccggctctggcagcggcaccgatttcaccctgacaatatccagcctccagcctgaggacgtggccgtgtactactgccagcagagcaacgacgaccctctgacctttggacagggcaccaaggtggaaatcaaactcgaggacctgaagaacgtgttcccacctgaggtggccgtgttcgagcctagcaaggccgagatcagcagaacccagaaagccaccctcgtgtgcctggctaccggcttctaccctcctcatgtggaactgtcttggtgggtcaacggcaaagaggtgcacgacggcgtgtgtaccgacccccagccactgaaagaacagcccgccctgaacgacagccggtactgcctgagcagcagactgagagtgtccgccaccttctggcagaacccccggaaccacttcagatgccaggtgcagttctacggcctgagcgagaacgacgagtggacccaggacagagccaagcccgtgacccagatcgtgtctgccgaagcctggggcagagccgattgcggctttaccagcgagagctaccagcagggcgtgctgagcgccaccatcctgtacgagatcctgctgggcaaggccaccctgtacgccgtgctggtgtctgccctggtgctgatggctatggtcaagcggaaggacagccggggaagggccaagcgatctggatctggagcaacaaacttctcactactcaaacaagcaggtgacgtggaggagaatcccgggcctactagtatggactggatttggcgcatccttttccttgtcggcgctgctaccggcgcgcattccttcgaagaagtccaacttgtggagtctggagggggcctggtgcagcccggcggctctctcagactgtcttgtgcggcaagcggctacaccttcacctcttactggatagaatgggtgaggcaggcacctggaaagggactggagtggattggagagattctgccaggagggggagatacaaattacaatgaaatcttcaaggggcgggccaccttttcagcggataccagcaagaatacagcttacctgcagatgaatagcctccgggcagaagataccgctgtttattattgcacgagacgggtgccaataagactggactattgggggcaagggactcttgtcaccgtcagttcaacgcgtatccagaaccctgatcctgccgtgtaccagctgcgggatagcaagagcagcgacaagttcgtgtgtctgttcaccgacttcgacagccagatcaacgtgtcccagagcaaggactccgacgtgtacatcaccgataagtgcgtgctggacatgcggagcatggacttcaagagcaactccgccgtggcctggtccaacaagtccgatttcacctgcgccaacgccttcaacaacagcattatccccgaggacacattcttcccaagccccgagagcagctgcgacgtgaagctggtggaaaagagcttcgagacagacaccaacctgaacttccagaacctgagcgtgatcggcttcagaatcctgctgctgaaagtggccggctttaacctgctgatgaccctgcggctgtggtccagc

SEQ ID NO: 38405 - DNA, 2289 bp, synthetic construct
  source 1..2289: mol_type = other DNA
atggccttaccagtgaccgccttgctcctgccgctggccttgctgctccacgccgccaggccggacatcgtgatgacacagagccctgatagcctggccgtgtctctgggagagagagccaccattaactgcaaggccagccagagcgtggactacgacggcgacagcttcctgaactggtatcagcagaagcccggccagcctcctaagctgctgatctacgccgccagcaatctggaaagcggcgtgccaagcagattttccggctctggcagcggcaccgatttcaccctgacaatatccagcctccagcctgaggacgtggccgtgtactactgccagcagagcaacgacgaccctctgacctttggacagggcaccaaggtggaaatcaaactcgaggacctgaagaacgtgttcccacctgaggtggccgtgttcgagcctagcgaggccgagatcagccacacccagaaagccaccctcgtgtgcctggctaccggcttctaccccgaccatgtggaactgtcttggtgggtcaacggcaaagaggtgcacagcggcgtgtgtaccgacccccagccactgaaagaacagcccgccctgaacgacagccggtactgcctgagcagcagactgagagtgtccgccaccttctggcagaacccccggaaccacttcagatgccaggtgcagttctacggcctgagcgagaacgacgagtggacccaggacagagccaagcccgtgacccagatcgtgtctgccgaagcctggggcagagccgattgcggctttaccagcgagagctaccagcagggcgtgctgagcgccaccatcctgtacgagatcctgctgggcaaggccaccctgtacgccgtgctggtgtctgccctggtgctgatggctatggtcaagcggaaggacagccggggaagggccaagcgatctggatctggagcaacaaacttctcactactcaaacaagcaggtgacgtggaggagaatcccgggcctactagtaccatggactggatttggcgcatccttttccttgtcggcgctgctaccggcgcccattccgggccccaggtgcagctccaagaaagcggacccggactggttaagccctctcagaccctgtctctgacctgcacagttagcggagccagcattaccacaggcgagtattattggaattggtttcggcagccaccaggcaaggggcttgagtggatgggtgctattgctgcctctggcagcaccacctactctcccagctttgagagcagaacctccatcagccgggacacctccaaaaaccagttctctctgaagctgtcctccgtgaccgctgctgacaccgccgtctattattgtggccggtctttcggcgtggcagctgtgaccacaggacagaacagaggccagggaacacttgtgaccgtgtcctctggatccggcggcggaggatctggcggaggcggatctgggggcggaggctctttcgaagaagtccaacttgtggagtctggagggggcctggtgcagcccggcggctctctcagactgtcttgtgcggcaagcggctacaccttcacctcttactggatagaatgggtgaggcaggcacctggaaagggactggagtggattggagagattctgccaggagggggagatacaaattacaatgaaatcttcaaggggcgggccaccttttcagcggataccagcaagaatacagcttacctgcagatgaatagcctccgggcagaagataccgctgtttattattgcacgagacgggtgccaataagactggactattgggggcaagggactcttgtcaccgtcagttcaacgcgtatccagaaccctgatcctgccgtgtaccagctgcgggatagcaagagcagcgacaagagcgtgtgtctgttcaccgacttcgacagccagaccaacgtgtcccagagcaaggactccgacgtgtacatcaccgataagtgcgtgctggacatgcggagcatggacttcaagagcaactccgccgtggcctggtccaacaagtccgatttcgcctgcgccaacgccttcaacaacagcattatccccgaggacacattcttcccaagccccgagagcagctgcgacgtgaagctggtggaaaagagcttcgagacagacaccaacctgaacttccagaacctgagcgtgatcggcttcagaatcctgctgctgaaagtggccggctttaacctgctgatgaccctgcggctgtggtccagc

SEQ ID NO: 38406 - DNA, 2712 bp, synthetic construct
  source 1..2712: mol_type = other DNA
atggccttaccagtgaccgccttgctcctgccgctggccttgctgctccacgccgccaggccgcaggttcagctgcaagagtctggccctggcctggtcaagcctagccaaacactgagcctgacctgtaccgtgtctggcggctctatcaccaccggcgagttctactggaactggttcagacagcctcctggcaaaggactggaatggatgggagccattgccgccagcggcagcacaacatacagccctagcttcgagagccggaccagcatcagcagagacaccagcaagaatcagttcagcctgaagctgagcagcgtgacagccgccgatacagccgtgtattactgcggcagatcctttggagtggccgccgtgacaaccggccagaatagaggacagggcaccctggtcacagtgtctagcggtaccggcggaggcggatctggcggcggaggtagcggtggcggaggatctgaattcgacatcgtgatgacacagagccctgatagcctggccgtgtctctgggagagagagccaccattaactgcaaggccagccagagcgtggactacgacggcgacagcttcctgaactggtatcagcagaagcccggccagcctcctaagctgctgatctacgccgccagcaatctggaaagcggcgtgccaagcagattttccggctctggcagcggcaccgatttcaccctgacaatatccagcctccagcctgaggacgtggccgtgtactactgccagcagagcaacgacgaccctctgacctttggacagggcaccaaggtggaaatcaaactcgagatccagaaccctgatcctgccgtgtaccagctgcgggatagcaagagcagcgacaagagcgtgtgtctgttcaccgacttcgacagccagaccaacgtgtcccagagcaaggactccgacgtgtacatcaccgataagtgcgtgctggacatgcggagcatggacttcaagagcaactccgccgtggcctggtccaacaagtccgatttcgcctgcgccaacgccttcaacaacagcattatccccgaggacacattcttcccaagcagcgacgtgccctgcgacgtgaagctggtggaaaagagcttcgagacagacaccaacctgaacttccagaacctgagcgtgatcggcttcagaatcctgctgctgaaagtggccggctttaacctgctgatgaccctgcggctgtggtccagccgcgccaagagaagcggatctggcgtgaagcagaccctgaatttcgacctgctgaagctggctggcgacgtggaatccaacccaggccctactagtaccatggactggatttggcgcatccttttccttgtcggcgctgctaccggcgcccattccgggcccgaagtgcaactggttgaatccggtggcggcctggtgcaacccggcggatctctcagacttagctgtgccgcctccggcagaaccttcacaatgggatggtacaggcaggctccagggaaagagagagagttcgtcgccgccatctctctgtctcccacactggcctactacgccgactctgtgaaaggccggttcaccatctccagagataatagcaagaacaccgtggtgctgcaaatgaactctctgagagccgaggatacagccctgtactattgtgccgctgaccggaagtccgtgatgagcatcagacccgattactggggacagggcacactggtcacagtgtctagtggatccggcggcggaggatctggcggaggcggatctgggggcggaggctctttcgaagaagtccaacttgtggagtctggagggggcctggtgcagcccggcggctctctcagactgtcttgtgcggcaagcggctacaccttcacctcttactggatagaatgggtgaggcaggcacctggaaagggactggagtggattggagagattctgccaggagggggagatacaaattacaatgaaatcttcaaggggcgggccaccttttcagcggataccagcaagaatacagcttacctgcagatgaatagcctccgggcagaagataccgctgtttattattgcacgagacgggtgccaataagactggactattgggggcaagggactcttgtcaccgtcagttcaacgcgtgaggacctgaagaacgtgttcccacctgaggtggccgtgttcgagcctagcaaggccgagatcgcccacacccagaaagccaccctcgtgtgcctggctaccggcttctaccccgaccatgtggaactgtcttggtgggtcaacggcaaagaggtgcacagcggcgtgtgtaccgacccccagccactgaaagaacagcccgccctgaacgacagccggtactgcctgagcagcagactgagagtgtccgccaccttctggcagaacccccggaaccacttcagatgccaggtgcagttctacggcctgagcgagaacgacgagtggacccaggacagagccaagcccgtgacccagatcgtgtctgccgaagcctggggcagagccgattgcggcatcaccagcgccagctaccaccagggcgtgctgagcgccaccatcctgtacgagatcctgctgggcaaggccaccctgtacgccgtgctggtgtctgccctggtgctgatggctatggtcaagcggaaggacagccgggga

SEQ ID NO: 38407 - DNA, 2301 bp, synthetic construct
  source 1..2301: mol_type = other DNA
atggccttaccagtgaccgccttgctcctgccgctggccttgctgctccacgccgccaggccgcaggttcagctgcaagagtctggccctggcctggtcaagcctagccaaacactgagcctgacctgtaccgtgtctggcggctctatcaccaccggcgagttctactggaactggttcagacagcctcctggcaaaggactggaatggatgggagccattgccgccagcggcagcacaacatacagccctagcttcgagagccggaccagcatcagcagagacaccagcaagaatcagttcagcctgaagctgagcagcgtgacagccgccgatacagccgtgtattactgcggcagatcctttggagtggccgccgtgacaaccggccagaatagaggacagggcaccctggtcacagtgtctagcggtaccggcggaggcggatctggcggcggaggtagcggtggcggaggatctgaattcgacatcgtgatgacacagagccctgatagcctggccgtgtctctgggagagagagccaccattaactgcaaggccagccagagcgtggactacgacggcgacagcttcctgaactggtatcagcagaagcccggccagcctcctaagctgctgatctacgccgccagcaatctggaaagcggcgtgccaagcagattttccggctctggcagcggcaccgatttcaccctgacaatatccagcctccagcctgaggacgtggccgtgtactactgccagcagagcaacgacgaccctctgacctttggacagggcaccaaggtggaaatcaaactcgagatccagaaccctgatcctgccgtgtaccagctgcgggatagcaagagcagcgacaagagcgtgtgtctgttcaccgacttcgacagccagaccaacgtgtcccagagcaaggactccgacgtgtacatcaccgataagtgcgtgctggacatgcggagcatggacttcaagagcaactccgccgtggcctggtccaacaagtccgatttcgcctgcgccaacgccttcaacaacagcattatccccgaggacacattcttcccaagcagcgacgtgccctgcgacgtgaagctggtggaaaagagcttcgagacagacaccaacctgaacttccagaacctgagcgtgatcggcttcagaatcctgctgctgaaagtggccggctttaacctgctgatgaccctgcggctgtggtccagccgcgccaagagaagcggatctggcgtgaagcagaccctgaatttcgacctgctgaagctggctggcgacgtggaatccaacccaggccctactagtaccatggactggatttggcgcatccttttccttgtcggcgctgctaccggcgcccattccttcgaagaagtccaacttgtggagtctggagggggcctggtgcagcccggcggctctctcagactgtcttgtgcggcaagcggctacaccttcacctcttactggatagaatgggtgaggcaggcacctggaaagggactggagtggattggagagattctgccaggagggggagatacaaattacaatgaaatcttcaaggggcgggccaccttttcagcggataccagcaagaatacagcttacctgcagatgaatagcctccgggcagaagataccgctgtttattattgcacgagacgggtgccaataagactggactattgggggcaagggactcttgtcaccgtcagttcaacgcgtgaggacctgaagaacgtgttcccacctgaggtggccgtgttcgagcctagcaaggccgagatcgcccacacccagaaagccaccctcgtgtgcctggctaccggcttctaccccgaccatgtggaactgtcttggtgggtcaacggcaaagaggtgcacagcggcgtgtgtaccgacccccagccactgaaagaacagcccgccctgaacgacagccggtactgcctgagcagcagactgagagtgtccgccaccttctggcagaacccccggaaccacttcagatgccaggtgcagttctacggcctgagcgagaacgacgagtggacccaggacagagccaagcccgtgacccagatcgtgtctgccgaagcctggggcagagccgattgcggcatcaccagcgccagctaccaccagggcgtgctgagcgccaccatcctgtacgagatcctgctgggcaaggccaccctgtacgccgtgctggtgtctgccctggtgctgatggctatggtcaagcggaaggacagccgggga

SEQ ID NO: 38408 - DNA, 2700 bp, synthetic construct
  source 1..2700: mol_type = other DNA
atggccttaccagtgaccgccttgctcctgccgctggccttgctgctccacgccgccaggccggaagtgcagctggttgaatctggcggaggactggttcaggctggcggatctctgagactgtcttgtgccgccagcggcagaacctttagcatgggctggtttagacaggcccctggcaaagagagagagttcgtcgccgccatcacatactctggcggcagcccttactacgccgactctgtgaagggcagattcaccatcagccgggacaacgccaagaacaccgtgtacctccagatgaacagcctgaagcctgaggacaccgccgtgtactactgcgccgccaatccaacatacggcagcgactggaacgccgagaattggggccagggaacccaagtgacagtgtctagcggtaccggcggaggcggatctggcggcggaggtagcggtggcggaggatctgaattcgacatcgtgatgacacagagccctgatagcctggccgtgtctctgggagagagagccaccattaactgcaaggccagccagagcgtggactacgacggcgacagcttcctgaactggtatcagcagaagcccggccagcctcctaagctgctgatctacgccgccagcaatctggaaagcggcgtgccaagcagattttccggctctggcagcggcaccgatttcaccctgacaatatccagcctccagcctgaggacgtggccgtgtactactgccagcagagcaacgacgaccctctgacctttggacagggcaccaaggtggaaatcaaactcgaggacctgaagaacgtgttcccacctgaggtggccgtgttcgagcctagcgaggccgagatcagccacacccagaaagccaccctcgtgtgcctggctaccggcttctaccccgaccatgtggaactgtcttggtgggtcaacggcaaagaggtgcacagcggcgtgtgtaccgacccccagccactgaaagaacagcccgccctgaacgacagccggtactgcctgagcagcagactgagagtgtccgccaccttctggcagaacccccggaaccacttcagatgccaggtgcagttctacggcctgagcgagaacgacgagtggacccaggacagagccaagcccgtgacccagatcgtgtctgccgaagcctggggcagagccgattgcggctttaccagcgagagctaccagcagggcgtgctgagcgccaccatcctgtacgagatcctgctgggcaaggccaccctgtacgccgtgctggtgtctgccctggtgctgatggctatggtcaagcggaaggacagccggggaagggccaagcgatctggatctggagcaacaaacttctcactactcaaacaagcaggtgacgtggaggagaatcccgggcctactagtaccatggactggatttggcgcatccttttccttgtcggcgctgctaccggcgcccattccgggccccaggtgcagctccaagaaagcggacccggactggttaagccctctcagaccctgtctctgacctgcacagttagcggagccagcattaccacaggcgagtattattggaattggtttcggcagccaccaggcaaggggcttgagtggatgggtgctattgctgcctctggcagcaccacctactctcccagctttgagagcagaacctccatcagccgggacacctccaaaaaccagttctctctgaagctgtcctccgtgaccgctgctgacaccgccgtctattattgtggccggtctttcggcgtggcagctgtgaccacaggacagaacagaggccagggaacacttgtgaccgtgtcctctggatccggcggcggaggatctggcggaggcggatctgggggcggaggctctttcgaagaagtccaacttgtggagtctggagggggcctggtgcagcccggcggctctctcagactgtcttgtgcggcaagcggctacaccttcacctcttactggatagaatgggtgaggcaggcacctggaaagggactggagtggattggagagattctgccaggagggggagatacaaattacaatgaaatcttcaaggggcgggccaccttttcagcggataccagcaagaatacagcttacctgcagatgaatagcctccgggcagaagataccgctgtttattattgcacgagacgggtgccaataagactggactattgggggcaagggactcttgtcaccgtcagttcaacgcgtatccagaaccctgatcctgccgtgtaccagctgcgggatagcaagagcagcgacaagagcgtgtgtctgttcaccgacttcgacagccagaccaacgtgtcccagagcaaggactccgacgtgtacatcaccgataagtgcgtgctggacatgcggagcatggacttcaagagcaactccgccgtggcctggtccaacaagtccgatttcgcctgcgccaacgccttcaacaacagcattatccccgaggacacattcttcccaagccccgagagcagctgcgacgtgaagctggtggaaaagagcttcgagacagacaccaacctgaacttccagaacctgagcgtgatcggcttcagaatcctgctgctgaaagtggccggctttaacctgctgatgaccctgcggctgtggtccagc

SEQ ID NO: 38409 - DNA, 2721 bp, synthetic construct
  source 1..2721: mol_type = other DNA
atggccttaccagtgaccgccttgctcctgccgctggccttgctgctccacgccgccaggccggaagtgcagctggttgaatctggcggaggactggttcaggctggcggatctctgagactgtcttgtgccgccagcggcagaacctttagcatgggctggtttagacaggcccctggcaaagagagagagttcgtcgccgccatcacatactctggcggcagcccttactacgccgactctgtgaagggcagattcaccatcagccgggacaacgccaagaacaccgtgtacctccagatgaacagcctgaagcctgaggacaccgccgtgtactactgcgccgccaatccaacatacggcagcgactggaacgccgagaattggggccagggaacccaagtgacagtgtctagcggtaccggcggaggcggatctggcggcggaggtagcggtggcggaggatctgaattcgacatcgtgatgacacagagccctgatagcctggccgtgtctctgggagagagagccaccattaactgcaaggccagccagagcgtggactacgacggcgacagcttcctgaactggtatcagcagaagcccggccagcctcctaagctgctgatctacgccgccagcaatctggaaagcggcgtgccaagcagattttccggctctggcagcggcaccgatttcaccctgacaatatccagcctccagcctgaggacgtggccgtgtactactgccagcagagcaacgacgaccctctgacctttggacagggcaccaaggtggaaatcaaactcgagatccagaaccctgatcctgccgtgtaccagctgcgggatagcaagagcagcgacaagagcgtgtgtctgttcaccgacttcgacagccagaccaacgtgtcccagagcaaggactccgacgtgtacatcaccgataagtgcgtgctggacatgcggagcatggacttcaagagcaactccgccgtggcctggtccaacaagtccgatttcgcctgcgccaacgccttcaacaacagcattatccccgaggacacattcttcccaagcagcgacgtgccctgcgacgtgaagctggtggaaaagagcttcgagacagacaccaacctgaacttccagaacctgagcgtgatcggcttcagaatcctgctgctgaaagtggccggctttaacctgctgatgaccctgcggctgtggtccagccgcgccaagagaagcggatctggcgtgaagcagaccctgaatttcgacctgctgaagctggctggcgacgtggaatccaacccaggccctactagtaccatggactggatttggcgcatccttttccttgtcggcgctgctaccggcgcccattccgggccccaggtgcagctggttgaatctggcggaggactggttcagcctggcggatctctgagactgtcttgtgccgccagcggcaacatcaacagcagaaactgcatgggctggttcagacaggcccctggcaagggaagagaaggcgtggcagctatcggccaagtgaccggcagaacctactacgtggacagcgtgaagggcagattcaccatcagcctggacaacagcaagaacaccctgtacctccagatgaacagcctgagagccgaggacaccgccgtgtactattgtgctgctgcccctggctgtctgctgtctgcacttagaagcgccgactacagaaactggggccagggcacactggtcaccgtttcttctggatccggcggcggaggatctggcggaggcggatctgggggcggaggctctttcgaagaagtccaacttgtggagtctggagggggcctggtgcagcccggcggctctctcagactgtcttgtgcggcaagcggctacaccttcacctcttactggatagaatgggtgaggcaggcacctggaaagggactggagtggattggagagattctgccaggagggggagatacaaattacaatgaaatcttcaaggggcgggccaccttttcagcggataccagcaagaatacagcttacctgcagatgaatagcctccgggcagaagataccgctgtttattattgcacgagacgggtgccaataagactggactattgggggcaagggactcttgtcaccgtcagttcaacgcgtgaggacctgaagaacgtgttcccacctgaggtggccgtgttcgagcctagcaaggccgagatcgcccacacccagaaagccaccctcgtgtgcctggctaccggcttctaccccgaccatgtggaactgtcttggtgggtcaacggcaaagaggtgcacagcggcgtgtgtaccgacccccagccactgaaagaacagcccgccctgaacgacagccggtactgcctgagcagcagactgagagtgtccgccaccttctggcagaacccccggaaccacttcagatgccaggtgcagttctacggcctgagcgagaacgacgagtggacccaggacagagccaagcccgtgacccagatcgtgtctgccgaagcctggggcagagccgattgcggcatcaccagcgccagctaccaccagggcgtgctgagcgccaccatcctgtacgagatcctgctgggcaaggccaccctgtacgccgtgctggtgtctgccctggtgctgatggctatggtcaagcggaaggacagccgggga

SEQ ID NO: 38410 - DNA, 2709 bp, synthetic construct
  source 1..2709: mol_type = other DNA
atggccttaccagtgaccgccttgctcctgccgctggccttgctgctccacgccgccaggccggaagtgcagctggttgaatctggcggaggactggttcaggctggcggatctctgagactgtcttgtgccgccagcggcagaacctttagcatgggctggtttagacaggcccctggcaaagagagagagttcgtcgccgccatcacatactctggcggcagcccttactacgccgactctgtgaagggcagattcaccatcagccgggacaacgccaagaacaccgtgtacctccagatgaacagcctgaagcctgaggacaccgccgtgtactactgcgccgccaatccaacatacggcagcgactggaacgccgagaattggggccagggaacccaagtgacagtgtctagcggtaccggcggaggcggatctggcggcggaggtagcggtggcggaggatctgaattcgacatcgtgatgacacagagccctgatagcctggccgtgtctctgggagagagagccaccattaactgcaaggccagccagagcgtggactacgacggcgacagcttcctgaactggtatcagcagaagcccggccagcctcctaagctgctgatctacgccgccagcaatctggaaagcggcgtgccaagcagattttccggctctggcagcggcaccgatttcaccctgacaatatccagcctccagcctgaggacgtggccgtgtactactgccagcagagcaacgacgaccctctgacctttggacagggcaccaaggtggaaatcaaactcgaggacctgaagaacgtgttcccacctgaggtggccgtgttcgagcctagcgaggccgagatcagccacacccagaaagccaccctcgtgtgcctggctaccggcttctaccccgaccatgtggaactgtcttggtgggtcaacggcaaagaggtgcacagcggcgtgtgtaccgacccccagccactgaaagaacagcccgccctgaacgacagccggtactgcctgagcagcagactgagagtgtccgccaccttctggcagaacccccggaaccacttcagatgccaggtgcagttctacggcctgagcgagaacgacgagtggacccaggacagagccaagcccgtgacccagatcgtgtctgccgaagcctggggcagagccgattgcggctttaccagcgagagctaccagcagggcgtgctgagcgccaccatcctgtacgagatcctgctgggcaaggccaccctgtacgccgtgctggtgtctgccctggtgctgatggctatggtcaagcggaaggacagccggggaagggccaagcgatctggatctggagcaacaaacttctcactactcaaacaagcaggtgacgtggaggagaatcccgggcctactagtaccatggactggatttggcgcatccttttccttgtcggcgctgctaccggcgcccattccgggccccaggtgcagctggttgaatctggcggaggactggttcagcctggcggatctctgagactgtcttgtgccgccagcggcaacatcaacagcagaaactgcatgggctggttcagacaggcccctggcaagggaagagaaggcgtggcagctatcggccaagtgaccggcagaacctactacgtggacagcgtgaagggcagattcaccatcagcctggacaacagcaagaacaccctgtacctccagatgaacagcctgagagccgaggacaccgccgtgtactattgtgctgctgcccctggctgtctgctgtctgcacttagaagcgccgactacagaaactggggccagggcacactggtcaccgtttcttctggatccggcggcggaggatctggcggaggcggatctgggggcggaggctctttcgaagaagtccaacttgtggagtctggagggggcctggtgcagcccggcggctctctcagactgtcttgtgcggcaagcggctacaccttcacctcttactggatagaatgggtgaggcaggcacctggaaagggactggagtggattggagagattctgccaggagggggagatacaaattacaatgaaatcttcaaggggcgggccaccttttcagcggataccagcaagaatacagcttacctgcagatgaatagcctccgggcagaagataccgctgtttattattgcacgagacgggtgccaataagactggactattgggggcaagggactcttgtcaccgtcagttcaacgcgtatccagaaccctgatcctgccgtgtaccagctgcgggatagcaagagcagcgacaagagcgtgtgtctgttcaccgacttcgacagccagaccaacgtgtcccagagcaaggactccgacgtgtacatcaccgataagtgcgtgctggacatgcggagcatggacttcaagagcaactccgccgtggcctggtccaacaagtccgatttcgcctgcgccaacgccttcaacaacagcattatccccgaggacacattcttcccaagccccgagagcagctgcgacgtgaagctggtggaaaagagcttcgagacagacaccaacctgaacttccagaacctgagcgtgatcggcttcagaatcctgctgctgaaagtggccggctttaacctgctgatgaccctgcggctgtggtccagc

SEQ ID NO: 38411 - DNA, 2709 bp, synthetic construct
  source 1..2709: mol_type = other DNA
atggccttaccagtgaccgccttgctcctgccgctggccttgctgctccacgccgccaggccggaagtgcaactggttgaatccggtggcggcctggtgcaagcaggcggatctctcagacttagctgtgccgcctccggcagaaccttcacaatgggatggtttaggcaggctccagggaaagagagagagttcgtcgccgccatctctctgtctcccacactggcctactacgccgactctgtgaaaggccggttcaccatctccagagataatgccaagaacaccgtggtgctgcaaatgaactctctgaaacccgaggatacagccctgtactattgtgccgctgaccggaagtccgtgatgagcatcagacccgattactggggacagggcacacaagtcacagtgtcctctggtaccggcggaggcggatctggcggcggaggtagcggtggcggaggatctgaattcgacatcgtgatgacacagagccctgatagcctggccgtgtctctgggagagagagccaccattaactgcaaggccagccagagcgtggactacgacggcgacagcttcctgaactggtatcagcagaagcccggccagcctcctaagctgctgatctacgccgccagcaatctggaaagcggcgtgccaagcagattttccggctctggcagcggcaccgatttcaccctgacaatatccagcctccagcctgaggacgtggccgtgtactactgccagcagagcaacgacgaccctctgacctttggacagggcaccaaggtggaaatcaaactcgaggacctgaagaacgtgttcccacctgaggtggccgtgttcgagcctagcgaggccgagatcagccacacccagaaagccaccctcgtgtgcctggctaccggcttctaccccgaccatgtggaactgtcttggtgggtcaacggcaaagaggtgcacagcggcgtgtgtaccgacccccagccactgaaagaacagcccgccctgaacgacagccggtactgcctgagcagcagactgagagtgtccgccaccttctggcagaacccccggaaccacttcagatgccaggtgcagttctacggcctgagcgagaacgacgagtggacccaggacagagccaagcccgtgacccagatcgtgtctgccgaagcctggggcagagccgattgcggctttaccagcgagagctaccagcagggcgtgctgagcgccaccatcctgtacgagatcctgctgggcaaggccaccctgtacgccgtgctggtgtctgccctggtgctgatggctatggtcaagcggaaggacagccggggaagggccaagcgatctggatctggagcaacaaacttctcactactcaaacaagcaggtgacgtggaggagaatcccgggcctactagtaccatggactggatttggcgcatccttttccttgtcggcgctgctaccggcgcccattccgggccccaggtgcagctggttgaatctggcggaggactggttcagcctggcggatctctgagactgtcttgtgccgccagcggcaacatcaacagcagaaactgcatgggctggttcagacaggcccctggcaagggaagagaaggcgtggcagctatcggccaagtgaccggcagaacctactacgtggacagcgtgaagggcagattcaccatcagcctggacaacagcaagaacaccctgtacctccagatgaacagcctgagagccgaggacaccgccgtgtactattgtgctgctgcccctggctgtctgctgtctgcacttagaagcgccgactacagaaactggggccagggcacactggtcaccgtttcttctggatccggcggcggaggatctggcggaggcggatctgggggcggaggctctttcgaagaagtccaacttgtggagtctggagggggcctggtgcagcccggcggctctctcagactgtcttgtgcggcaagcggctacaccttcacctcttactggatagaatgggtgaggcaggcacctggaaagggactggagtggattggagagattctgccaggagggggagatacaaattacaatgaaatcttcaaggggcgggccaccttttcagcggataccagcaagaatacagcttacctgcagatgaatagcctccgggcagaagataccgctgtttattattgcacgagacgggtgccaataagactggactattgggggcaagggactcttgtcaccgtcagttcaacgcgtatccagaaccctgatcctgccgtgtaccagctgcgggatagcaagagcagcgacaagagcgtgtgtctgttcaccgacttcgacagccagaccaacgtgtcccagagcaaggactccgacgtgtacatcaccgataagtgcgtgctggacatgcggagcatggacttcaagagcaactccgccgtggcctggtccaacaagtccgatttcgcctgcgccaacgccttcaacaacagcattatccccgaggacacattcttcccaagccccgagagcagctgcgacgtgaagctggtggaaaagagcttcgagacagacaccaacctgaacttccagaacctgagcgtgatcggcttcagaatcctgctgctgaaagtggccggctttaacctgctgatgaccctgcggctgtggtccagc

SEQ ID NO: 38412 - DNA, 2721 bp, synthetic construct
  source 1..2721: mol_type = other DNA
atggccttaccagtgaccgccttgctcctgccgctggccttgctgctccacgccgccaggccgcaggttcagctgcaagagtctggccctggcctggtcaagcctagccaaacactgagcctgacctgtaccgtgtctggcggctctatcaccaccggcgagttctactggaactggttcagacagcctcctggcaaaggactggaatggatgggagccattgccgccagcggcagcacaacatacagccctagcttcgagagccggaccagcatcagcagagacaccagcaagaatcagttcagcctgaagctgagcagcgtgacagccgccgatacagccgtgtattactgcggcagatcctttggagtggccgccgtgacaaccggccagaatagaggacagggcaccctggtcacagtgtctagcggtaccggcggaggcggatctggcggcggaggtagcggtggcggaggatctgaattcgacatcgtgatgacacagagccctgatagcctggccgtgtctctgggagagagagccaccattaactgcaaggccagccagagcgtggactacgacggcgacagcttcctgaactggtatcagcagaagcccggccagcctcctaagctgctgatctacgccgccagcaatctggaaagcggcgtgccaagcagattttccggctctggcagcggcaccgatttcaccctgacaatatccagcctccagcctgaggacgtggccgtgtactactgccagcagagcaacgacgaccctctgacctttggacagggcaccaaggtggaaatcaaactcgaggacctgaagaacgtgttcccacctgaggtggccgtgttcgagcctagcgaggccgagatcagccacacccagaaagccaccctcgtgtgcctggctaccggcttctaccccgaccatgtggaactgtcttggtgggtcaacggcaaagaggtgcacagcggcgtgtgtaccgacccccagccactgaaagaacagcccgccctgaacgacagccggtactgcctgagcagcagactgagagtgtccgccaccttctggcagaacccccggaaccacttcagatgccaggtgcagttctacggcctgagcgagaacgacgagtggacccaggacagagccaagcccgtgacccagatcgtgtctgccgaagcctggggcagagccgattgcggctttaccagcgagagctaccagcagggcgtgctgagcgccaccatcctgtacgagatcctgctgggcaaggccaccctgtacgccgtgctggtgtctgccctggtgctgatggctatggtcaagcggaaggacagccggggaagggccaagcgatctggatctggagcaacaaacttctcactactcaaacaagcaggtgacgtggaggagaatcccgggcctactagtaccatggactggatttggcgcatccttttccttgtcggcgctgctaccggcgcccattccgggccccaggtgcagctggttgaatctggcggaggactggttcagcctggcggatctctgagactgtcttgtgccgccagcggcaacatcaacagcagaaactgcatgggctggttcagacaggcccctggcaagggaagagaaggcgtggcagctatcggccaagtgaccggcagaacctactacgtggacagcgtgaagggcagattcaccatcagcctggacaacagcaagaacaccctgtacctccagatgaacagcctgagagccgaggacaccgccgtgtactattgtgctgctgcccctggctgtctgctgtctgcacttagaagcgccgactacagaaactggggccagggcacactggtcaccgtttcttctggatccggcggcggaggatctggcggaggcggatctgggggcggaggctctttcgaagaagtccaacttgtggagtctggagggggcctggtgcagcccggcggctctctcagactgtcttgtgcggcaagcggctacaccttcacctcttactggatagaatgggtgaggcaggcacctggaaagggactggagtggattggagagattctgccaggagggggagatacaaattacaatgaaatcttcaaggggcgggccaccttttcagcggataccagcaagaatacagcttacctgcagatgaatagcctccgggcagaagataccgctgtttattattgcacgagacgggtgccaataagactggactattgggggcaagggactcttgtcaccgtcagttcaacgcgtatccagaaccctgatcctgccgtgtaccagctgcgggatagcaagagcagcgacaagagcgtgtgtctgttcaccgacttcgacagccagaccaacgtgtcccagagcaaggactccgacgtgtacatcaccgataagtgcgtgctggacatgcggagcatggacttcaagagcaactccgccgtggcctggtccaacaagtccgatttcgcctgcgccaacgccttcaacaacagcattatccccgaggacacattcttcccaagccccgagagcagctgcgacgtgaagctggtggaaaagagcttcgagacagacaccaacctgaacttccagaacctgagcgtgatcggcttcagaatcctgctgctgaaagtggccggctttaacctgctgatgaccctgcggctgtggtccagc

SEQ ID NO: 38413 - DNA, 1458 bp, synthetic construct
  source 1..1458: mol_type = other DNA
atggccttaccagtgaccgccttgctcctgccgctggccttgctgctccacgccgccaggccggacatcgtgatgacacagagccctgatagcctggccgtgtctctgggagagagagccaccattaactgcaaggccagccagagcgtggactacgacggcgacagcttcctgaactggtatcagcagaagcccggccagcctcctaagctgctgatctacgccgccagcaatctggaaagcggcgtgccaagcagattttccggctctggcagcggcaccgatttcaccctgacaatatccagcctccagcctgaggacgtggccgtgtactactgccagcagagcaacgacgaccctctgacctttggacagggcaccaaggtggaaatcaaaggcggaggcggaagtggaggcggaggatctggcggcggaggctctgaagtccaacttgtggagtctggagggggcctggtgcagcccggcggctctctcagactgtcttgtgcggcaagcggctacaccttcagctcttactggatagaatgggtgaggcaggcacctggaaagggactggagtggattggagagattctgccaggagggggagatacaaattacaatgaaatcttcaaggggcgggccaccttttcagcggataccagcaagaatacagcttacctgcagatgaatagcctccgggcagaagataccgctgtttattattgcacgagacgggtgccaataagactggactattgggggcaagggactcttgtcaccgtcagttcaacgcgtaaaattgaagttatgtatcctcctccttacctagacaatgagaagagcaatggaaccattatccatgtgaaagggaaacacctttgtccaagtcccctatttcccggaccttctaagcccttttgggtgctggtggtggttgggggagtcctggcttgctatagcttgctagtaacagtggcctttattattttctgggtgaggagtaagaggagcaggctcctgcacagtgactacatgaacatgactccacgccgccccggacccacccgcaagcattaccagccctatgccccaccacgcgacttcgcagcctatcgctccagagtgaagttcagcaggagcgcagacgcccccgcgtaccagcagggccagaaccagctctataacgagctcaatctaggacgaagagaggagtacgatgttttggacaagagacgtggccgggaccctgagatggggggaaagccgagaaggaagaaccctcaggaaggcctgtacaatgaactgcagaaagataagatggcggaggcctacagtgagattgggatgaaaggcgagcgccggaggggcaaggggcacgatggcctttaccagggtctcagtacagccaccaaggacacctacgacgcccttcacatgcaggccctgccccctcgc

SEQ ID NO: 38414 - DNA, 1476 bp, synthetic construct
  source 1..1476: mol_type = other DNA
atggccttaccagtgaccgccttgctcctgccgctggccttgctgctccacgccgccaggccggacatcgtgatgacacagagccctgatagcctggccgtgtctctgggagagagagccaccattaactgcaaggccagccagagcgtggactacgacggcgacagcttcctgaactggtatcagcagaagcccggccagcctcctaagctgctgatctacgccgccagcaatctggaaagcggcgtgccaagcagattttccggctctggcagcggcaccgatttcaccctgacaatatccagcctccagcctgaggacgtggccgtgtactactgccagcagagcaacgacgaccctctgacctttggacagggcaccaaggtggaaatcaaaggcggaggcggaagtggaggcggaggatctggcggcggaggctctgaagtccaacttgtggagtctggagggggcctggtgcagcccggcggctctctcagactgtcttgtgcggcaagcggctacaccttcagctcttactggatagaatgggtgaggcaggcacctggaaagggactggagtggattggagagattctgccaggagggggagatacaaattacaatgaaatcttcaaggggcgggccaccttttcagcggataccagcaagaatacagcttacctgcagatgaatagcctccgggcagaagataccgctgtttattattgcacgagacgggtgccaataagactggactattgggggcaagggactcttgtcaccgtcagttcaacgcgtgcgaagcccaccacgacgccagcgccgcgaccaccaacaccggcgcccaccatcgcgtcgcagcccctgtccctgcgcccagaggcgtgccggccagcggcggggggcgcagtgcacacgagggggctggacttcgcctgtgacatctacatctgggcgcccttggccgggacttgtggggtccttctcctgtcactggttatcaccctttactgcaaacggggcagaaagaaactcctgtatatattcaaacaaccatttatgagaccagtacaaactactcaagaggaagatggctgtagctgccgatttccagaagaagaagaaggaggatgtgaactgagagtgaagttcagcaggagcgcagacgcccccgcgtaccagcagggccagaaccagctctataacgagctgaatctaggacgaagagaggagtacgatgttttggacaagagacgtggccgggaccctgagatggggggaaagccgagaaggaagaaccctcaggaaggcctgtacaatgaactgcagaaagataagatggcggaggcctacagtgagattgggatgaaaggcgagcgccggaggggcaaggggcacgatggcctttaccagggtctcagtacagccaccaaggacacctacgacgcccttcacatgcaggccctgccccctcgc

SEQ ID NO: 38415 - DNA, 1476 bp, synthetic construct
  source 1..1476: mol_type = other DNA
atggccttaccagtgaccgccttgctcctgccgctggccttgctgctccacgccgccaggccggaagtccaacttgtggagtctggagggggcctggtgcagcccggcggctctctcagactgtcttgtgcggcaagcggctacaccttcagctcttactggatagaatgggtgaggcaggcacctggaaagggactggagtggattggagagattctgccaggagggggagatacaaattacaatgaaatcttcaaggggcgggccaccttttcagcggataccagcaagaatacagcttacctgcagatgaatagcctccgggcagaagataccgctgtttattattgcacgagacgggtgccaataagactggactattgggggcaagggactcttgtcaccgtcagttcaggcggaggcggaagtggaggcggaggatctggcggcggaggctctgacatcgtgatgacacagagccctgatagcctggccgtgtctctgggagagagagccaccattaactgcaaggccagccagagcgtggactacgacggcgacagcttcctgaactggtatcagcagaagcccggccagcctcctaagctgctgatctacgccgccagcaatctggaaagcggcgtgccaagcagattttccggctctggcagcggcaccgatttcaccctgacaatatccagcctccagcctgaggacgtggccgtgtactactgccagcagagcaacgacgaccctctgacctttggacagggcaccaaggtggaaatcaaaacgcgtgcgaagcccaccacgacgccagcgccgcgaccaccaacaccggcgcccaccatcgcgtcgcagcccctgtccctgcgcccagaggcgtgccggccagcggcggggggcgcagtgcacacgagggggctggacttcgcctgtgacatctacatctgggcgcccttggccgggacttgtggggtccttctcctgtcactggttatcaccctttactgcaaacggggcagaaagaaactcctgtatatattcaaacaaccatttatgagaccagtacaaactactcaagaggaagatggctgtagctgccgatttccagaagaagaagaaggaggatgtgaactgagagtgaagttcagcaggagcgcagacgcccccgcgtaccagcagggccagaaccagctctataacgagctgaatctaggacgaagagaggagtacgatgttttggacaagagacgtggccgggaccctgagatggggggaaagccgagaaggaagaaccctcaggaaggcctgtacaatgaactgcagaaagataagatggcggaggcctacagtgagattgggatgaaaggcgagcgccggaggggcaaggggcacgatggcctttaccagggtctcagtacagccaccaaggacacctacgacgcccttcacatgcaggccctgccccctcgc

SEQ ID NO: 38416 - DNA, 1875 bp, synthetic construct
  source 1..1875: mol_type = other DNA
atggccttaccagtgaccgccttgctcctgccgctggccttgctgctccacgccgccaggccggacatcgtgatgacacagagccctgatagcctggccgtgtctctgggagagagagccaccattaactgcaaggccagccagagcgtggactacgacggcgacagcttcctgaactggtatcagcagaagcccggccagcctcctaagctgctgatctacgccgccagcaatctggaaagcggcgtgccaagcagattttccggctctggcagcggcaccgatttcaccctgacaatatccagcctccagcctgaggacgtggccgtgtactactgccagcagagcaacgacgaccctctgacctttggacagggcaccaaggtggaaatcaaactcgagatccagaaccctgatcctgccgtgtaccagctgcgggatagcaagagcagcgacaagagcgtgtgtctgttcaccgacttcgacagccagaccaacgtgtcccagagcaaggactccgacgtgtacatcaccgataagtgcgtgctggacatgcggagcatggacttcaagagcaactccgccgtggcctggtccaacaagtccgatttcgcctgcgccaacgccttcaacaacagcattatccccgaggacacattcttcccaagcagcgacgtgccctgcgacgtgaagctggtggaaaagagcttcgagacagacaccaacctgaacttccagaacctgagcgtgatcggcttcagaatcctgctgctgaaagtggccggctttaacctgctgatgaccctgcggctgtggtccagccgcgccaagagaagcggatctggcgtgaagcagaccctgaatttcgacctgctgaagctggctggcgacgtggaatccaacccaggccctactagtatggactggatttggcgcatccttttccttgtcggcgctgctaccggcgcgcattccttcgaagaagtccaacttgtggagtctggagggggcctggtgcagcccggcggctctctcagactgtcttgtgcggcaagcggctacaccttcagctcttactggatagaatgggtgaggcaggcacctggaaagggactggagtggattggagagattctgccaggagggggagatacaaattacaatgaaatcttcaaggggcgggccaccttttcagcggataccagcaagaatacagcttacctgcagatgaatagcctccgggcagaagataccgctgtttattattgcacgagacgggtgccaataagactggactattgggggcaagggactcttgtcaccgtcagttcaacgcgtgaggacctgaagaacgtgttcccacctgaggtggccgtgttcgagcctagcaaggccgagatcgcccacacccagaaagccaccctcgtgtgcctggctaccggcttctaccccgaccatgtggaactgtcttggtgggtcaacggcaaagaggtgcacagcggcgtgtgtaccgacccccagccactgaaagaacagcccgccctgaacgacagccggtactgcctgagcagcagactgagagtgtccgccaccttctggcagaacccccggaaccacttcagatgccaggtgcagttctacggcctgagcgagaacgacgagtggacccaggacagagccaagcccgtgacccagatcgtgtctgccgaagcctggggcagagccgattgcggcatcaccagcgccagctaccaccagggcgtgctgagcgccaccatcctgtacgagatcctgctgggcaaggccaccctgtacgccgtgctggtgtctgccctggtgctgatggctatggtcaagcggaaggacagccgggga

SEQ ID NO: 38417 - DNA, 1863 bp, synthetic construct
  source 1..1863: mol_type = other DNA
atggccttaccagtgaccgccttgctcctgccgctggccttgctgctccacgccgccaggccggacatcgtgatgacacagagccctgatagcctggccgtgtctctgggagagagagccaccattaactgcaaggccagccagagcgtggactacgacggcgacagcttcctgaactggtatcagcagaagcccggccagcctcctaagctgctgatctacgccgccagcaatctggaaagcggcgtgccaagcagattttccggctctggcagcggcaccgatttcaccctgacaatatccagcctccagcctgaggacgtggccgtgtactactgccagcagagcaacgacgaccctctgacctttggacagggcaccaaggtggaaatcaaactcgaggacctgaagaacgtgttcccacctgaggtggccgtgttcgagcctagcaaggccgagatcgcccacacccagaaagccaccctcgtgtgcctggctaccggcttctaccccgaccatgtggaactgtcttggtgggtcaacggcaaagaggtgcacagcggcgtgtgtaccgacccccagccactgaaagaacagcccgccctgaacgacagccggtactgcctgagcagcagactgagagtgtccgccaccttctggcagaacccccggaaccacttcagatgccaggtgcagttctacggcctgagcgagaacgacgagtggacccaggacagagccaagcccgtgacccagatcgtgtctgccgaagcctggggcagagccgattgcggcatcaccagcgccagctaccaccagggcgtgctgagcgccaccatcctgtacgagatcctgctgggcaaggccaccctgtacgccgtgctggtgtctgccctggtgctgatggctatggtcaagcggaaggacagccggggaagggccaagcgatctggatctggagcaacaaacttctcactactcaaacaagcaggtgacgtggaggagaatcccgggcctactagtatggactggatttggcgcatccttttccttgtcggcgctgctaccggcgcgcattccttcgaagaagtccaacttgtggagtctggagggggcctggtgcagcccggcggctctctcagactgtcttgtgcggcaagcggctacaccttcagctcttactggatagaatgggtgaggcaggcacctggaaagggactggagtggattggagagattctgccaggagggggagatacaaattacaatgaaatcttcaaggggcgggccaccttttcagcggataccagcaagaatacagcttacctgcagatgaatagcctccgggcagaagataccgctgtttattattgcacgagacgggtgccaataagactggactattgggggcaagggactcttgtcaccgtcagttcaacgcgtatccagaaccctgatcctgccgtgtaccagctgcgggatagcaagagcagcgacaagagcgtgtgtctgttcaccgacttcgacagccagaccaacgtgtcccagagcaaggactccgacgtgtacatcaccgataagtgcgtgctggacatgcggagcatggacttcaagagcaactccgccgtggcctggtccaacaagtccgatttcgcctgcgccaacgccttcaacaacagcattatccccgaggacacattcttcccaagcagcgacgtgccctgcgacgtgaagctggtggaaaagagcttcgagacagacaccaacctgaacttccagaacctgagcgtgatcggcttcagaatcctgctgctgaaagtggccggctttaacctgctgatgaccctgcggctgtggtccagc

SEQ ID NO: 38418 - DNA, 1863 bp, synthetic construct
  source 1..1863: mol_type = other DNA
atggccttaccagtgaccgccttgctcctgccgctggccttgctgctccacgccgccaggccggacatcgtgatgacacagagccctgatagcctggccgtgtctctgggagagagagccaccattaactgcaaggccagccagagcgtggactacgacggcgacagcttcctgaactggtatcagcagaagcccggccagcctcctaagctgctgatctacgccgccagcaatctggaaagcggcgtgccaagcagattttccggctctggcagcggcaccgatttcaccctgacaatatccagcctccagcctgaggacgtggccgtgtactactgccagcagagcaacgacgaccctctgacctttggacagggcaccaaggtggaaatcaaactcgaggacctgaagaacgtgttcccacctgaggtggccgtgttcgagcctagcgaggccgagatcagccacacccagaaagccaccctcgtgtgcctggctaccggcttctaccccgaccatgtggaactgtcttggtgggtcaacggcaaagaggtgcacagcggcgtgtgtaccgacccccagccactgaaagaacagcccgccctgaacgacagccggtactgcctgagcagcagactgagagtgtccgccaccttctggcagaacccccggaaccacttcagatgccaggtgcagttctacggcctgagcgagaacgacgagtggacccaggacagagccaagcccgtgacccagatcgtgtctgccgaagcctggggcagagccgattgcggctttaccagcgagagctaccagcagggcgtgctgagcgccaccatcctgtacgagatcctgctgggcaaggccaccctgtacgccgtgctggtgtctgccctggtgctgatggctatggtcaagcggaaggacagccggggaagggccaagcgatctggatctggagcaacaaacttctcactactcaaacaagcaggtgacgtggaggagaatcccgggcctactagtatggactggatttggcgcatccttttccttgtcggcgctgctaccggcgcgcattccttcgaagaagtccaacttgtggagtctggagggggcctggtgcagcccggcggctctctcagactgtcttgtgcggcaagcggctacaccttcagctcttactggatagaatgggtgaggcaggcacctggaaagggactggagtggattggagagattctgccaggagggggagatacaaattacaatgaaatcttcaaggggcgggccaccttttcagcggataccagcaagaatacagcttacctgcagatgaatagcctccgggcagaagataccgctgtttattattgcacgagacgggtgccaataagactggactattgggggcaagggactcttgtcaccgtcagttcaacgcgtatccagaaccctgatcctgccgtgtaccagctgcgggatagcaagagcagcgacaagagcgtgtgtctgttcaccgacttcgacagccagaccaacgtgtcccagagcaaggactccgacgtgtacatcaccgataagtgcgtgctggacatgcggagcatggacttcaagagcaactccgccgtggcctggtccaacaagtccgatttcgcctgcgccaacgccttcaacaacagcattatccccgaggacacattcttcccaagccccgagagcagctgcgacgtgaagctggtggaaaagagcttcgagacagacaccaacctgaacttccagaacctgagcgtgatcggcttcagaatcctgctgctgaaagtggccggctttaacctgctgatgaccctgcggctgtggtccagc

SEQ ID NO: 38419 - DNA, 1875 bp, synthetic construct
  source 1..1875: mol_type = other DNA
atggccttaccagtgaccgccttgctcctgccgctggccttgctgctccacgccgccaggccggacatcgtgatgacacagagccctgatagcctggccgtgtctctgggagagagagccaccattaactgcaaggccagccagagcgtggactacgacggcgacagcttcctgaactggtatcagcagaagcccggccagcctcctaagctgctgatctacgccgccagcaatctggaaagcggcgtgccaagcagattttccggctctggcagcggcaccgatttcaccctgacaatatccagcctccagcctgaggacgtggccgtgtactactgccagcagagcaacgacgaccctctgacctttggacagggcaccaaggtggaaatcaaactcgagatccagaaccctgatcctgccgtgtaccagctgcgggatagcaagagcagcgacaagagcgtgtgtctgttcaccgacttcgacagccagaccaacgtgtcccagagcaaggactccgacgtgtacatcaccgataagtgcgtgctggacatgcggagcatggacttcaagagcaactccgccgtggcctggtccaacaagtccgatttcgcctgcgccaacgccttcaacaacagcattatccccgaggacacattcttcccaagccccgagagcagctgcgacgtgaagctggtggaaaagagcttcgagacagacaccaacctgaacttccagaacctgagcgtgatcggcttcagaatcctgctgctgaaagtggccggctttaacctgctgatgaccctgcggctgtggtccagccgcgccaagagaagcggatctggcgtgaagcagaccctgaatttcgacctgctgaagctggctggcgacgtggaatccaacccaggccctactagtatggactggatttggcgcatccttttccttgtcggcgctgctaccggcgcgcattccttcgaagaagtccaacttgtggagtctggagggggcctggtgcagcccggcggctctctcagactgtcttgtgcggcaagcggctacaccttcagctcttactggatagaatgggtgaggcaggcacctggaaagggactggagtggattggagagattctgccaggagggggagatacaaattacaatgaaatcttcaaggggcgggccaccttttcagcggataccagcaagaatacagcttacctgcagatgaatagcctccgggcagaagataccgctgtttattattgcacgagacgggtgccaataagactggactattgggggcaagggactcttgtcaccgtcagttcaacgcgtgaggacctgaagaacgtgttcccacctgaggtggccgtgttcgagcctagcgaggccgagatcagccacacccagaaagccaccctcgtgtgcctggctaccggcttctaccccgaccatgtggaactgtcttggtgggtcaacggcaaagaggtgcacagcggcgtgtgtaccgacccccagccactgaaagaacagcccgccctgaacgacagccggtactgcctgagcagcagactgagagtgtccgccaccttctggcagaacccccggaaccacttcagatgccaggtgcagttctacggcctgagcgagaacgacgagtggacccaggacagagccaagcccgtgacccagatcgtgtctgccgaagcctggggcagagccgattgcggctttaccagcgagagctaccagcagggcgtgctgagcgccaccatcctgtacgagatcctgctgggcaaggccaccctgtacgccgtgctggtgtctgccctggtgctgatggctatggtcaagcggaaggacagccgggga

SEQ ID NO: 38420 - DNA, 1911 bp, synthetic construct
  source 1..1911: mol_type = other DNA
atggccttaccagtgaccgccttgctcctgccgctggccttgctgctccacgccgccaggccgctcgaggaggacctgaagaacgtgttcccacctgaggtggccgtgttcgagcctagcaaggccgagatcgcccacacccagaaagccaccctcgtgtgcctggctaccggcttctaccccgaccatgtggaactgtcttggtgggtcaacggcaaagaggtgcacagcggcgtgtgtaccgacccccagccactgaaagaacagcccgccctgaacgacagccggtactgcctgagcagcagactgagagtgtccgccaccttctggcagaacccccggaaccacttcagatgccaggtgcagttctacggcctgagcgagaacgacgagtggacccaggacagagccaagcccgtgacccagatcgtgtctgccgaagcctggggcagagccgattgcggcatcaccagcgccagctaccaccagggcgtgctgagcgccaccatcctgtacgagatcctgctgggcaaggccaccctgtacgccgtgctggtgtctgccctggtgctgatggctatggtcaagcggaaggacagccggggaagggccaagcgatctggatctggagcaacaaacttctcactactcaaacaagcaggtgacgtggaggagaatcccgggcctactagcatggccttaccagtgaccgccttgctcctgccgctggccttgctgctccacgccgccaggccggacatcgtgatgacacagagccctgatagcctggccgtgtctctgggagagagagccaccattaactgcaaggccagccagagcgtggactacgacggcgacagcttcctgaactggtatcagcagaagcccggccagcctcctaagctgctgatctacgccgccagcaatctggaaagcggcgtgccaagcagattttccggctctggcagcggcaccgatttcaccctgacaatatccagcctccagcctgaggacgtggccgtgtactactgccagcagagcaacgacgaccctctgacctttggacagggcaccaaggtggaaatcaaaggcggaggcggaagtggaggcggaggatctggcggcggaggctctgaagtccaacttgtggagtctggagggggcctggtgcagcccggcggctctctcagactgtcttgtgcggcaagcggctacaccttcagctcttactggatagaatgggtgaggcaggcacctggaaagggactggagtggattggagagattctgccaggagggggagatacaaattacaatgaaatcttcaaggggcgggccaccttttcagcggataccagcaagaatacagcttacctgcagatgaatagcctccgggcagaagataccgctgtttattattgcacgagacgggtgccaataagactggactattgggggcaagggactcttgtcaccgtcagttcaacgcgtatccagaaccctgatcctgccgtgtaccagctgcgggatagcaagagcagcgacaagagcgtgtgtctgttcaccgacttcgacagccagaccaacgtgtcccagagcaaggactccgacgtgtacatcaccgataagtgcgtgctggacatgcggagcatggacttcaagagcaactccgccgtggcctggtccaacaagtccgatttcgcctgcgccaacgccttcaacaacagcattatccccgaggacacattcttcccaagcagcgacgtgccctgcgacgtgaagctggtggaaaagagcttcgagacagacaccaacctgaacttccagaacctgagcgtgatcggcttcagaatcctgctgctgaaagtggccggctttaacctgctgatgaccctgcggctgtggtccagc

SEQ ID NO: 38421 - DNA, 1932 bp, synthetic construct
  source 1..1932: mol_type = other DNA
atggccttaccagtgaccgccttgctcctgccgctggccttgctgctccacgccgccaggccgctcgagggctccggcgatcgccctgatcctgccgtgtaccagctgcgggatagcaagagcagcgacaagagcgtgtgtctgttcaccgacttcgacagccagaccaacgtgtcccagagcaaggactccgacgtgtacatcaccgataagtgcgtgctggacatgcggagcatggacttcaagagcaactccgccgtggcctggtccaacaagtccgatttcgcctgcgccaacgccttcaacaacagcattatccccgaggacacattcttcccaagccccgagagcagctgcgacgtgaagctggtggaaaagagcttcgagacagacaccaacctgaacttccagaacctgagcgtgatcggcttcagaatcctgctgctgaaagtggccggctttaacctgctgatgaccctgcggctgtggtccagctctagtcgcgccaagagaagcggatctggcgtgaagcagaccctgaatttcgacctgctgaagctggctggcgacgtggaatccaacccaggccccactagcatggccttaccagtgaccgccttgctcctgccgctggccttgctgctccacgccgccaggccggacatcgtgatgacacagagccctgatagcctggccgtgtctctgggagagagagccaccattaactgcaaggccagccagagcgtggactacgacggcgacagcttcctgaactggtatcagcagaagcccggccagcctcctaagctgctgatctacgccgccagcaatctggaaagcggcgtgccaagcagattttccggctctggcagcggcaccgatttcaccctgacaatatccagcctccagcctgaggacgtggccgtgtactactgccagcagagcaacgacgaccctctgacctttggacagggcaccaaggtggaaatcaaaggcggaggcggaagtggaggcggaggatctggcggcggaggctctgaagtccaacttgtggagtctggagggggcctggtgcagcccggcggctctctcagactgtcttgtgcggcaagcggctacaccttcagctcttactggatagaatgggtgaggcaggcacctggaaagggactggagtggattggagagattctgccaggagggggagatacaaattacaatgaaatcttcaaggggcgggccaccttttcagcggataccagcaagaatacagcttacctgcagatgaatagcctccgggcagaagataccgctgtttattattgcacgagacgggtgccaataagactggactattgggggcaagggactcttgtcaccgtcagttcaacgcgtgaggacctgaagaacgtgttcccacctgaggtggccgtgttcgagcctagcgaggccgagatcagccacacccagaaagccaccctcgtgtgcctggctaccggcttctaccccgaccatgtggaactgtcttggtgggtcaacggcaaagaggtgcacagcggcgtgtgtaccgacccccagccactgaaagaacagcccgccctgaacgacagccggtactgcctgagcagcagactgagagtgtccgccaccttctggcagaacccccggaaccacttcagatgccaggtgcagttctacggcctgagcgagaacgacgagtggacccaggacagagccaagcccgtgacccagatcgtgtctgccgaagcctggggcagagccgattgcggctttaccagcgagagctaccagcagggcgtgctgagcgccaccatcctgtacgagatcctgctgggcaaggccaccctgtacgccgtgctggtgtctgccctggtgctgatggctatggtcaagcggaaggacagccgggga

SEQ ID NO: 38422 - DNA, 1863 bp, synthetic construct
  source 1..1863: mol_type = other DNA
atggccttaccagtgaccgccttgctcctgccgctggccttgctgctccacgccgccaggccggacatcgtgatgacacagagccctgatagcctggccgtgtctctgggagagagagccaccattaactgcaaggccagccagagcgtggactacgacggcgacagcttcctgaactggtatcagcagaagcccggccagcctcctaagctgctgatctacgccgccagcaatctggaaagcggcgtgccaagcagattttccggctctggcagcggcaccgatttcaccctgacaatatccagcctccagcctgaggacgtggccgtgtactactgccagcagagcaacgacgaccctctgacctttggacagggcaccaaggtggaaatcaaactcgaggacctgaagaacgtgttcccacctgaggtggccgtgttcgagcctagcgaggccgagatcagccacacccagaaagccaccctcgtgtgcctggctaccggcttctaccccgaccatgtggaactgtcttggtgggtcaacggcaaagaggtgcacagcggcgtgtctaccgacccccagccactgaaagaacagcccgccctgaacgacagccggtactgcctgagcagcagactgagagtgtccgccaccttctggcagaacccccggaaccacttcagatgccaggtgcagttctacggcctgagcgagaacgacgagtggacccaggacagagccaagcccgtgacccagatcgtgtctgccgaagcctggggcagagccgattgcggctttaccagcgagagctaccagcagggcgtgctgagcgccaccatcctgtacgagatcctgctgggcaaggccaccctgtacgccgtgctggtgtctgccctggtgctgatggctatggtcaagcggaaggacagccggggaagggccaagcgatctggatctggagcaacaaacttctcactactcaaacaagcaggtgacgtggaggagaatcccgggcctactagtatggactggatttggcgcatccttttccttgtcggcgctgctaccggcgcgcattccttcgaagaagtccaacttgtggagtctggagggggcctggtgcagcccggcggctctctcagactgtcttgtgcggcaagcggctacaccttcagctcttactggatagaatgggtgaggcaggcacctggaaagggactggagtggattggagagattctgccaggagggggagatacaaattacaatgaaatcttcaaggggcgggccaccttttcagcggataccagcaagaatacagcttacctgcagatgaatagcctccgggcagaagataccgctgtttattattgcacgagacgggtgccaataagactggactattgggggcaagggactcttgtcaccgtcagttcaacgcgtatccagaaccctgatcctgccgtgtaccagctgcgggatagcaagagcagcgacaagagcgtgtgtctgttcaccgacttcgacagccagaccaacgtgtcccagagcaaggactccgacgtgtacatcaccgataagaccgtgctggacatgcggagcatggacttcaagagcaactccgccgtggcctggtccaacaagtccgatttcgcctgcgccaacgccttcaacaacagcattatccccgaggacacattcttcccaagccccgagagcagctgcgacgtgaagctggtggaaaagagcttcgagacagacaccaacctgaacttccagaacctgagcgtgatcggcttcagaatcctgctgctgaaagtggccggctttaacctgctgatgaccctgcggctgtggtccagc

SEQ ID NO: 38423 - DNA, 1887 bp, synthetic construct
  source 1..1887: mol_type = other DNA
atggccttaccagtgaccgccttgctcctgccgctggccttgctgctccacgccgccaggccggacatcgtgatgacacagagccctgatagcctggccgtgtctctgggagagagagccaccattaactgcaaggccagccagagcgtggactacgacggcgacagcttcctgaactggtatcagcagaagcccggccagcctcctaagctgctgatctacgccgccagcaatctggaaagcggcgtgccaagcagattttccggctctggcagcggcaccgatttcaccctgacaatatccagcctccagcctgaggacgtggccgtgtactactgccagcagagcaacgacgaccctctgacctttggacagggcaccaaggtggaaatcaaactcgaggacaagcagctggacgccgacgtgtcccccaagcctaccatcttcctgccctctatcgccgagacaaagctccagaaggccggcacctacctgtgcctgctggaaaagttcttcccagatgtgattaagatccactggcaggaaaagaagtccaacaccatcctgggcagccaggaaggcaacaccatgaagaccaacgacacctacatgaagttcagctggctgaccgtgcccgagaagtccctggacaaagaacacagatgcatcgtgcggcacgaaaacaacaagaacggcgtggaccaggaaatcatcttcccacccatcaagaccgatgtgattacaatggaccccaaggacaactgctccaaggacgccaacgataccctgctgctccagctgaccaacaccagcgcctactacatgtacttgttgctgctgctgaagtccgtggtgtacttcgccatcatcacatgctgcctgctgcggagaaccgccttctgctgcaacggcgagaagtctagggccaagcgatctggatctggagcaacaaacttctcactactcaaacaagcaggtgacgtggaggagaatcccgggcctactagtatggactggatttggcgcatccttttccttgtcggcgctgctaccggcgcgcattccttcgaagaagtccaacttgtggagtctggagggggcctggtgcagcccggcggctctctcagactgtcttgtgcggcaagcggctacaccttcagctcttactggatagaatgggtgaggcaggcacctggaaagggactggagtggattggagagattctgccaggagggggagatacaaattacaatgaaatcttcaaggggcgggccaccttttcagcggataccagcaagaatacagcttacctgcagatgaatagcctccgggcagaagataccgctgtttattattgcacgagacgggtgccaataagactggactattgggggcaagggactcttgtcaccgtcagttcaacgcgtagccagcctcacaccaagcccagcgtgttcgtgatgaagaacggcaccaacgtggcctgcctcgtgaaagagttctaccccaaggacatcaggatcaacctggtgtccagcaagaagatcaccgagttcgaccccgccatcgtgatctcccccagcggcaagtacaacgccgtgaagctggggaagtacgaggacagcaacagcgtgacctgctccgtgcagcacgacaacaagaccgtgcacagcaccgactttgaagtgaaaaccgactccaccgaccacgtgaagcccaaagagacagagaacaccaagcagcccagcaagagctgccacaagcccaaggccatcgtgcacaccgagaaagtgaacatgatgagcctgaccgtgctgggcctgcggatgctgttcgccaaaaccgtggccgtgaacttcctgctgaccgccaagctgttcttcctc

SEQ ID NO: 38424 - DNA, 1887 bp, synthetic construct
  source 1..1887: mol_type = other DNA
atggccttaccagtgaccgccttgctcctgccgctggccttgctgctccacgccgccaggccggacatcgtgatgacacagagccctgatagcctggccgtgtctctgggagagagagccaccattaactgcaaggccagccagagcgtggactacgacggcgacagcttcctgaactggtatcagcagaagcccggccagcctcctaagctgctgatctacgccgccagcaatctggaaagcggcgtgccaagcagattttccggctctggcagcggcaccgatttcaccctgacaatatccagcctccagcctgaggacgtggccgtgtactactgccagcagagcaacgacgaccctctgacctttggacagggcaccaaggtggaaatcaaactcgagagccagcctcacaccaagcccagcgtgttcgtgatgaagaacggcaccaacgtggcctgcctcgtgaaagagttctaccccaaggacatcaggatcaacctggtgtccagcaagaagatcaccgagttcgaccccgccatcgtgatctcccccagcggcaagtacaacgccgtgaagctggggaagtacgaggacagcaacagcgtgacctgctccgtgcagcacgacaacaagaccgtgcacagcaccgactttgaagtgaaaaccgactccaccgaccacgtgaagcccaaagagacagagaacaccaagcagcccagcaagagctgccacaagcccaaggccatcgtgcacaccgagaaagtgaacatgatgagcctgaccgtgctgggcctgcggatgctgttcgccaaaaccgtggccgtgaacttcctgctgaccgccaagctgttcttcctcagggccaagcgatctggatctggagcaacaaacttctcactactcaaacaagcaggtgacgtggaggagaatcccgggcctactagtatggactggatttggcgcatccttttccttgtcggcgctgctaccggcgcgcattccttcgaagaagtccaacttgtggagtctggagggggcctggtgcagcccggcggctctctcagactgtcttgtgcggcaagcggctacaccttcagctcttactggatagaatgggtgaggcaggcacctggaaagggactggagtggattggagagattctgccaggagggggagatacaaattacaatgaaatcttcaaggggcgggccaccttttcagcggataccagcaagaatacagcttacctgcagatgaatagcctccgggcagaagataccgctgtttattattgcacgagacgggtgccaataagactggactattgggggcaagggactcttgtcaccgtcagttcaacgcgtgacaagcagctggacgccgacgtgtcccccaagcctaccatcttcctgccctctatcgccgagacaaagctccagaaggccggcacctacctgtgcctgctggaaaagttcttcccagatgtgattaagatccactggcaggaaaagaagtccaacaccatcctgggcagccaggaaggcaacaccatgaagaccaacgacacctacatgaagttcagctggctgaccgtgcccgagaagtccctggacaaagaacacagatgcatcgtgcggcacgaaaacaacaagaacggcgtggaccaggaaatcatcttcccacccatcaagaccgatgtgattacaatggaccccaaggacaactgctccaaggacgccaacgataccctgctgctccagctgaccaacaccagcgcctactacatgtacttgttgctgctgctgaagtccgtggtgtacttcgccatcatcacatgctgcctgctgcggagaaccgccttctgctgcaacggcgagaagtct

SEQ ID NO: 38425 - DNA, 1932 bp, synthetic construct
  source 1..1932: mol_type = other DNA
atggccttaccagtgaccgccttgctcctgccgctggccttgctgctccacgccgccaggccgctcgaggacaagcagctggacgccgacgtgtcccccaagcctaccatcttcctgccctctatcgccgagacaaagctccagaaggccggcacctacctgtgcctgctggaaaagttcttcccagatgtgattaagatccactggcaggaaaagaagtccaacaccatcctgggcagccaggaaggcaacaccatgaagaccaacgacacctacatgaagttcagctggctgaccgtgcccgagaagtccctggacaaagaacacagatgcatcgtgcggcacgaaaacaacaagaacggcgtggaccaggaaatcatcttcccacccatcaagaccgatgtgattacaatggaccccaaggacaactgctccaaggacgccaacgataccctgctgctccagctgaccaacaccagcgcctactacatgtacttgttgctgctgctgaagtccgtggtgtacttcgccatcatcacatgctgcctgctgcggagaaccgccttctgctgcaacggcgagaagtctagggccaagcgatctggatctggagcaacaaacttctcactactcaaacaagcaggtgacgtggaggagaatcccgggcctactagcatggccttaccagtgaccgccttgctcctgccgctggccttgctgctccacgccgccaggccggacatcgtgatgacacagagccctgatagcctggccgtgtctctgggagagagagccaccattaactgcaaggccagccagagcgtggactacgacggcgacagcttcctgaactggtatcagcagaagcccggccagcctcctaagctgctgatctacgccgccagcaatctggaaagcggcgtgccaagcagattttccggctctggcagcggcaccgatttcaccctgacaatatccagcctccagcctgaggacgtggccgtgtactactgccagcagagcaacgacgaccctctgacctttggacagggcaccaaggtggaaatcaaaggcggaggcggaagtggaggcggaggatctggcggcggaggctctgaagtccaacttgtggagtctggagggggcctggtgcagcccggcggctctctcagactgtcttgtgcggcaagcggctacaccttcagctcttactggatagaatgggtgaggcaggcacctggaaagggactggagtggattggagagattctgccaggagggggagatacaaattacaatgaaatcttcaaggggcgggccaccttttcagcggataccagcaagaatacagcttacctgcagatgaatagcctccgggcagaagataccgctgtttattattgcacgagacgggtgccaataagactggactattgggggcaagggactcttgtcaccgtcagttcaacgcgtagccagcctcacaccaagcccagcgtgttcgtgatgaagaacggcaccaacgtggcctgcctcgtgaaagagttctaccccaaggacatcaggatcaacctggtgtccagcaagaagatcaccgagttcgaccccgccatcgtgatctcccccagcggcaagtacaacgccgtgaagctggggaagtacgaggacagcaacagcgtgacctgctccgtgcagcacgacaacaagaccgtgcacagcaccgactttgaagtgaaaaccgactccaccgaccacgtgaagcccaaagagacagagaacaccaagcagcccagcaagagctgccacaagcccaaggccatcgtgcacaccgagaaagtgaacatgatgagcctgaccgtgctgggcctgcggatgctgttcgccaaaaccgtggccgtgaacttcctgctgaccgccaagctgttcttcctc

SEQ ID NO: 38426 - DNA, 2394 bp, synthetic construct
  source 1..2394: mol_type = other DNA
atggccttaccagtgaccgccttgctcctgccgctggccttgctgctccacgccgccaggccggacatcgtgatgacacagagccctgatagcctggccgtgtctctgggagagagagccaccattaactgcaaggccagccagagcgtggactacgacggcgacagcttcctgaactggtatcagcagaagcccggccagcctcctaagctgctgatctacgccgccagcaatctggaaagcggcgtgccaagcagattttccggctctggcagcggcaccgatttcaccctgacaatatccagcctccagcctgaggacgtggccgtgtactactgccagcagagcaacgacgaccctctgacctttggacagggcaccaaggtggaaatcaaaggacagcctaaggccaatcctaccgtgacactgttccctccaagcagcgaagaactccaggccaacaaggccacacttgtgtgcctgatctccgacttctaccctggggctgtgacagtggcttggaaggccgatggatctcctgtgaaagccggcgtggaaaccaccaagccatccaagcagagcaacaacaaatacgccgccagctcctacctgagcctgacacctgagcagtggaagtcccacagatcctacagctgccaagtgacccacgaaggcagcaccgtggaaaagacagtggcccctacagagtgcagcggatcccagagcttcggcctgctggaccccaagctgtgctacctgctggatggcatcctgttcatctacggcgtgatcctgaccgccctgttcctgagagtgaagttcagcagaagcgccgacgcccctgcctaccagcagggacagaaccaactgtacaacgagctgaacctgggcagacgggaagagtacgacgtgctggacaagcggagaggcagggaccctgagatgggcggaaagccccagcggagaaagaacccccaggaaggactgtataacgaactccagaaagacaagatggccgaagcctacagcgagatcggcatgaagggcgagcggagaagaggcaagggccacgatggcctgtaccagggcctgagcaccgccaccaaggacacctatgacgccctgcacatgcaggccctgcctccaagaagggccaagcgatctggatctggagcaacaaacttctcactactcaaacaagcaggtgacgtggaggagaatcccgggcctactagtatggactggatttggcgcatccttttccttgtcggcgctgctaccggcgcgcattccttcgaagaagtccaacttgtggagtctggagggggcctggtgcagcccggcggctctctcagactgtcttgtgcggcaagcggctacaccttcagctcttactggatagaatgggtgaggcaggcacctggaaagggactggagtggattggagagattctgccaggagggggagatacaaattacaatgaaatcttcaaggggcgggccaccttttcagcggataccagcaagaatacagcttacctgcagatgaatagcctccgggcagaagataccgctgtttattattgcacgagacgggtgccaataagactggactattgggggcaagggactcttgtcaccgtcagttcagcctctacaaagggaccctccgtgtttcctctggctcccagcagcaagtctacaagcggaggaacagccgctctgggctgcctggtcaaggattactttcccgagcctgtgaccgtgtcctggaatagcggagcactgacaagcggcgtgcacacctttccagccgtgctgcaaagcagcggcctgtactctctgagcagcgtggtcacagtgcctagctctagcctgggcacccagacctacatctgcaatgtgaaccacaagcctagcaacaccaaggtggacaagagagtggaacccaagagctgtggtacccagagttttgggttgttggaccctaaattgtgctatctgttggacggaatcctgttcatttacggagtgatcctgaccgcattgttcctgcgggttaagttttccagatccgcagacgcacccgcttaccaacaagggcagaaccaactctacaatgaacttaatttggggcggagggaagagtacgacgttctggacaaaaggaggggacgagatcccgagatgggcggaaagcctcagcgaaggaagaatccgcaagaggggctttataacgaactccagaaagataaaatggcagaagcctatagtgagattgggatgaagggagaaaggaggaggggtaaaggtcacgatgggttgtaccaaggattgagcacagccactaaagatacctatgatgcgctccacatgcaggccctgccgccaaga

SEQ ID NO: 38427 - DNA, 2451 bp, synthetic construct
  source 1..2451: mol_type = other DNA
atggccttaccagtgaccgccttgctcctgccgctggccttgctgctccacgccgccaggccggacatcgtgatgacacagagccctgatagcctggccgtgtctctgggagagagagccaccattaactgcaaggccagccagagcgtggactacgacggcgacagcttcctgaactggtatcagcagaagcccggccagcctcctaagctgctgatctacgccgccagcaatctggaaagcggcgtgccaagcagattttccggctctggcagcggcaccgatttcaccctgacaatatccagcctccagcctgaggacgtggccgtgtactactgccagcagagcaacgacgaccctctgacctttggacagggcaccaaggtggaaatcaaactcgaggacctgaagaacgtgttcccacctgaggtggccgtgttcgagcctagcgaggccgagatcagccacacccagaaagccaccctcgtgtgcctggctaccggcttctaccccgaccatgtggaactgtcttggtgggtcaacggcaaagaggtgcacagcggcgtgtctaccgacccccagccactgaaagaacagcccgccctgaacgacagccggtactgcctgagcagcagactgagagtgtccgccaccttctggcagaacccccggaaccacttcagatgccaggtgcagttctacggcctgagcgagaacgacgagtggacccaggacagagccaagcccgtgacccagatcgtgtctgccgaagcctggggcagagccgattgcggatcccagagcttcggcctgctggaccccaagctgtgctacctgctggatggcatcctgttcatctacggcgtgatcctgaccgccctgttcctgagagtgaagttcagcagaagcgccgacgcccctgcctaccagcagggacagaaccaactgtacaacgagctgaacctgggcagacgggaagagtacgacgtgctggacaagcggagaggcagggaccctgagatgggcggaaagccccagcggagaaagaacccccaggaaggactgtataacgaactccagaaagacaagatggccgaagcctacagcgagatcggcatgaagggcgagcggagaagaggcaagggccacgatggcctgtaccagggcctgagcaccgccaccaaggacacctatgacgccctgcacatgcaggccctgcctccaagaagggccaagcgatctggatctggagcaacaaacttctcactactcaaacaagcaggtgacgtggaggagaatcccgggcctactagtatggactggatttggcgcatccttttccttgtcggcgctgctaccggcgcgcattccttcgaagaagtccaacttgtggagtctggagggggcctggtgcagcccggcggctctctcagactgtcttgtgcggcaagcggctacaccttcagctcttactggatagaatgggtgaggcaggcacctggaaagggactggagtggattggagagattctgccaggagggggagatacaaattacaatgaaatcttcaaggggcgggccaccttttcagcggataccagcaagaatacagcttacctgcagatgaatagcctccgggcagaagataccgctgtttattattgcacgagacgggtgccaataagactggactattgggggcaagggactcttgtcaccgtcagttcaacgcgtatccagaaccctgatcctgccgtgtaccagctgcgggatagcaagagcagcgacaagagcgtgtgtctgttcaccgacttcgacagccagaccaacgtgtcccagagcaaggactccgacgtgtacatcaccgataagaccgtgctggacatgcggagcatggacttcaagagcaactccgccgtggcctggtccaacaagtccgatttcgcctgcgccaacgccttcaacaacagcattatccccgaggacacattcttcccaagccccgagagcagctgcggtacccagagttttgggttgttggaccctaaattgtgctatctgttggacggaatcctgttcatttacggagtgatcctgaccgcattgttcctgcgggttaagttttccagatccgcagacgcacccgcttaccaacaagggcagaaccaactctacaatgaacttaatttggggcggagggaagagtacgacgttctggacaaaaggaggggacgagatcccgagatgggcggaaagcctcagcgaaggaagaatccgcaagaggggctttataacgaactccagaaagataaaatggcagaagcctatagtgagattgggatgaagggagaaaggaggaggggtaaaggtcacgatgggttgtaccaaggattgagcacagccactaaagatacctatgatgcgctccacatgcaggccctgccgccaaga

SEQ ID NO: 38428 - DNA, 2577 bp, synthetic construct
  source 1..2577: mol_type = other DNA
atggccttaccagtgaccgccttgctcctgccgctggccttgctgctccacgccgccaggccggacatcgtgatgacacagagccctgatagcctggccgtgtctctgggagagagagccaccattaactgcaaggccagccagagcgtggactacgacggcgacagcttcctgaactggtatcagcagaagcccggccagcctcctaagctgctgatctacgccgccagcaatctggaaagcggcgtgccaagcagattttccggctctggcagcggcaccgatttcaccctgacaatatccagcctccagcctgaggacgtggccgtgtactactgccagcagagcaacgacgaccctctgacctttggacagggcaccaaggtggaaatcaaactcgaggaggacctgaagaacgtgttcccacctgaggtggccgtgttcgagcctagcgaggccgagatcagccacacccagaaagccaccctcgtgtgcctggctaccggcttctaccccgaccatgtggaactgtcttggtgggtcaacggcaaagaggtgcacagcggcgtgtctaccgacccccagccactgaaagaacagcccgccctgaacgacagccggtactgcctgagcagcagactgagagtgtccgccaccttctggcagaacccccggaaccacttcagatgccaggtgcagttctacggcctgagcgagaacgacgagtggacccaggacagagccaagcccgtgacccagatcgtgtctgccgaagcctggggcagagccgattgcggatcccagagcttcggcctgctggaccccaagctgtgctacctgctggatggcatcctgttcatctacggcgtgatcctgaccgccctgttcctgagagtgaagttcagcagaagcgccgacgcccctgcctaccagcagggacagaaccaactgtacaacgagctgaacctgggcagacgggaagagtacgacgtgctggacaagcggagaggcagggaccctgagatgggcggaaagccccagcggagaaagaacccccaggaaggactgtataacgaactccagaaagacaagatggccgaagcctacagcgagatcggcatgaagggcgagcggagaagaggcaagggccacgatggcctgtaccagggcctgagcaccgccaccaaggacacctatgacgccctgcacatgcaggccctgcctccaagaagggccaagcgatctggatctggagcaacaaacttctcactactcaaacaagcaggtgacgtggaggagaatcccgggcctactagtatggactggatttggcgcatccttttccttgtcggcgctgctaccggcgcgcattccttcgaagaagtccaacttgtggagtctggagggggcctggtgcagcccggcggctctctcagactgtcttgtgcggcaagcggctacaccttcagctcttactggatagaatgggtgaggcaggcacctggaaagggactggagtggattggagagattctgccaggagggggagatacaaattacaatgaaatcttcaaggggcgggccaccttttcagcggataccagcaagaatacagcttacctgcagatgaatagcctccgggcagaagataccgctgtttattattgcacgagacgggtgccaataagactggactattgggggcaagggactcttgtcaccgtcagttcaacgcgtatccagaaccctgatcctgccgtgtaccagctgcgggatagcaagagcagcgacaagagcgtgtgtctgttcaccgacttcgacagccagaccaacgtgtcccagagcaaggactccgacgtgtacatcaccgataagaccgtgctggacatgcggagcatggacttcaagagcaactccgccgtggcctggtccaacaagtccgatttcgcctgcgccaacgccttcaacaacagcattatccccgaggacacattcttcccaagccccgagagcagctgcggtacccagagttttgggttgttggaccctaaattgtgctatctgttggacggaatcctgttcatttacggagtgatcctgaccgcattgttcctgaggagcaagcggtcacggctgctccacagcgattacatgaatatgacaccacgaagaccgggtcctactcgcaaacactaccaaccctacgcacctccccgcgactttgcagcgtaccgatctcgggttaagttttccagatccgcagacgcacccgcttaccaacaagggcagaaccaactctacaatgaacttaatttggggcggagggaagagtacgacgttctggacaaaaggaggggacgagatcccgagatgggcggaaagcctcagcgaaggaagaatccgcaagaggggctttataacgaactccagaaagataaaatggcagaagcctatagtgagattgggatgaagggagaaaggaggaggggtaaaggtcacgatgggttgtaccaaggattgagcacagccactaaagatacctatgatgcgctccacatgcaggccctgccgccaaga

SEQ ID NO: 38429 - DNA, 2706 bp, synthetic construct
  source 1..2706: mol_type = other DNA
atggccttaccagtgaccgccttgctcctgccgctggccttgctgctccacgccgccaggccggacatcgtgatgacacagagccctgatagcctggccgtgtctctgggagagagagccaccattaactgcaaggccagccagagcgtggactacgacggcgacagcttcctgaactggtatcagcagaagcccggccagcctcctaagctgctgatctacgccgccagcaatctggaaagcggcgtgccaagcagattttccggctctggcagcggcaccgatttcaccctgacaatatccagcctccagcctgaggacgtggccgtgtactactgccagcagagcaacgacgaccctctgacctttggacagggcaccaaggtggaaatcaaactcgaggaggacctgaagaacgtgttcccacctgaggtggccgtgttcgagcctagcgaggccgagatcagccacacccagaaagccaccctcgtgtgcctggctaccggcttctaccccgaccatgtggaactgtcttggtgggtcaacggcaaagaggtgcacagcggcgtgtctaccgacccccagccactgaaagaacagcccgccctgaacgacagccggtactgcctgagcagcagactgagagtgtccgccaccttctggcagaacccccggaaccacttcagatgccaggtgcagttctacggcctgagcgagaacgacgagtggacccaggacagagccaagcccgtgacccagatcgtgtctgccgaagcctggggcagagccgattgcggatcccagagcttcggcctgctggaccccaagctgtgctacctgctggatggcatcctgttcatctacggcgtgatcctgaccgccctgttcctgaaacggggcagaaagaaactcctgtatatattcaaacaaccatttatgagaccagtacaaactactcaagaggaagatggctgtagctgccgatttccagaagaagaagaaggaggatgtgaactgagagtgaagttcagcagaagcgccgacgcccctgcctaccagcagggacagaaccaactgtacaacgagctgaacctgggcagacgggaagagtacgacgtgctggacaagcggagaggcagggaccctgagatgggcggaaagccccagcggagaaagaacccccaggaaggactgtataacgaactccagaaagacaagatggccgaagcctacagcgagatcggcatgaagggcgagcggagaagaggcaagggccacgatggcctgtaccagggcctgagcaccgccaccaaggacacctatgacgccctgcacatgcaggccctgcctccaagaagggccaagcgatctggatctggagcaacaaacttctcactactcaaacaagcaggtgacgtggaggagaatcccgggcctactagtatggactggatttggcgcatccttttccttgtcggcgctgctaccggcgcgcattccttcgaagaagtccaacttgtggagtctggagggggcctggtgcagcccggcggctctctcagactgtcttgtgcggcaagcggctacaccttcagctcttactggatagaatgggtgaggcaggcacctggaaagggactggagtggattggagagattctgccaggagggggagatacaaattacaatgaaatcttcaaggggcgggccaccttttcagcggataccagcaagaatacagcttacctgcagatgaatagcctccgggcagaagataccgctgtttattattgcacgagacgggtgccaataagactggactattgggggcaagggactcttgtcaccgtcagttcaacgcgtatccagaaccctgatcctgccgtgtaccagctgcgggatagcaagagcagcgacaagagcgtgtgtctgttcaccgacttcgacagccagaccaacgtgtcccagagcaaggactccgacgtgtacatcaccgataagaccgtgctggacatgcggagcatggacttcaagagcaactccgccgtggcctggtccaacaagtccgatttcgcctgcgccaacgccttcaacaacagcattatccccgaggacacattcttcccaagccccgagagcagctgcggtacccagagttttgggttgttggaccctaaattgtgctatctgttggacggaatcctgttcatttacggagtgatcctgaccgcattgttcctgaagagaggccggaagaagctgctgtacatcttcaagcagcctttcatgcggcccgtgcagaccacccaggaagaggacggctgctcctgccggttccccgaggaagaagaaggcggctgcgagctgcgggttaagttttccagatccgcagacgcacccgcttaccaacaagggcagaaccaactctacaatgaacttaatttggggcggagggaagagtacgacgttctggacaaaaggaggggacgagatcccgagatgggcggaaagcctcagcgaaggaagaatccgcaagaggggctttataacgaactccagaaagataaaatggcagaagcctatagtgagattgggatgaagggagaaaggaggaggggtaaaggtcacgatgggttgtaccaaggattgagcacagccactaaagatacctatgatgcgctccacatgcaggccctgccgccaaga

SEQ ID NO: 38430 - DNA, 1767 bp, synthetic construct
  source 1..1767: mol_type = other DNA
atggccttaccagtgaccgccttgctcctgccgctggccttgctgctccacgccgccaggccggacatcgtgatgacacagagccctgatagcctggccgtgtctctgggagagagagccaccattaactgcaaggccagccagagcgtggactacgacggcgacagcttcctgaactggtatcagcagaagcccggccagcctcctaagctgctgatctacgccgccagcaatctggaaagcggcgtgccaagcagattttccggctctggcagcggcaccgatttcaccctgacaatatccagcctccagcctgaggacgtggccgtgtactactgccagcagagcaacgacgaccctctgacctttggacagggcaccaaggtggaaatcaaactcgagcagagcttcggcctgctggaccccaagctgtgctacctgctggatggcatcctgttcatctacggcgtgatcctgaccgccctgttcctgagagtgaagttcagcagaagcgccgacgcccctgcctaccagcagggacagaaccaactgtacaacgagctgaacctgggcagacgggaagagtacgacgtgctggacaagcggagaggcagggaccctgagatgggcggaaagccccagcggagaaagaacccccaggaaggactgtataacgaactccagaaagacaagatggccgaagcctacagcgagatcggcatgaagggcgagcggagaagaggcaagggccacgatggcctgtaccagggcctgagcaccgccaccaaggacacctatgacgccctgcacatgcaggccctgcctccaagaagggccaagcgatctggatctggagcaacaaacttctcactactcaaacaagcaggtgacgtggaggagaatcccgggcctactagtatggactggatttggcgcatccttttccttgtcggcgctgctaccggcgcgcattccttcgaagaagtccaacttgtggagtctggagggggcctggtgcagcccggcggctctctcagactgtcttgtgcggcaagcggctacaccttcagctcttactggatagaatgggtgaggcaggcacctggaaagggactggagtggattggagagattctgccaggagggggagatacaaattacaatgaaatcttcaaggggcgggccaccttttcagcggataccagcaagaatacagcttacctgcagatgaatagcctccgggcagaagataccgctgtttattattgcacgagacgggtgccaataagactggactattgggggcaagggactcttgtcaccgtcagttcaacgcgtcagagttttgggttgttggaccctaaattgtgctatctgttggacggaatcctgttcatttacggagtgatcctgaccgcattgttcctgcgggttaagttttccagatccgcagacgcacccgcttaccaacaagggcagaaccaactctacaatgaacttaatttggggcggagggaagagtacgacgttctggacaaaaggaggggacgagatcccgagatgggcggaaagcctcagcgaaggaagaatccgcaagaggggctttataacgaactccagaaagataaaatggcagaagcctatagtgagattgggatgaagggagaaaggaggaggggtaaaggtcacgatgggttgtaccaaggattgagcacagccactaaagatacctatgatgcgctccacatgcaggccctgccgccaaga

SEQ ID NO: 38431 - DNA, 1941 bp, synthetic construct
  source 1..1941: mol_type = other DNA
atggccttaccagtgaccgccttgctcctgccgctggccttgctgctccacgccgccaggccggacatcgtgatgacacagagccctgatagcctggccgtgtctctgggagagagagccaccattaactgcaaggccagccagagcgtggactacgacggcgacagcttcctgaactggtatcagcagaagcccggccagcctcctaagctgctgatctacgccgccagcaatctggaaagcggcgtgccaagcagattttccggctctggcagcggcaccgatttcaccctgacaatatccagcctccagcctgaggacgtggccgtgtactactgccagcagagcaacgacgaccctctgacctttggacagggcaccaaggtggaaatcaaactcgagggacagcctaaggccaatcctaccgtgacactgttccctccaagcagcgaagaactccaggccaacaaggccacacttgtgtgcctgatctccgacttctaccctggggctgtgacagtggcttggaaggccgatggatctcctgtgaaagccggcgtggaaaccaccaagccatccaagcagagcaacaacaaatacgccgccagctcctacctgagcctgacacctgagcagtggaagtcccacagatcctacagctgccaagtgacccacgaaggcagcaccgtggaaaagacagtggcccctacagagtgcagccccatcaagaccgatgtgattacaatggaccccaaggacaactgctccaaggacgccaacgataccctgctgctccagctgaccaacaccagcgcctactacatgtacttgttgctgctgctgaagtccgtggtgtacttcgccatcatcacatgctgcctgctgcggagaaccgccttctgctgcaacggcgagaagtctagggccaagcgatctggatctggagcaacaaacttctcactactcaaacaagcaggtgacgtggaggagaatcccgggcctactagtatggactggatttggcgcatccttttccttgtcggcgctgctaccggcgcgcattccttcgaagaagtccaacttgtggagtctggagggggcctggtgcagcccggcggctctctcagactgtcttgtgcggcaagcggctacaccttcagctcttactggatagaatgggtgaggcaggcacctggaaagggactggagtggattggagagattctgccaggagggggagatacaaattacaatgaaatcttcaaggggcgggccaccttttcagcggataccagcaagaatacagcttacctgcagatgaatagcctccgggcagaagataccgctgtttattattgcacgagacgggtgccaataagactggactattgggggcaagggactcttgtcaccgtcagttcaacgcgtgcctctacaaagggaccctccgtgtttcctctggctcccagcagcaagtctacaagcggaggaacagccgctctgggctgcctggtcaaggattactttcccgagcctgtgaccgtgtcctggaatagcggagcactgacaagcggcgtgcacacctttccagccgtgctgcaaagcagcggcctgtactctctgagcagcgtggtcacagtgcctagctctagcctgggcacccagacctacatctgcaatgtgaaccacaagcctagcaacaccaaggtggacaagagagtggaacccaagagctgtgaagtgaaaaccgactccaccgaccacgtgaagcccaaagagacagagaacaccaagcagcccagcaagagctgccacaagcccaaggccatcgtgcacaccgagaaagtgaacatgatgagcctgaccgtgctgggcctgcggatgctgttcgccaaaaccgtggccgtgaacttcctgctgaccgccaagctgttcttcctc

SEQ ID NO: 38432 - DNA, 1875 bp, synthetic construct
  source 1..1875: mol_type = other DNA
atggccttaccagtgaccgccttgctcctgccgctggccttgctgctccacgccgccaggccggacatcgtgatgacacagagccctgatagcctggccgtgtctctgggagagagagccaccattaactgcaaggccagccagagcgtggactacgacggcgacagcttcctgaactggtatcagcagaagcccggccagcctcctaagctgctgatctacgccgccagcaatctggaaagcggcgtgccaagcagattttccggctctggcagcggcaccgatttcaccctgacaatatccagcctccagcctgaggacgtggccgtgtactactgccagcagagcaacgacgaccctctgacctttggacagggcaccaaggtggaaatcaaactcgagggacagcctaaggccaatcctaccgtgacactgttccctccaagcagcgaagaactccaggccaacaaggccacacttgtgtgcctgatctccgacttctaccctggggctgtgacagtggcttggaaggccgatggatctcctgtgaaagccggcgtggaaaccaccaagccatccaagcagagcaacaacaaatacgccgccagctcctacctgagcctgacacctgagcagtggaagtcccacagatcctacagctgccaagtgacccacgaaggcagcaccgtggaaaagacagtggcccctacagagtgcagcggcagagccgattgcggcatcaccagcgccagctaccaccagggcgtgctgagcgccaccatcctgtacgagatcctgctgggcaaggccaccctgtacgccgtgctggtgtctgccctggtgctgatggctatggtcaagcggaaggacagccggggaagggccaagcgatctggatctggagcaacaaacttctcactactcaaacaagcaggtgacgtggaggagaatcccgggcctactagtatggactggatttggcgcatccttttccttgtcggcgctgctaccggcgcgcattccttcgaagaagtccaacttgtggagtctggagggggcctggtgcagcccggcggctctctcagactgtcttgtgcggcaagcggctacaccttcagctcttactggatagaatgggtgaggcaggcacctggaaagggactggagtggattggagagattctgccaggagggggagatacaaattacaatgaaatcttcaaggggcgggccaccttttcagcggataccagcaagaatacagcttacctgcagatgaatagcctccgggcagaagataccgctgtttattattgcacgagacgggtgccaataagactggactattgggggcaagggactcttgtcaccgtcagttcaacgcgtgcctctacaaagggaccctccgtgtttcctctggctcccagcagcaagtctacaagcggaggaacagccgctctgggctgcctggtcaaggattactttcccgagcctgtgaccgtgtcctggaatagcggagcactgacaagcggcgtgcacacctttccagccgtgctgcaaagcagcggcctgtactctctgagcagcgtggtcacagtgcctagctctagcctgggcacccagacctacatctgcaatgtgaaccacaagcctagcaacaccaaggtggacaagagagtggaacccaagagctgtatccccgaggacacattcttcccaagcagcgacgtgccctgcgacgtgaagctggtggaaaagagcttcgagacagacaccaacctgaacttccagaacctgagcgtgatcggcttcagaatcctgctgctgaaagtggccggctttaacctgctgatgaccctgcggctgtggtccagc

SEQ ID NO: 38433 - DNA, 1875 bp, synthetic construct
  source 1..1875: mol_type = other DNA
atggccttaccagtgaccgccttgctcctgccgctggccttgctgctccacgccgccaggccggacatcgtgatgacacagagccctgatagcctggccgtgtctctgggagagagagccaccattaactgcaaggccagccagagcgtggactacgacggcgacagcttcctgaactggtatcagcagaagcccggccagcctcctaagctgctgatctacgccgccagcaatctggaaagcggcgtgccaagcagattttccggctctggcagcggcaccgatttcaccctgacaatatccagcctccagcctgaggacgtggccgtgtactactgccagcagagcaacgacgaccctctgacctttggacagggcaccaaggtggaaatcaaactcgagggacagcctaaggccaatcctaccgtgacactgttccctccaagcagcgaagaactccaggccaacaaggccacacttgtgtgcctgatctccgacttctaccctggggctgtgacagtggcttggaaggccgatggatctcctgtgaaagccggcgtggaaaccaccaagccatccaagcagagcaacaacaaatacgccgccagctcctacctgagcctgacacctgagcagtggaagtcccacagatcctacagctgccaagtgacccacgaaggcagcaccgtggaaaagacagtggcccctacagagtgcagcggcagagccgattgcggctttaccagcgagagctaccagcagggcgtgctgagcgccaccatcctgtacgagatcctgctgggcaaggccaccctgtacgccgtgctggtgtctgccctggtgctgatggctatggtcaagcggaaggacagccggggaagggccaagcgatctggatctggagcaacaaacttctcactactcaaacaagcaggtgacgtggaggagaatcccgggcctactagtatggactggatttggcgcatccttttccttgtcggcgctgctaccggcgcgcattccttcgaagaagtccaacttgtggagtctggagggggcctggtgcagcccggcggctctctcagactgtcttgtgcggcaagcggctacaccttcagctcttactggatagaatgggtgaggcaggcacctggaaagggactggagtggattggagagattctgccaggagggggagatacaaattacaatgaaatcttcaaggggcgggccaccttttcagcggataccagcaagaatacagcttacctgcagatgaatagcctccgggcagaagataccgctgtttattattgcacgagacgggtgccaataagactggactattgggggcaagggactcttgtcaccgtcagttcaacgcgtgcctctacaaagggaccctccgtgtttcctctggctcccagcagcaagtctacaagcggaggaacagccgctctgggctgcctggtcaaggattactttcccgagcctgtgaccgtgtcctggaatagcggagcactgacaagcggcgtgcacacctttccagccgtgctgcaaagcagcggcctgtactctctgagcagcgtggtcacagtgcctagctctagcctgggcacccagacctacatctgcaatgtgaaccacaagcctagcaacaccaaggtggacaagagagtggaacccaagagctgtatccccgaggacacattcttcccaagccccgagagcagctgcgacgtgaagctggtggaaaagagcttcgagacagacaccaacctgaacttccagaacctgagcgtgatcggcttcagaatcctgctgctgaaagtggccggctttaacctgctgatgaccctgcggctgtggtccagc

SEQ ID NO: 38434 - DNA, 1353 bp, synthetic construct
  source 1..1353: mol_type = other DNA
atggccttaccagtgaccgccttgctcctgccgctggccttgctgctccacgccgccaggccggacatcgtgatgacacagagccctgatagcctggccgtgtctctgggagagagagccaccattaactgcaaggccagccagagcgtggactacgacggcgacagcttcctgaactggtatcagcagaagcccggccagcctcctaagctgctgatctacgccgccagcaatctggaaagcggcgtgccaagcagattttccggctctggcagcggcaccgatttcaccctgacaatatccagcctccagcctgaggacgtggccgtgtactactgccagcagagcaacgacgaccctctgacctttggacagggcaccaaggtggaaatcaaaggcggaggcggaagtggaggcggaggatctggcggcggaggctctgaagtccaacttgtggagtctggagggggcctggtgcagcccggcggctctctcagactgtcttgtgcggcaagcggctacaccttcagctcttactggatagaatgggtgaggcaggcacctggaaagggactggagtggattggagagattctgccaggagggggagatacaaattacaatgaaatcttcaaggggcgggccaccttttcagcggataccagcaagaatacagcttacctgcagatgaatagcctccgggcagaagataccgctgtttattattgcacgagacgggtgccaataagactggactattgggggcaagggactcttgtcaccgtcagttcaacgcgtgacggtaacgaggagatgggaggaatcactcaaaccccttacaaagtctcaatttcaggaacaactgttatccttacatgtccccagtatcctggcagcgagatcctttggcagcataacgacaagaatatagggggagatgaagacgataagaatatcggatctgacgaggatcacttgagcctgaaagagttctccgagcttgaacaaagcggatattatgtgtgctatccgcgcgggtcaaagccggaagacgctaacttttacctttatctccgagccagagtgtgcgaaaattgcatggaaatggacgttatgtccgttgctacaatagttatcgtagatatatgcatcacgggtggactgcttctgctggtttattattggtccaagaatagaaaggccaaagctaaacccgtgaccagaggcgctggcgcaggcggaaggcaaaggggacaaaacaaagaacggccaccaccagtgccaaatccagattatgagcctattcggaaaggacagagggacctgtactctggcctgaatcagagaagaatc

SEQ ID NO: 38435 - DNA, 1248 bp, synthetic construct
  source 1..1248: mol_type = other DNA
atggccttaccagtgaccgccttgctcctgccgctggccttgctgctccacgccgccaggccggacatcgtgatgacacagagccctgatagcctggccgtgtctctgggagagagagccaccattaactgcaaggccagccagagcgtggactacgacggcgacagcttcctgaactggtatcagcagaagcccggccagcctcctaagctgctgatctacgccgccagcaatctggaaagcggcgtgccaagcagattttccggctctggcagcggcaccgatttcaccctgacaatatccagcctccagcctgaggacgtggccgtgtactactgccagcagagcaacgacgaccctctgacctttggacagggcaccaaggtggaaatcaaaggcggaggcggaagtggaggcggaggatctggcggcggaggctctgaagtccaacttgtggagtctggagggggcctggtgcagcccggcggctctctcagactgtcttgtgcggcaagcggctacaccttcagctcttactggatagaatgggtgaggcaggcacctggaaagggactggagtggattggagagattctgccaggagggggagatacaaattacaatgaaatcttcaaggggcgggccaccttttcagcggataccagcaagaatacagcttacctgcagatgaatagcctccgggcagaagataccgctgtttattattgcacgagacgggtgccaataagactggactattgggggcaagggactcttgtcaccgtcagttcaacgcgtttcaagatccccatcgaggaactggaagatcgggtgttcgtgaactgcaacacctctatcacctgggtggaaggcaccgtgggaacactgctgagcgacatcaccagactggacctcggcaagcggattctggaccctcggggcatctacagatgcaacggcaccgacatctacaaggacaaagaaagcaccgtgcaggtccactacagaatgtgccagtcctgcgtggaactggaccctgctacagtggccggcatcatcgtgaccgatgtgatcgctactctgctgctggctctgggagtgttctgcttcgccggacacgaaacaggcagactgtctggcgctgccgatacacaggccctgctgagaaacgaccaagtgtatcagcccctgcgcgacagagatgatgcccagtattctcacctcggcggcaactgggctagaaacaag

SEQ ID NO: 38436 - DNA, 1278 bp, synthetic construct
  source 1..1278: mol_type = other DNA
atggccttaccagtgaccgccttgctcctgccgctggccttgctgctccacgccgccaggccggacatcgtgatgacacagagccctgatagcctggccgtgtctctgggagagagagccaccattaactgcaaggccagccagagcgtggactacgacggcgacagcttcctgaactggtatcagcagaagcccggccagcctcctaagctgctgatctacgccgccagcaatctggaaagcggcgtgccaagcagattttccggctctggcagcggcaccgatttcaccctgacaatatccagcctccagcctgaggacgtggccgtgtactactgccagcagagcaacgacgaccctctgacctttggacagggcaccaaggtggaaatcaaaggcggaggcggaagtggaggcggaggatctggcggcggaggctctgaagtccaacttgtggagtctggagggggcctggtgcagcccggcggctctctcagactgtcttgtgcggcaagcggctacaccttcagctcttactggatagaatgggtgaggcaggcacctggaaagggactggagtggattggagagattctgccaggagggggagatacaaattacaatgaaatcttcaaggggcgggccaccttttcagcggataccagcaagaatacagcttacctgcagatgaatagcctccgggcagaagataccgctgtttattattgcacgagacgggtgccaataagactggactattgggggcaagggactcttgtcaccgtcagttcaacgcgtcagagcatcaagggcaaccacctggtcaaggtgtacgactaccaagaggacggcagcgtgctgctgacatgtgatgccgaggccaagaacatcacctggtttaaggacggcaagatgatcggcttcctgaccgaggacaagaagaagtggaacctgggcagcaacgctaaggaccccagaggcatgtatcagtgcaagggcagccagaacaagagcaagcccctccaggtgtactaccggatgtgccagaactgcatcgagctgaacgccgctaccatcagcggctttctgttcgccgagatcgtgtccatcttcgtgctggccgtgggcgtgtactttatcgctggacaggatggcgtgcggcagagcagagcttccgataagcaaaccctgctgcctaacgaccagctgtaccagcctctgaaggacagagaggacgaccagtacagccacctccagggcaatcagctgagaagaaac

SEQ ID NO: 38437 - DNA, 1227 bp, synthetic construct
  source 1..1227: mol_type = other DNA
atggccttaccagtgaccgccttgctcctgccgctggccttgctgctccacgccgccaggccggacatcgtgatgacacagagccctgatagcctggccgtgtctctgggagagagagccaccattaactgcaaggccagccagagcgtggactacgacggcgacagcttcctgaactggtatcagcagaagcccggccagcctcctaagctgctgatctacgccgccagcaatctggaaagcggcgtgccaagcagattttccggctctggcagcggcaccgatttcaccctgacaatatccagcctccagcctgaggacgtggccgtgtactactgccagcagagcaacgacgaccctctgacctttggacagggcaccaaggtggaaatcaaaggcggaggcggaagtggaggcggaggatctggcggcggaggctctgaagtccaacttgtggagtctggagggggcctggtgcagcccggcggctctctcagactgtcttgtgcggcaagcggctacaccttcagctcttactggatagaatgggtgaggcaggcacctggaaagggactggagtggattggagagattctgccaggagggggagatacaaattacaatgaaatcttcaaggggcgggccaccttttcagcggataccagcaagaatacagcttacctgcagatgaatagcctccgggcagaagataccgctgtttattattgcacgagacgggtgccaataagactggactattgggggcaagggactcttgtcaccgtcagttcaacgcgtcagagttttgggttgttggaccctaaattgtgctatctgttggacggaatcctgttcatttacggagtgatcctgaccgcattgttcctgcgggttaagttttccagatccgcagacgcacccgcttaccaacaagggcagaaccaactctacaatgaacttaatttggggcggagggaagagtacgacgttctggacaaaaggaggggacgagatcccgagatgggcggaaagcctcagcgaaggaagaatccgcaagaggggctttataacgaactccagaaagataaaatggcagaagcctatagtgagattgggatgaagggagaaaggaggaggggtaaaggtcacgatgggttgtaccaaggattgagcacagccactaaagatacctatgatgcgctccacatgcaggccctgccgccaaga

SEQ ID NO: 38438 - DNA, 1512 bp, synthetic construct
  source 1..1512: mol_type = other DNA
atggccttaccagtgaccgccttgctcctgccgctggccttgctgctccacgccgccaggccggacatcgtgatgacacagagccctgatagcctggccgtgtctctgggagagagagccaccattaactgcaaggccagccagagcgtggactacgacggcgacagcttcctgaactggtatcagcagaagcccggccagcctcctaagctgctgatctacgccgccagcaatctggaaagcggcgtgccaagcagattttccggctctggcagcggcaccgatttcaccctgacaatatccagcctccagcctgaggacgtggccgtgtactactgccagcagagcaacgacgaccctctgacctttggacagggcaccaaggtggaaatcaaaggcggaggcggaagtggaggcggaggatctggcggcggaggctctgaagtccaacttgtggagtctggagggggcctggtgcagcccggcggctctctcagactgtcttgtgcggcaagcggctacaccttcagctcttactggatagaatgggtgaggcaggcacctggaaagggactggagtggattggagagattctgccaggagggggagatacaaattacaatgaaatcttcaaggggcgggccaccttttcagcggataccagcaagaatacagcttacctgcagatgaatagcctccgggcagaagataccgctgtttattattgcacgagacgggtgccaataagactggactattgggggcaagggactcttgtcaccgtcagttcaacgcgtggaatgaggactgaggatcttcccaaagctgtcgtctttctcgaaccccaatggtatcgggtgctcgaaaaagactctgtgacactgaaatgccaaggggcctactctcccgaggacaactccacacagtggtttcataatgagtccctcatcagctctcaggccagctcttatttcattgatgccgctacagtggacgactccggcgagtatcggtgtcagaccaatctgtctacactgtctgaccccgtgcagcttgaggtccacattggatggttgctcttgcaagccccacgctgggttttcaaagaggaagatccaatccatctgcggtgccacagctggaaaaacaccgctctccacaaagtcacatacctgcaaaatggcaaaggacgcaaatacttccatcacaattccgatttttacattccgaaggctaccctgaaagacagcggcagctatttctgccggggactcgtcggctccaagaatgtgtcctccgaaaccgtgaatatcacgattacccaaggactggctgtgcctacaatctctagcttctttccgcctggataccaagtctccttctgtcttgtgatggtcctcctgtttgctgtggacacaggactgtacttttccgtgaaaacgaacatccgcagctccacacgcgattggaaagatcacaagtttaaatggcgcaaagatccccaggacaag

SEQ ID NO: 38439 - DNA, 1437 bp, synthetic construct
  source 1..1437: mol_type = other DNA
atggccttaccagtgaccgccttgctcctgccgctggccttgctgctccacgccgccaggccggacatcgtgatgacacagagccctgatagcctggccgtgtctctgggagagagagccaccattaactgcaaggccagccagagcgtggactacgacggcgacagcttcctgaactggtatcagcagaagcccggccagcctcctaagctgctgatctacgccgccagcaatctggaaagcggcgtgccaagcagattttccggctctggcagcggcaccgatttcaccctgacaatatccagcctccagcctgaggacgtggccgtgtactactgccagcagagcaacgacgaccctctgacctttggacagggcaccaaggtggaaatcaaaggcggaggcggaagtggaggcggaggatctggcggcggaggctctgaagtccaacttgtggagtctggagggggcctggtgcagcccggcggctctctcagactgtcttgtgcggcaagcggctacaccttcagctcttactggatagaatgggtgaggcaggcacctggaaagggactggagtggattggagagattctgccaggagggggagatacaaattacaatgaaatcttcaaggggcgggccaccttttcagcggataccagcaagaatacagcttacctgcagatgaatagcctccgggcagaagataccgctgtttattattgcacgagacgggtgccaataagactggactattgggggcaagggactcttgtcaccgtcagttcaacgcgtggaatgaggactgaggatcttcccaaagctgtcgtctttctcgaaccccaatggtatcgggtgctcgaaaaagactctgtgacactgaaatgccaaggggcctactctcccgaggacaactccacacagtggtttcataatgagtccctcatcagctctcaggccagctcttatttcattgatgccgctacagtggacgactccggcgagtatcggtgtcagaccaatctgtctacactgtctgaccccgtgcagcttgaggtccacattggatggttgctcttgcaagccccacgctgggttttcaaagaggaagatccaatccatctgcggtgccacagctggaaaaacaccgctctccacaaagtcacatacctgcaaaatggcaaaggacgcaaatacttccatcacaattccgatttttacattccgaaggctaccctgaaagacagcggcagctatttctgccggggactcgtcggctccaagaatgtgtcctccgaaaccgtgaatatcacgattacccaaggactggctgtgcctacaatctctagcttctttccgcctggataccaagtctccttctgtcttgtgatggtcctcctgtttgctgtggacacaggactgtacttttccgtg

SEQ ID NO: 38440 - DNA, 1440 bp, synthetic construct
  source 1..1440: mol_type = other DNA
atggccttaccagtgaccgccttgctcctgccgctggccttgctgctccacgccgccaggccggacatcgtgatgacacagagccctgatagcctggccgtgtctctgggagagagagccaccattaactgcaaggccagccagagcgtggactacgacggcgacagcttcctgaactggtatcagcagaagcccggccagcctcctaagctgctgatctacgccgccagcaatctggaaagcggcgtgccaagcagattttccggctctggcagcggcaccgatttcaccctgacaatatccagcctccagcctgaggacgtggccgtgtactactgccagcagagcaacgacgaccctctgacctttggacagggcaccaaggtggaaatcaaaggcggaggcggaagtggaggcggaggatctggcggcggaggctctgaagtccaacttgtggagtctggagggggcctggtgcagcccggcggctctctcagactgtcttgtgcggcaagcggctacaccttcagctcttactggatagaatgggtgaggcaggcacctggaaagggactggagtggattggagagattctgccaggagggggagatacaaattacaatgaaatcttcaaggggcgggccaccttttcagcggataccagcaagaatacagcttacctgcagatgaatagcctccgggcagaagataccgctgtttattattgcacgagacgggtgccaataagactggactattgggggcaagggactcttgtcaccgtcagttcaacgcgtggaatgaggactgaggatcttcccaaagctgtcgtctttctcgaaccccaatggtatcgggtgctcgaaaaagactctgtgacactgaaatgccaaggggcctactctcccgaggacaactccacacagtggtttcataatgagtccctcatcagctctcaggccagctcttatttcattgatgccgctacagtggacgactccggcgagtatcggtgtcagaccaatctgtctacactgtctgaccccgtgcagcttgaggtccacattggatggttgctcttgcaagccccacgctgggttttcaaagaggaagatccaatccatctgcggtgccacagctggaaaaacaccgctctccacaaagtcacatacctgcaaaatggcaaaggacgcaaatacttccatcacaattccgatttttacattccgaaggctaccctgaaagacagcggcagctatttctgccggggactcgtcggctccaagaatgtgtcctccgaaaccgtgaatatcacgattacccaaggactggctgtgcctacaatctctagcttctttccgcctggataccaagtctccttctgtcttgtgatggtcctcctgtttgctgtggacacaggactgtacttttccgtgaaa

SEQ ID NO: 38441 - DNA, 2172 bp, synthetic construct
  source 1..2172: mol_type = other DNA
atggccttaccagtgaccgccttgctcctgccgctggccttgctgctccacgccgccaggccggacatcgtgatgacacagagccctgatagcctggccgtgtctctgggagagagagccaccattaactgcaaggccagccagagcgtggactacgacggcgacagcttcctgaactggtatcagcagaagcccggccagcctcctaagctgctgatctacgccgccagcaatctggaaagcggcgtgccaagcagattttccggctctggcagcggcaccgatttcaccctgacaatatccagcctccagcctgaggacgtggccgtgtactactgccagcagagcaacgacgaccctctgacctttggacagggcaccaaggtggaaatcaaactcgagggacagcctaaggccaatcctaccgtgacactgttccctccaagcagcgaagaactccaggccaacaaggccacacttgtgtgcctgatctccgacttctaccctggggctgtgacagtggcttggaaggccgatggatctcctgtgaaagccggcgtggaaaccaccaagccatccaagcagagcaacaacaaatacgccgccagctcctacctgagcctgacacctgagcagtggaagtcccacagatcctacagctgccaagtgacccacgaaggcagcaccgtggaaaagacagtggcccctacagagtgcagcggatcccagagcttcggcctgctggaccccaagctgtgctacctgctggatggcatcctgttcatctacggcgtgatcctgaccgccctgttcctgagagtgaagttcagcagaagcgccgacgcccctgcctaccagcagggacagaaccaactgtacaacgagctgaacctgggcagacgggaagagtacgacgtgctggacaagcggagaggcagggaccctgagatgggcggaaagccccagcggagaaagaacccccaggaaggactgtataacgaactccagaaagacaagatggccgaagcctacagcgagatcggcatgaagggcgagcggagaagaggcaagggccacgatggcctgtaccagggcctgagcaccgccaccaaggacacctatgacgccctgcacatgcaggccctgcctccaagaagggccaagcgatctggatctggagcaacaaacttctcactactcaaacaagcaggtgacgtggaggagaatcccgggcctactagtatggactggatttggcgcatccttttccttgtcggcgctgctaccggcgcgcattccttcgaagaagtccaacttgtggagtctggagggggcctggtgcagcccggcggctctctcagactgtcttgtgcggcaagcggctacaccttcagctcttactggatagaatgggtgaggcaggcacctggaaagggactggagtggattggagagattctgccaggagggggagatacaaattacaatgaaatcttcaaggggcgggccaccttttcagcggataccagcaagaatacagcttacctgcagatgaatagcctccgggcagaagataccgctgtttattattgcacgagacgggtgccaataagactggactattgggggcaagggactcttgtcaccgtcagttcaacgcgtgcctctacaaagggaccctccgtgtttcctctggctcccagcagcaagtctacaagcggaggaacagccgctctgggctgcctggtcaaggattactttcccgagcctgtgaccgtgtcctggaatagcggagcactgacaagcggcgtgcacacctttccagccgtgctgcaaagcagcggcctgtactctctgagcagcgtggtcacagtgcctagctctagcctgggcacccagacctacatctgcaatgtgaaccacaagcctagcaacaccaaggtggacaagagagtggaacccaagagctgtggtaccatcactcaaggtttggcagtgtcaaccatctcatcattctttccacctggctaccaagtgtccttctgcctggtcatggtgctgctgttcgccgtggataccggcctgtacttcagcgtcaagaccaacatccggtccagcaccagagactggaaggaccacaagttcaagtggcggaaggaccctcaggacaag

SEQ ID NO: 38442 - DNA, 2217 bp, synthetic construct
  source 1..2217: mol_type = other DNA
atggccttaccagtgaccgccttgctcctgccgctggccttgctgctccacgccgccaggccggacatcgtgatgacacagagccctgatagcctggccgtgtctctgggagagagagccaccattaactgcaaggccagccagagcgtggactacgacggcgacagcttcctgaactggtatcagcagaagcccggccagcctcctaagctgctgatctacgccgccagcaatctggaaagcggcgtgccaagcagattttccggctctggcagcggcaccgatttcaccctgacaatatccagcctccagcctgaggacgtggccgtgtactactgccagcagagcaacgacgaccctctgacctttggacagggcaccaaggtggaaatcaaactcgaggacctgaagaacgtgttcccacctgaggtggccgtgttcgagcctagcgaggccgagatcagccacacccagaaagccaccctcgtgtgcctggctaccggcttctaccccgaccatgtggaactgtcttggtgggtcaacggcaaagaggtgcacagcggcgtgtctaccgacccccagccactgaaagaacagcccgccctgaacgacagccggtactgcctgagcagcagactgagagtgtccgccaccttctggcagaacccccggaaccacttcagatgccaggtgcagttctacggcctgagcgagaacgacgagtggacccaggacagagccaagcccgtgacccagatcgtgtctgccgaagcctggggcagagccgattgcggatcccagagcttcggcctgctggaccccaagctgtgctacctgctggatggcatcctgttcatctacggcgtgatcctgaccgccctgttcctgagagtgaagttcagcagaagcgccgacgcccctgcctaccagcagggacagaaccaactgtacaacgagctgaacctgggcagacgggaagagtacgacgtgctggacaagcggagaggcagggaccctgagatgggcggaaagccccagcggagaaagaacccccaggaaggactgtataacgaactccagaaagacaagatggccgaagcctacagcgagatcggcatgaagggcgagcggagaagaggcaagggccacgatggcctgtaccagggcctgagcaccgccaccaaggacacctatgacgccctgcacatgcaggccctgcctccaagaagggccaagcgatctggatctggagcaacaaacttctcactactcaaacaagcaggtgacgtggaggagaatcccgggcctactagtatggactggatttggcgcatccttttccttgtcggcgctgctaccggcgcgcattccttcgaagaagtccaacttgtggagtctggagggggcctggtgcagcccggcggctctctcagactgtcttgtgcggcaagcggctacaccttcagctcttactggatagaatgggtgaggcaggcacctggaaagggactggagtggattggagagattctgccaggagggggagatacaaattacaatgaaatcttcaaggggcgggccaccttttcagcggataccagcaagaatacagcttacctgcagatgaatagcctccgggcagaagataccgctgtttattattgcacgagacgggtgccaataagactggactattgggggcaagggactcttgtcaccgtcagttcaacgcgtatccagaaccctgatcctgccgtgtaccagctgcgggatagcaagagcagcgacaagagcgtgtgtctgttcaccgacttcgacagccagaccaacgtgtcccagagcaaggactccgacgtgtacatcaccgataagaccgtgctggacatgcggagcatggacttcaagagcaactccgccgtggcctggtccaacaagtccgatttcgcctgcgccaacgccttcaacaacagcattatccccgaggacacattcttcccaagccccgagagcagctgcggtaccatcactcaaggtttggcagtgtcaaccatctcatcattctttccacctggctaccaagtgtccttctgcctggtcatggtgctgctgttcgccgtggataccggcctgtacttcagcgtcaagaccaacatccggtccagcaccagagactggaaggaccacaagttcaagtggcggaaggaccctcaggacaag

SEQ ID NO: 38443 - DNA, 2142 bp, synthetic construct
  source 1..2142: mol_type = other DNA
atggccttaccagtgaccgccttgctcctgccgctggccttgctgctccacgccgccaggccggacatcgtgatgacacagagccctgatagcctggccgtgtctctgggagagagagccaccattaactgcaaggccagccagagcgtggactacgacggcgacagcttcctgaactggtatcagcagaagcccggccagcctcctaagctgctgatctacgccgccagcaatctggaaagcggcgtgccaagcagattttccggctctggcagcggcaccgatttcaccctgacaatatccagcctccagcctgaggacgtggccgtgtactactgccagcagagcaacgacgaccctctgacctttggacagggcaccaaggtggaaatcaaactcgaggacctgaagaacgtgttcccacctgaggtggccgtgttcgagcctagcgaggccgagatcagccacacccagaaagccaccctcgtgtgcctggctaccggcttctaccccgaccatgtggaactgtcttggtgggtcaacggcaaagaggtgcacagcggcgtgtctaccgacccccagccactgaaagaacagcccgccctgaacgacagccggtactgcctgagcagcagactgagagtgtccgccaccttctggcagaacccccggaaccacttcagatgccaggtgcagttctacggcctgagcgagaacgacgagtggacccaggacagagccaagcccgtgacccagatcgtgtctgccgaagcctggggcagagccgattgcggatcccagagcttcggcctgctggaccccaagctgtgctacctgctggatggcatcctgttcatctacggcgtgatcctgaccgccctgttcctgagagtgaagttcagcagaagcgccgacgcccctgcctaccagcagggacagaaccaactgtacaacgagctgaacctgggcagacgggaagagtacgacgtgctggacaagcggagaggcagggaccctgagatgggcggaaagccccagcggagaaagaacccccaggaaggactgtataacgaactccagaaagacaagatggccgaagcctacagcgagatcggcatgaagggcgagcggagaagaggcaagggccacgatggcctgtaccagggcctgagcaccgccaccaaggacacctatgacgccctgcacatgcaggccctgcctccaagaagggccaagcgatctggatctggagcaacaaacttctcactactcaaacaagcaggtgacgtggaggagaatcccgggcctactagtatggactggatttggcgcatccttttccttgtcggcgctgctaccggcgcgcattccttcgaagaagtccaacttgtggagtctggagggggcctggtgcagcccggcggctctctcagactgtcttgtgcggcaagcggctacaccttcagctcttactggatagaatgggtgaggcaggcacctggaaagggactggagtggattggagagattctgccaggagggggagatacaaattacaatgaaatcttcaaggggcgggccaccttttcagcggataccagcaagaatacagcttacctgcagatgaatagcctccgggcagaagataccgctgtttattattgcacgagacgggtgccaataagactggactattgggggcaagggactcttgtcaccgtcagttcaacgcgtatccagaaccctgatcctgccgtgtaccagctgcgggatagcaagagcagcgacaagagcgtgtgtctgttcaccgacttcgacagccagaccaacgtgtcccagagcaaggactccgacgtgtacatcaccgataagaccgtgctggacatgcggagcatggacttcaagagcaactccgccgtggcctggtccaacaagtccgatttcgcctgcgccaacgccttcaacaacagcattatccccgaggacacattcttcccaagccccgagagcagctgcggtaccatcactcaaggtttggcagtgtcaaccatctcatcattctttccacctggctaccaagtgtccttctgcctggtcatggtgctgctgttcgccgtggataccggcctgtacttcagcgtc

SEQ ID NO: 38444 - DNA, 2145 bp, synthetic construct
  source 1..2145: mol_type = other DNA
atggccttaccagtgaccgccttgctcctgccgctggccttgctgctccacgccgccaggccggacatcgtgatgacacagagccctgatagcctggccgtgtctctgggagagagagccaccattaactgcaaggccagccagagcgtggactacgacggcgacagcttcctgaactggtatcagcagaagcccggccagcctcctaagctgctgatctacgccgccagcaatctggaaagcggcgtgccaagcagattttccggctctggcagcggcaccgatttcaccctgacaatatccagcctccagcctgaggacgtggccgtgtactactgccagcagagcaacgacgaccctctgacctttggacagggcaccaaggtggaaatcaaactcgaggacctgaagaacgtgttcccacctgaggtggccgtgttcgagcctagcgaggccgagatcagccacacccagaaagccaccctcgtgtgcctggctaccggcttctaccccgaccatgtggaactgtcttggtgggtcaacggcaaagaggtgcacagcggcgtgtctaccgacccccagccactgaaagaacagcccgccctgaacgacagccggtactgcctgagcagcagactgagagtgtccgccaccttctggcagaacccccggaaccacttcagatgccaggtgcagttctacggcctgagcgagaacgacgagtggacccaggacagagccaagcccgtgacccagatcgtgtctgccgaagcctggggcagagccgattgcggatcccagagcttcggcctgctggaccccaagctgtgctacctgctggatggcatcctgttcatctacggcgtgatcctgaccgccctgttcctgagagtgaagttcagcagaagcgccgacgcccctgcctaccagcagggacagaaccaactgtacaacgagctgaacctgggcagacgggaagagtacgacgtgctggacaagcggagaggcagggaccctgagatgggcggaaagccccagcggagaaagaacccccaggaaggactgtataacgaactccagaaagacaagatggccgaagcctacagcgagatcggcatgaagggcgagcggagaagaggcaagggccacgatggcctgtaccagggcctgagcaccgccaccaaggacacctatgacgccctgcacatgcaggccctgcctccaagaagggccaagcgatctggatctggagcaacaaacttctcactactcaaacaagcaggtgacgtggaggagaatcccgggcctactagtatggactggatttggcgcatccttttccttgtcggcgctgctaccggcgcgcattccttcgaagaagtccaacttgtggagtctggagggggcctggtgcagcccggcggctctctcagactgtcttgtgcggcaagcggctacaccttcagctcttactggatagaatgggtgaggcaggcacctggaaagggactggagtggattggagagattctgccaggagggggagatacaaattacaatgaaatcttcaaggggcgggccaccttttcagcggataccagcaagaatacagcttacctgcagatgaatagcctccgggcagaagataccgctgtttattattgcacgagacgggtgccaataagactggactattgggggcaagggactcttgtcaccgtcagttcaacgcgtatccagaaccctgatcctgccgtgtaccagctgcgggatagcaagagcagcgacaagagcgtgtgtctgttcaccgacttcgacagccagaccaacgtgtcccagagcaaggactccgacgtgtacatcaccgataagaccgtgctggacatgcggagcatggacttcaagagcaactccgccgtggcctggtccaacaagtccgatttcgcctgcgccaacgccttcaacaacagcattatccccgaggacacattcttcccaagccccgagagcagctgcggtaccatcactcaaggtttggcagtgtcaaccatctcatcattctttccacctggctaccaagtgtccttctgcctggtcatggtgctgctgttcgccgtggataccggcctgtacttcagcgtcaag

SEQ ID NO: 38445 - DNA, 2148 bp, synthetic construct
  source 1..2148: mol_type = other DNA
atggccttaccagtgaccgccttgctcctgccgctggccttgctgctccacgccgccaggccggacatcgtgatgacacagagccctgatagcctggccgtgtctctgggagagagagccaccattaactgcaaggccagccagagcgtggactacgacggcgacagcttcctgaactggtatcagcagaagcccggccagcctcctaagctgctgatctacgccgccagcaatctggaaagcggcgtgccaagcagattttccggctctggcagcggcaccgatttcaccctgacaatatccagcctccagcctgaggacgtggccgtgtactactgccagcagagcaacgacgaccctctgacctttggacagggcaccaaggtggaaatcaaactcgaggacctgaagaacgtgttcccacctgaggtggccgtgttcgagcctagcgaggccgagatcagccacacccagaaagccaccctcgtgtgcctggctaccggcttctaccccgaccatgtggaactgtcttggtgggtcaacggcaaagaggtgcacagcggcgtgtctaccgacccccagccactgaaagaacagcccgccctgaacgacagccggtactgcctgagcagcagactgagagtgtccgccaccttctggcagaacccccggaaccacttcagatgccaggtgcagttctacggcctgagcgagaacgacgagtggacccaggacagagccaagcccgtgacccagatcgtgtctgccgaagcctggggcagagccgattgcggatcccagagcttcggcctgctggaccccaagctgtgctacctgctggatggcatcctgttcatctacggcgtgatcctgaccgccctgttcctgagagtgaagttcagcagaagcgccgacgcccctgcctaccagcagggacagaaccaactgtacaacgagctgaacctgggcagacgggaagagtacgacgtgctggacaagcggagaggcagggaccctgagatgggcggaaagccccagcggagaaagaacccccaggaaggactgtataacgaactccagaaagacaagatggccgaagcctacagcgagatcggcatgaagggcgagcggagaagaggcaagggccacgatggcctgtaccagggcctgagcaccgccaccaaggacacctatgacgccctgcacatgcaggccctgcctccaagaagggccaagcgatctggatctggagcaacaaacttctcactactcaaacaagcaggtgacgtggaggagaatcccgggcctactagtatggactggatttggcgcatccttttccttgtcggcgctgctaccggcgcgcattccttcgaagaagtccaacttgtggagtctggagggggcctggtgcagcccggcggctctctcagactgtcttgtgcggcaagcggctacaccttcagctcttactggatagaatgggtgaggcaggcacctggaaagggactggagtggattggagagattctgccaggagggggagatacaaattacaatgaaatcttcaaggggcgggccaccttttcagcggataccagcaagaatacagcttacctgcagatgaatagcctccgggcagaagataccgctgtttattattgcacgagacgggtgccaataagactggactattgggggcaagggactcttgtcaccgtcagttcaacgcgtatccagaaccctgatcctgccgtgtaccagctgcgggatagcaagagcagcgacaagagcgtgtgtctgttcaccgacttcgacagccagaccaacgtgtcccagagcaaggactccgacgtgtacatcaccgataagaccgtgctggacatgcggagcatggacttcaagagcaactccgccgtggcctggtccaacaagtccgatttcgcctgcgccaacgccttcaacaacagcattatccccgaggacacattcttcccaagccccgagagcagctgcggtaccatcactcaaggtttggcagtgtcaaccatctcatcattctttccacctggctaccaagtgtccttctgcctggtcatggtgctgctgttcgccgtggataccggcctgtacttcagcgtcaagacc

SEQ ID NO: 38446 - DNA, 1959 bp, synthetic construct
  source 1..1959: mol_type = other DNA
atggccttaccagtgaccgccttgctcctgccgctggccttgctgctccacgccgccaggccggacatcgtgatgacacagagccctgatagcctggccgtgtctctgggagagagagccaccattaactgcaaggccagccagagcgtggactacgacggcgacagcttcctgaactggtatcagcagaagcccggccagcctcctaagctgctgatctacgccgccagcaatctggaaagcggcgtgccaagcagattttccggctctggcagcggcaccgatttcaccctgacaatatccagcctccagcctgaggacgtggccgtgtactactgccagcagagcaacgacgaccctctgacctttggacagggcaccaaggtggaaatcaaactcgagggacagcctaaggccaatcctaccgtgacactgttccctccaagcagcgaagaactccaggccaacaaggccacacttgtgtgcctgatctccgacttctaccctggggctgtgacagtggcttggaaggccgatggatctcctgtgaaagccggcgtggaaaccaccaagccatccaagcagagcaacaacaaatacgccgccagctcctacctgagcctgacacctgagcagtggaagtcccacagatcctacagctgccaagtgacccacgaaggcagcaccgtggaaaagacagtggcccctacagagtgcagcggatccctgggagagcctcagctgtgctatatcctggacgccatcctgtttctgtacggcatcgtgctgaccctgctgtactgccggctgaagatccaagtgcggaaggccgccatcaccagctacgagaaatccgacggcgtgtacaccggcctgagcaccagaaatcaagagacatacgagacactgaagcacgaaaagcctccacaaagggccaagcgatctggatctggagcaacaaacttctcactactcaaacaagcaggtgacgtggaggagaatcccgggcctactagtatggactggatttggcgcatccttttccttgtcggcgctgctaccggcgcgcattccttcgaagaagtccaacttgtggagtctggagggggcctggtgcagcccggcggctctctcagactgtcttgtgcggcaagcggctacaccttcagctcttactggatagaatgggtgaggcaggcacctggaaagggactggagtggattggagagattctgccaggagggggagatacaaattacaatgaaatcttcaaggggcgggccaccttttcagcggataccagcaagaatacagcttacctgcagatgaatagcctccgggcagaagataccgctgtttattattgcacgagacgggtgccaataagactggactattgggggcaagggactcttgtcaccgtcagttcaacgcgtgcctctacaaagggaccctccgtgtttcctctggctcccagcagcaagtctacaagcggaggaacagccgctctgggctgcctggtcaaggattactttcccgagcctgtgaccgtgtcctggaatagcggagcactgacaagcggcgtgcacacctttccagccgtgctgcaaagcagcggcctgtactctctgagcagcgtggtcacagtgcctagctctagcctgggcacccagacctacatctgcaatgtgaaccacaagcctagcaacaccaaggtggacaagagagtggaacccaagagctgtggtaccctcggagaaccacagctctgttacattctggatgctatcctgttcctctatgggatcgtcctgacactcctgtattgcagactcaaaattcaagttcgcaaagccgccattacctcttacgagaagagtgatggggtgtacacaggactgtctacccggaatcaagaaacctacgaaaccctcaaacatgagaagccacctcagtaa

SEQ ID NO: 38447 - DNA, 1866 bp, synthetic construct
  source 1..1866: mol_type = other DNA
atggccttaccagtgaccgccttgctcctgccgctggccttgctgctccacgccgccaggccggacatcgtgatgacacagagccctgatagcctggccgtgtctctgggagagagagccaccattaactgcaaggccagccagagcgtggactacgacggcgacagcttcctgaactggtatcagcagaagcccggccagcctcctaagctgctgatctacgccgccagcaatctggaaagcggcgtgccaagcagattttccggctctggcagcggcaccgatttcaccctgacaatatccagcctccagcctgaggacgtggccgtgtactactgccagcagagcaacgacgaccctctgacctttggacagggcaccaaggtggaaatcaaactcgaggacctgaagaacgtgttcccacctgaggtggccgtgttcgagcctagcgaggccgagatcagccacacccagaaagccaccctcgtgtgcctggctaccggcttctaccccgaccatgtggaactgtcttggtgggtcaacggcaaagaggtgcacagcggcgtgtgtaccgacccccagccactgaaagaacagcccgccctgaacgacagccggtactgcctgagcagcagactgagagtgtccgccaccttctggcagaacccccggaaccacttcagatgccaggtgcagttctacggcctgagcgagaacgacgagtggacccaggacagagccaagcccgtgacccagatcgtgtctgccgaagcctggggcagagccgattgcggctttaccagcgagagctaccagcagggcgtgctgagcgcctactacatgtacttgttgctgctgctgaagtccgtggtgtacttcgccatcatcacatgctgcctgctgcggagaaccgccttctgctgcaacggcgagaagtctagggccaagcgatctggatctggagcaacaaacttctcactactcaaacaagcaggtgacgtggaggagaatcccgggcctactagtatggactggatttggcgcatccttttccttgtcggcgctgctaccggcgcgcattccttcgaagaagtccaacttgtggagtctggagggggcctggtgcagcccggcggctctctcagactgtcttgtgcggcaagcggctacaccttcagctcttactggatagaatgggtgaggcaggcacctggaaagggactggagtggattggagagattctgccaggagggggagatacaaattacaatgaaatcttcaaggggcgggccaccttttcagcggataccagcaagaatacagcttacctgcagatgaatagcctccgggcagaagataccgctgtttattattgcacgagacgggtgccaataagactggactattgggggcaagggactcttgtcaccgtcagttcaacgcgtatccagaaccctgatcctgccgtgtaccagctgcgggatagcaagagcagcgacaagagcgtgtgtctgttcaccgacttcgacagccagaccaacgtgtcccagagcaaggactccgacgtgtacatcaccgataagtgcgtgctggacatgcggagcatggacttcaagagcaactccgccgtggcctggtccaacaagtccgatttcgcctgcgccaacgccttcaacaacagcattatccccgaggacacattcttcccaagccccgagagcagctgcgacgtgaagctggtggaaaagagcttcgagacagacaccaacctgaacttccagaacctgagcgtgatcggcttcagaatcctgctgctgaaagtggccggctttaacctgctgatgaccctgcggctgtggtccagc

SEQ ID NO: 38448 - DNA, 1887 bp, synthetic construct
  source 1..1887: mol_type = other DNA
atggccttaccagtgaccgccttgctcctgccgctggccttgctgctccacgccgccaggccggacatcgtgatgacacagagccctgatagcctggccgtgtctctgggagagagagccaccattaactgcaaggccagccagagcgtggactacgacggcgacagcttcctgaactggtatcagcagaagcccggccagcctcctaagctgctgatctacgccgccagcaatctggaaagcggcgtgccaagcagattttccggctctggcagcggcaccgatttcaccctgacaatatccagcctccagcctgaggacgtggccgtgtactactgccagcagagcaacgacgaccctctgacctttggacagggcaccaaggtggaaatcaaactcgaggacaagcagctggacgccgacgtgtcccccaagcctaccatcttcctgccctctatcgccgagacaaagctccagaaggccggcacctacctgtgcctgctggaaaagttcttcccagatgtgattaagatccactggcaggaaaagaagtccaacaccatcctgggcagccaggaaggcaacaccatgaagaccaacgacacctacatgaagttcagctggctgaccgtgcccgagaagtccctggacaaagaacacagatgcatcgtgcggcacgaaaacaacaagaacggcgtggaccaggaaatcatcttcccacccatcaagaccgatgtgattacaatggaccccaaggacaactgctccaaggacgccaacgataccctgctgctccagctgaccaacaccagcgcctactacatgtacgagatcctgctgggcaaggccaccctgtacgccgtgctggtgtctgccctggtgctgatggctatggtcaagcggaaggacagccggggaagggccaagcgatctggatctggagcaacaaacttctcactactcaaacaagcaggtgacgtggaggagaatcccgggcctactagtatggactggatttggcgcatccttttccttgtcggcgctgctaccggcgcgcattccttcgaagaagtccaacttgtggagtctggagggggcctggtgcagcccggcggctctctcagactgtcttgtgcggcaagcggctacaccttcagctcttactggatagaatgggtgaggcaggcacctggaaagggactggagtggattggagagattctgccaggagggggagatacaaattacaatgaaatcttcaaggggcgggccaccttttcagcggataccagcaagaatacagcttacctgcagatgaatagcctccgggcagaagataccgctgtttattattgcacgagacgggtgccaataagactggactattgggggcaagggactcttgtcaccgtcagttcaacgcgtagccagcctcacaccaagcccagcgtgttcgtgatgaagaacggcaccaacgtggcctgcctcgtgaaagagttctaccccaaggacatcaggatcaacctggtgtccagcaagaagatcaccgagttcgaccccgccatcgtgatctcccccagcggcaagtacaacgccgtgaagctggggaagtatgaggacagcaacagcgtgacctgctccgtgcagcacgacaacaagaccgtgcacagcaccgactttgaagtgaaaaccgactccaccgaccacgtgaagcccaaagagacagagaacaccaagcagcccagcaagagctgccacaagcccaaggccatcgtgcacaccgagaaagtgaacatgatgagcctgaccgtgatcggcttcagaatcctgctgctgaaagtggccggctttaacctgctgatgaccctgcggctgtggtccagctaa

SEQ ID NO: 38449 - DNA, 1887 bp, synthetic construct
  source 1..1887: mol_type = other DNA
atggccttaccagtgaccgccttgctcctgccgctggccttgctgctccacgccgccaggccggacatcgtgatgacacagagccctgatagcctggccgtgtctctgggagagagagccaccattaactgcaaggccagccagagcgtggactacgacggcgacagcttcctgaactggtatcagcagaagcccggccagcctcctaagctgctgatctacgccgccagcaatctggaaagcggcgtgccaagcagattttccggctctggcagcggcaccgatttcaccctgacaatatccagcctccagcctgaggacgtggccgtgtactactgccagcagagcaacgacgaccctctgacctttggacagggcaccaaggtggaaatcaaactcgaggacaagcagctggacgccgacgtgtcccccaagcctaccatcttcctgccctctatcgccgagacaaagctccagaaggccggcacctacctgtgcctgctggaaaagttcttcccagatgtgattaagatccactggcaggaaaagaagtccaacaccatcctgggcagccaggaaggcaacaccatgaagaccaacgacacctacatgaagttcagctggctgaccgtgcccgagaagtccctggacaaagaacacagatgcatcgtgcggcacgaaaacaacaagaacggcgtggaccaggaaatcatcttcccacccatcaagaccgatgtgattacaatggaccccaaggacaactgctccaaggacgccaacgataccctgctgctccagctgaccaacaccagcgccaccatcctgtacgagatcctgctgggcaaggccaccctgtacgccgtgctggtgtctgccctggtgctgatggctatggtcaagcggaaggacagccggggaagggccaagcgatctggatctggagcaacaaacttctcactactcaaacaagcaggtgacgtggaggagaatcccgggcctactagtatggactggatttggcgcatccttttccttgtcggcgctgctaccggcgcgcattccttcgaagaagtccaacttgtggagtctggagggggcctggtgcagcccggcggctctctcagactgtcttgtgcggcaagcggctacaccttcagctcttactggatagaatgggtgaggcaggcacctggaaagggactggagtggattggagagattctgccaggagggggagatacaaattacaatgaaatcttcaaggggcgggccaccttttcagcggataccagcaagaatacagcttacctgcagatgaatagcctccgggcagaagataccgctgtttattattgcacgagacgggtgccaataagactggactattgggggcaagggactcttgtcaccgtcagttcaacgcgtagccagcctcacaccaagcccagcgtgttcgtgatgaagaacggcaccaacgtggcctgcctcgtgaaagagttctaccccaaggacatcaggatcaacctggtgtccagcaagaagatcaccgagttcgaccccgccatcgtgatctcccccagcggcaagtacaacgccgtgaagctggggaagtatgaggacagcaacagcgtgacctgctccgtgcagcacgacaacaagaccgtgcacagcaccgactttgaagtgaaaaccgactccaccgaccacgtgaagcccaaagagacagagaacaccaagcagcccagcaagagctgccacaagcccaaggccatcgtgcacaccgagaaagtgaacatgatgagcctgaccgtgatcggcttcagaatcctgctgctgaaagtggccggctttaacctgctgatgaccctgcggctgtggtccagctaa

SEQ ID NO: 38450 - DNA, 1887 bp, synthetic construct
  source 1..1887: mol_type = other DNA
atggccttaccagtgaccgccttgctcctgccgctggccttgctgctccacgccgccaggccggacatcgtgatgacacagagccctgatagcctggccgtgtctctgggagagagagccaccattaactgcaaggccagccagagcgtggactacgacggcgacagcttcctgaactggtatcagcagaagcccggccagcctcctaagctgctgatctacgccgccagcaatctggaaagcggcgtgccaagcagattttccggctctggcagcggcaccgatttcaccctgacaatatccagcctccagcctgaggacgtggccgtgtactactgccagcagagcaacgacgaccctctgacctttggacagggcaccaaggtggaaatcaaactcgaggacaagcagctggacgccgacgtgtcccccaagcctaccatcttcctgccctctatcgccgagacaaagctccagaaggccggcacctacctgtgcctgctggaaaagttcttcccagatgtgattaagatccactggcaggaaaagaagtccaacaccatcctgggcagccaggaaggcaacaccatgaagaccaacgacacctacatgaagttcagctggctgaccgtgcccgagaagtccctggacaaagaacacagatgcatcgtgcggcacgaaaacaacaagaacggcgtggaccaggaaatcatcttcccacccatcaagaccgatgtgattacaatggaccccaaggacaactgctccaaggacgccaacgataccctgctgctccagctgaccaacaccagcgcctactacatgtacgagatcctgctgggcaaggccaccctgtacgccgtgctggtgtctgccctggtgctgatggctatggtcaagcggaaggacagccggggaagggccaagcgatctggatctggagcaacaaacttctcactactcaaacaagcaggtgacgtggaggagaatcccgggcctactagtatggactggatttggcgcatccttttccttgtcggcgctgctaccggcgcgcattccttcgaagaagtccaacttgtggagtctggagggggcctggtgcagcccggcggctctctcagactgtcttgtgcggcaagcggctacaccttcagctcttactggatagaatgggtgaggcaggcacctggaaagggactggagtggattggagagattctgccaggagggggagatacaaattacaatgaaatcttcaaggggcgggccaccttttcagcggataccagcaagaatacagcttacctgcagatgaatagcctccgggcagaagataccgctgtttattattgcacgagacgggtgccaataagactggactattgggggcaagggactcttgtcaccgtcagttcaacgcgtagccagcctcacaccaagcccagcgtgttcgtgatgaagaacggcaccaacgtggcctgcctcgtgaaagagttctaccccaaggacatcaggatcaacctggtgtccagcaagaagatcaccgagttcgaccccgccatcgtgatctcccccagcggcaagtacaacgccgtgaagctggggaagtacgaggacagcaacagcgtgacctgctccgtgcagcacgacaacaagaccgtgcacagcaccgactttgaagtgaaaaccgactccaccgaccacgtgaagcccaaagagacagagaacaccaagcagcccagcaagagctgccacaagcccaaggccatcgtgcacaccgagaaagtgaacatgatgagcctgaccgtgctgggcttcagaatcctgctgctgaaagtggccggctttaacctgctgatgaccctgcggctgtggtccagctaa

SEQ ID NO: 38451 - DNA, 1887 bp, synthetic construct
  source 1..1887: mol_type = other DNA
atggccttaccagtgaccgccttgctcctgccgctggccttgctgctccacgccgccaggccggacatcgtgatgacacagagccctgatagcctggccgtgtctctgggagagagagccaccattaactgcaaggccagccagagcgtggactacgacggcgacagcttcctgaactggtatcagcagaagcccggccagcctcctaagctgctgatctacgccgccagcaatctggaaagcggcgtgccaagcagattttccggctctggcagcggcaccgatttcaccctgacaatatccagcctccagcctgaggacgtggccgtgtactactgccagcagagcaacgacgaccctctgacctttggacagggcaccaaggtggaaatcaaactcgaggacaagcagctggacgccgacgtgtcccccaagcctaccatcttcctgccctctatcgccgagacaaagctccagaaggccggcacctacctgtgcctgctggaaaagttcttcccagatgtgattaagatccactggcaggaaaagaagtccaacaccatcctgggcagccaggaaggcaacaccatgaagaccaacgacacctacatgaagttcagctggctgaccgtgcccgagaagtccctggacaaagaacacagatgcatcgtgcggcacgaaaacaacaagaacggcgtggaccaggaaatcatcttcccacccatcaagaccgatgtgattacaatggaccccaaggacaactgctccaaggacgccaacgataccctgctgctccagctgaccaacaccagcgccaccatcctgtacgagatcctgctgggcaaggccaccctgtacgccgtgctggtgtctgccctggtgctgatggctatggtcaagcggaaggacagccggggaagggccaagcgatctggatctggagcaacaaacttctcactactcaaacaagcaggtgacgtggaggagaatcccgggcctactagtatggactggatttggcgcatccttttccttgtcggcgctgctaccggcgcgcattccttcgaagaagtccaacttgtggagtctggagggggcctggtgcagcccggcggctctctcagactgtcttgtgcggcaagcggctacaccttcagctcttactggatagaatgggtgaggcaggcacctggaaagggactggagtggattggagagattctgccaggagggggagatacaaattacaatgaaatcttcaaggggcgggccaccttttcagcggataccagcaagaatacagcttacctgcagatgaatagcctccgggcagaagataccgctgtttattattgcacgagacgggtgccaataagactggactattgggggcaagggactcttgtcaccgtcagttcaacgcgtagccagcctcacaccaagcccagcgtgttcgtgatgaagaacggcaccaacgtggcctgcctcgtgaaagagttctaccccaaggacatcaggatcaacctggtgtccagcaagaagatcaccgagttcgaccccgccatcgtgatctcccccagcggcaagtacaacgccgtgaagctggggaagtacgaggacagcaacagcgtgacctgctccgtgcagcacgacaacaagaccgtgcacagcaccgactttgaagtgaaaaccgactccaccgaccacgtgaagcccaaagagacagagaacaccaagcagcccagcaagagctgccacaagcccaaggccatcgtgcacaccgagaaagtgaacatgatgagcctgaccgtgctgggcttcagaatcctgctgctgaaagtggccggctttaacctgctgatgaccctgcggctgtggtccagctaa

SEQ ID NO: 38452 - DNA, 1869 bp, synthetic construct
  source 1..1869: mol_type = other DNA
atggccttaccagtgaccgccttgctcctgccgctggccttgctgctccacgccgccaggccggacatcgtgatgacacagagccctgatagcctggccgtgtctctgggagagagagccaccattaactgcaaggccagccagagcgtggactacgacggcgacagcttcctgaactggtatcagcagaagcccggccagcctcctaagctgctgatctacgccgccagcaatctggaaagcggcgtgccaagcagattttccggctctggcagcggcaccgatttcaccctgacaatatccagcctccagcctgaggacgtggccgtgtactactgccagcagagcaacgacgaccctctgacctttggacagggcaccaaggtggaaatcaaactcgaggacctgaagaacgtgttcccacctgaggtggccgtgttcgagcctagcgaggccgagatcagccacacccagaaagccaccctcgtgtgcctggctaccggcttctaccccgaccatgtggaactgtcttggtgggtcaacggcaaagaggtgcacagcggcgtgtgtaccgacccccagccactgaaagaacagcccgccctgaacgacagccggtactgcctgagcagcagactgagagtgtccgccaccttctggcagaacccccggaaccacttcagatgccaggtgcagttctacggcctgagcgagaacgacgagtggacccaggacagagccaagcccgtgacccagatcgtgtctgccgaagcctggggcagagccgattgcggctttaccagcgagagctaccagcagggcgtgctgagcgccaccatcctgtacttgttgctgctgctgaagtccgtggtgtacttcgccatcatcacatgctgcctgctgcggagaaccgccttctgctgcaacggcgagaagtctagggccaagcgatctggatctggagcaacaaacttctcactactcaaacaagcaggtgacgtggaggagaatcccgggcctactagtatggactggatttggcgcatccttttccttgtcggcgctgctaccggcgcgcattccttcgaagaagtccaacttgtggagtctggagggggcctggtgcagcccggcggctctctcagactgtcttgtgcggcaagcggctacaccttcagctcttactggatagaatgggtgaggcaggcacctggaaagggactggagtggattggagagattctgccaggagggggagatacaaattacaatgaaatcttcaaggggcgggccaccttttcagcggataccagcaagaatacagcttacctgcagatgaatagcctccgggcagaagataccgctgtttattattgcacgagacgggtgccaataagactggactattgggggcaagggactcttgtcaccgtcagttcaacgcgtatccagaaccctgatcctgccgtgtaccagctgcgggatagcaagagcagcgacaagagcgtgtgtctgttcaccgacttcgacagccagaccaacgtgtcccagagcaaggactccgacgtgtacatcaccgataagtgcgtgctggacatgcggagcatggacttcaagagcaactccgccgtggcctggtccaacaagtccgatttcgcctgcgccaacgccttcaacaacagcattatccccgaggacacattcttcccaagccccgagagcagctgcgacgtgaagctggtggaaaagagcttcgagacagacaccaacctgaacttccagaacctgagcgtgatcggcctgcggatgctgttcgccaaaaccgtggccgtgaacttcctgctgaccgccaagctgttcttcctctaa

SEQ ID NO: 38453 - DNA, 1956 bp, synthetic construct
  source 1..1956: mol_type = other DNA
atggccttaccagtgaccgccttgctcctgccgctggccttgctgctccacgccgccaggccggacatcgtgatgacacagagccctgatagcctggccgtgtctctgggagagagagccaccattaactgcaaggccagccagagcgtggactacgacggcgacagcttcctgaactggtatcagcagaagcccggccagcctcctaagctgctgatctacgccgccagcaatctggaaagcggcgtgccaagcagattttccggctctggcagcggcaccgatttcaccctgacaatatccagcctccagcctgaggacgtggccgtgtactactgccagcagagcaacgacgaccctctgacctttggacagggcaccaaggtggaaatcaaactcgaggacctgaagaacgtgttcccacctgaggtggccgtgttcgagcctagcgaggccgagatcagccacacccagaaagccaccctcgtgtgcctggctaccggcttctaccccgaccatgtggaactgtcttggtgggtcaacggcaaagaggtgcacagcggcgtgtctaccgacccccagccactgaaagaacagcccgccctgaacgacagccggtactgcctgagcagcagactgagagtgtccgccaccttctggcagaacccccggaaccacttcagatgccaggtgcagttctacggcctgagcgagaacgacgagtggacccaggacagagccaagcccgtgacccagatcgtgtctgccgaagcctggggcagagccgattgcggatcctccaaggacgccaacgataccctgctgctccagctgaccaacaccagcgcctactacatgtacttgttgctgctgctgaagtccgtggtgtacttcgccatcatcacatgctgcctgctgcggagaaccgccttctgctgcaacggcgagaagtctagggccaagcgatctggatctggagcaacaaacttctcactactcaaacaagcaggtgacgtggaggagaatcccgggcctactagtatggactggatttggcgcatccttttccttgtcggcgctgctaccggcgcgcattccttcgaagaagtccaacttgtggagtctggagggggcctggtgcagcccggcggctctctcagactgtcttgtgcggcaagcggctacaccttcagctcttactggatagaatgggtgaggcaggcacctggaaagggactggagtggattggagagattctgccaggagggggagatacaaattacaatgaaatcttcaaggggcgggccaccttttcagcggataccagcaagaatacagcttacctgcagatgaatagcctccgggcagaagataccgctgtttattattgcacgagacgggtgccaataagactggactattgggggcaagggactcttgtcaccgtcagttcaacgcgtatccagaaccctgatcctgccgtgtaccagctgcgggatagcaagagcagcgacaagagcgtgtgtctgttcaccgacttcgacagccagaccaacgtgtcccagagcaaggactccgacgtgtacatcaccgataagaccgtgctggacatgcggagcatggacttcaagagcaactccgccgtggcctggtccaacaagtccgatttcgcctgcgccaacgccttcaacaacagcattatccccgaggacacattcttcccaagccccgagagcagctgcggtaccgaagtgaaaaccgactccaccgaccacgtgaagcccaaagagacagagaacaccaagcagcccagcaagagctgccacaagcccaaggccatcgtgcacaccgagaaagtgaacatgatgagcctgaccgtgctgggcctgcggatgctgttcgccaaaaccgtggccgtgaacttcctgctgaccgccaagctgttcttcctctaa

SEQ ID NO: 38454 - DNA, 1866 bp, synthetic construct
  source 1..1866: mol_type = other DNA
atggccttaccagtgaccgccttgctcctgccgctggccttgctgctccacgccgccaggccggacatcgtgatgacacagagccctgatagcctggccgtgtctctgggagagagagccaccattaactgcaaggccagccagagcgtggactacgacggcgacagcttcctgaactggtatcagcagaagcccggccagcctcctaagctgctgatctacgccgccagcaatctggaaagcggcgtgccaagcagattttccggctctggcagcggcaccgatttcaccctgacaatatccagcctccagcctgaggacgtggccgtgtactactgccagcagagcaacgacgaccctctgacctttggacagggcaccaaggtggaaatcaaactcgaggacctgaagaacgtgttcccacctgaggtggccgtgttcgagcctagcgaggccgagatcagccacacccagaaagccaccctcgtgtgcctggctaccggcttctaccccgaccatgtggaactgtcttggtgggtcaacggcaaagaggtgcacagcggcgtgtgtaccgacccccagccactgaaagaacagcccgccctgaacgacagccggtactgcctgagcagcagactgagagtgtccgccaccttctggcagaacccccggaaccacttcagatgccaggtgcagttctacggcctgagcgagaacgacgagtggacccaggacagagccaagcccgtgacccagatcgtgtctgccgaagcctggggcagagccgattgcgacgtgaagctggtggaaaagagcttcgagacagacaccaacctgaacttccagaacctgagcgtgatcggcttcagaatcctgctgctgaaagtggccggctttaacctgctgatgaccctgcggctgtggtccagcagggccaagcgatctggatctggagcaacaaacttctcactactcaaacaagcaggtgacgtggaggagaatcccgggcctactagtatggactggatttggcgcatccttttccttgtcggcgctgctaccggcgcgcattccttcgaagaagtccaacttgtggagtctggagggggcctggtgcagcccggcggctctctcagactgtcttgtgcggcaagcggctacaccttcagctcttactggatagaatgggtgaggcaggcacctggaaagggactggagtggattggagagattctgccaggagggggagatacaaattacaatgaaatcttcaaggggcgggccaccttttcagcggataccagcaagaatacagcttacctgcagatgaatagcctccgggcagaagataccgctgtttattattgcacgagacgggtgccaataagactggactattgggggcaagggactcttgtcaccgtcagttcaacgcgtatccagaaccctgatcctgccgtgtaccagctgcgggatagcaagagcagcgacaagagcgtgtgtctgttcaccgacttcgacagccagaccaacgtgtcccagagcaaggactccgacgtgtacatcaccgataagtgcgtgctggacatgcggagcatggacttcaagagcaactccgccgtggcctggtccaacaagtccgatttcgcctgcgccaacgccttcaacaacagcattatccccgaggacacattcttcccaagccccgagagcagctgcggctttaccagcgagagctaccagcagggcgtgctgagcgccaccatcctgtacgagatcctgctgggcaaggccaccctgtacgccgtgctggtgtctgccctggtgctgatggctatggtcaagcggaaggacagccggggataa

SEQ ID NO: 38455 - DNA, 1866 bp, synthetic construct
  source 1..1866: mol_type = other DNA
atggccttaccagtgaccgccttgctcctgccgctggccttgctgctccacgccgccaggccggacatcgtgatgacacagagccctgatagcctggccgtgtctctgggagagagagccaccattaactgcaaggccagccagagcgtggactacgacggcgacagcttcctgaactggtatcagcagaagcccggccagcctcctaagctgctgatctacgccgccagcaatctggaaagcggcgtgccaagcagattttccggctctggcagcggcaccgatttcaccctgacaatatccagcctccagcctgaggacgtggccgtgtactactgccagcagagcaacgacgaccctctgacctttggacagggcaccaaggtggaaatcaaactcgaggacctgaagaacgtgttcccacctgaggtggccgtgttcgagcctagcgaggccgagatcagccacacccagaaagccaccctcgtgtgcctggctaccggcttctaccccgaccatgtggaactgtcttggtgggtcaacggcaaagaggtgcacagcggcgtgtgtaccgacccccagccactgaaagaacagcccgccctgaacgacagccggtactgcctgagcagcagactgagagtgtccgccaccttctggcagaacccccggaaccacttcagatgccaggtgcagttctacggcctgagcgagaacgacgagtggacccaggacagagccaagcccgtgacccagatcgtgtctgccgaagcctggggcagagccgattgcggctttaccagcgagagctaccagcagggcgtgctgagcgccaccaacctgagcgtgatcggcttcagaatcctgctgctgaaagtggccggctttaacctgctgatgaccctgcggctgtggtccagcagggccaagcgatctggatctggagcaacaaacttctcactactcaaacaagcaggtgacgtggaggagaatcccgggcctactagtatggactggatttggcgcatccttttccttgtcggcgctgctaccggcgcgcattccttcgaagaagtccaacttgtggagtctggagggggcctggtgcagcccggcggctctctcagactgtcttgtgcggcaagcggctacaccttcagctcttactggatagaatgggtgaggcaggcacctggaaagggactggagtggattggagagattctgccaggagggggagatacaaattacaatgaaatcttcaaggggcgggccaccttttcagcggataccagcaagaatacagcttacctgcagatgaatagcctccgggcagaagataccgctgtttattattgcacgagacgggtgccaataagactggactattgggggcaagggactcttgtcaccgtcagttcaacgcgtatccagaaccctgatcctgccgtgtaccagctgcgggatagcaagagcagcgacaagagcgtgtgtctgttcaccgacttcgacagccagaccaacgtgtcccagagcaaggactccgacgtgtacatcaccgataagtgcgtgctggacatgcggagcatggacttcaagagcaactccgccgtggcctggtccaacaagtccgatttcgcctgcgccaacgccttcaacaacagcattatccccgaggacacattcttcccaagccccgagagcagctgcgacgtgaagctggtggaaaagagcttcgagacagacaccaacctgaacttccagatcctgtacgagatcctgctgggcaaggccaccctgtacgccgtgctggtgtctgccctggtgctgatggctatggtcaagcggaaggacagccggggataa

SEQ ID NO: 38456 - DNA, 1866 bp, synthetic construct; identical to SEQ ID NO: 38454
  source 1..1866: mol_type = other DNA

SEQ ID NO: 38457 - DNA, 1866 bp, synthetic construct; identical to SEQ ID NO: 38455
  source 1..1866: mol_type = other DNA

SEQ ID NO: 38458 - DNA, 1863 bp, synthetic construct
  source 1..1863: mol_type = other DNA
atggccttaccagtgaccgccttgctcctgccgctggccttgctgctccacgccgccaggccggacatcgtgatgacacagagccctgatagcctggccgtgtctctgggagagagagccaccattaactgcaaggccagccagagcgtggactacgacggcgacagcttcctgaactggtatcagcagaagcccggccagcctcctaagctgctgatctacgccgccagcaatctggaaagcggcgtgccaagcagattttccggctctggcagcggcaccgatttcaccctgacaatatccagcctccagcctgaggacgtggccgtgtactactgccagcagagcaacgacgaccctctgacctttggacagggcaccaaggtggaaatcaaactcgaggacctgaagaacgtgttcccacctgaggtggccgtgttcgagcctagcgaggccgagatcagccacacccagaaagccaccctcgtgtgcctggctaccggcttctaccccgaccatgtggaactgtcttggtgggtcaacggcaaagaggtgcacagcggcgtgtgtaccgacccccagccactgaaagaacagcccgccctgaacgacagccggtactgcctgagcagcagactgagagtgtccgccaccttctggcagaacccccggaaccacttcagatgccaggtgcagttctacggcctgagcgagaacgacgagtggacccaggacagagccaagcccgtgacccagatcgtgtctgccgaagcctggggcagagccgattgcgacgtgaagctggtggaaaagagcttcgagacagacaccaacctgaacttccagaacctgagcgtgatcggcttcagaatcctgctgctgaaagtggccggctttaacctgctgatgaccctgcggctgtggtccagcagggccaagcgatctggatctggagcaacaaacttctcactactcaaacaagcaggtgacgtggaggagaatcccgggcctactagtatggactggatttggcgcatccttttccttgtcggcgctgctaccggcgcgcattccttcgaagaagtccaacttgtggagtctggagggggcctggtgcagcccggcggctctctcagactgtcttgtgcggcaagcggctacaccttcagctcttactggatagaatgggtgaggcaggcacctggaaagggactggagtggattggagagattctgccaggagggggagatacaaattacaatgaaatcttcaaggggcgggccaccttttcagcggataccagcaagaatacagcttacctgcagatgaatagcctccgggcagaagataccgctgtttattattgcacgagacgggtgccaataagactggactattgggggcaagggactcttgtcaccgtcagttcaacgcgtatccagaaccctgatcctgccgtgtaccagctgcgggatagcaagagcagcgacaagagcgtgtgtctgttcaccgacttcgacagccagaccaacgtgtcccagagcaaggactccgacgtgtacatcaccgataagtgcgtgctggacatgcggagcatggacttcaagagcaactccgccgtggcctggtccaacaagtccgatttcgcctgcgccaacgccttcaacaacagcattatccccgaggacacattcttcccaagccccgagagcagctgcggctttaccagcgagagctaccagcagggcgtgctgagcgccaccatcctgtacgagatcctgctgggcaaggccaccctgtacgccgtgctggtgtctgccctggtgctgatggctatggtcaagcggaaggacagccgggga

SEQ ID NO: 38459 - DNA, 1875 bp, synthetic construct
  source 1..1875: mol_type = other DNA
atggccttaccagtgaccgccttgctcctgccgctggccttgctgctccacgccgccaggccggacatcgtgatgacacagagccctgatagcctggccgtgtctctgggagagagagccaccattaactgcaaggccagccagagcgtggactacgacggcgacagcttcctgaactggtatcagcagaagcccggccagcctcctaagctgctgatctacgccgccagcaatctggaaagcggcgtgccaagcagattttccggctctggcagcggcaccgatttcaccctgacaatatccagcctccagcctgaggacgtggccgtgtactactgccagcagagcaacgacgaccctctgacctttggacagggcaccaaggtggaaatcaaactcgaggccgacgtgtcccccaagcctaccatcttcctgccctctatcgccgagacaaagctccagaaggccggcacctacctgtgcctgctggaaaagttcttcccagatgtgattaagatccactggcaggaaaagaagtccaacaccatcctgggcagccaggaaggcaacaccatgaagaccaacgacacctacatgaagttcagctggctgaccgtgcccgagaagtccctggacaaagaacacagatgcatcgtgcggcacgaaaacaacaagaacggcgtggaccaggaaatcatcttcccacccatcaagaccgatgtgattacaatggaccccaaggacaactgctccaaggacgccaacgataccctgctgctccagctgaccaacaccagcgcctactacatgtacttgttgctgctgctgaagtccgtggtgtacttcgccatcatcacatgctgcctgctgcggagaaccgccttctgctgcaacggcgagaagtctagggccaagcgatctggatctggagcaacaaacttctcactactcaaacaagcaggtgacgtggaggagaatcccgggcctactagtatggactggatttggcgcatccttttccttgtcggcgctgctaccggcgcgcattccttcgaagaagtccaacttgtggagtctggagggggcctggtgcagcccggcggctctctcagactgtcttgtgcggcaagcggctacaccttcagctcttactggatagaatgggtgaggcaggcacctggaaagggactggagtggattggagagattctgccaggagggggagatacaaattacaatgaaatcttcaaggggcgggccaccttttcagcggataccagcaagaatacagcttacctgcagatgaatagcctccgggcagaagataccgctgtttattattgcacgagacgggtgccaataagactggactattgggggcaagggactcttgtcaccgtcagttcaacgcgtagccagcctcacaccaagcccagcgtgttcgtgatgaagaacggcaccaacgtggcctgcctcgtgaaagagttctaccccaaggacatcaggatcaacctggtgtccagcaagaagatcaccgagttcgaccccgccatcgtgatctcccccagcggcaagtacaacgccgtgaagctggggaagtatgaggacagcaacagcgtgacctgctccgtgcagcacgacaacaagaccgtgcacagcaccgactttgaagtgaaaaccgactccaccgaccacgtgaagcccaaagagacagagaacaccaagcagcccagcaagagctgccacaagcccaaggccatcgtgcacaccgagaaagtgaacatgatgagcctgaccgtgatcggcttcagaatcctgctgctgaaagtggccggctttaacctgctgatgaccctgcggctgtggtccagctaa

SEQ ID NO: 38460 - DNA, 1875 bp, synthetic construct
  source 1..1875: mol_type = other DNA
atggccttaccagtgaccgccttgctcctgccgctggccttgctgctccacgccgccaggccggacatcgtgatgacacagagccctgatagcctggccgtgtctctgggagagagagccaccattaactgcaaggccagccagagcgtggactacgacggcgacagcttcctgaactggtatcagcagaagcccggccagcctcctaagctgctgatctacgccgccagcaatctggaaagcggcgtgccaagcagattttccggctctggcagcggcaccgatttcaccctgacaatatccagcctccagcctgaggacgtggccgtgtactactgccagcagagcaacgacgaccctctgacctttggacagggcaccaaggtggaaatcaaactcgaggccgacgtgtcccccaagcctaccatcttcctgccctctatcgccgagacaaagctccagaaggccggcacctacctgtgcctgctggaaaagttcttcccagatgtgattaagatccactggcaggaaaagaagtccaacaccatcctgggcagccaggaaggcaacaccatgaagaccaacgacacctacatgaagttcagctggctgaccgtgcccgagaagtccctggacaaagaacacagatgcatcgtgcggcacgaaaacaacaagaacggcgtggaccaggaaatcatcttcccacccatcaagaccgatgtgattacaatggaccccaaggacaactgctccaaggacgccaacgataccctgctgctccagctgaccaacaccagcgcctactacatgtacttgttgctgctgctgaagtccgtggtgtacttcgccatcatcacatgctgcctgctgcggagaaccgccttctgctgcaacggcgagaagtctagggccaagcgatctggatctggagcaacaaacttctcactactcaaacaagcaggtgacgtggaggagaatcccgggcctactagtatggactggatttggcgcatccttttccttgtcggcgctgctaccggcgcgcattccttcgaagaagtccaacttgtggagtctggagggggcctggtgcagcccggcggctctctcagactgtcttgtgcggcaagcggctacaccttcagctcttactggatagaatgggtgaggcaggcacctggaaagggactggagtggattggagagattctgccaggagggggagatacaaattacaatgaaatcttcaaggggcgggccaccttttcagcggataccagcaagaatacagcttacctgcagatgaatagcctccgggcagaagataccgctgtttattattgcacgagacgggtgccaataagactggactattgggggcaagggactcttgtcaccgtcagttcaacgcgtagccagcctcacaccaagcccagcgtgttcgtgatgaagaacggcaccaacgtggcctgcctcgtgaaagagttctaccccaaggacatcaggatcaacctggtgtccagcaagaagatcaccgagttcgaccccgccatcgtgatctcccccagcggcaagtacaacgccgtgaagctggggaagtacgaggacagcaacagcgtgacctgctccgtgcagcacgacaacaagaccgtgcacagcaccgactttgaagtgaaaaccgactccaccgaccacgtgaagcccaaagagacagagaacaccaagcagcccagcaagagctgccacaagcccaaggccatcgtgcacaccgagaaagtgaacatgatgagcctgaccgtgctgggcttcagaatcctgctgctgaaagtggccggctttaacctgctgatgaccctgcggctgtggtccagctaa

SEQ ID NO: 38461 - DNA, 1863 bp, synthetic construct; identical to SEQ ID NO: 38458
  source 1..1863: mol_type = other DNA

SEQ ID NO: 38462 - DNA, 1875 bp, synthetic construct
  source 1..1875: mol_type = other DNA
atggccttaccagtgaccgccttgctcctgccgctggccttgctgctccacgccgccaggccggacatcgtgatgacacagagccctgatagcctggccgtgtctctgggagagagagccaccattaactgcaaggccagccagagcgtggactacgacggcgacagcttcctgaactggtatcagcagaagcccggccagcctcctaagctgctgatctacgccgccagcaatctggaaagcggcgtgccaagcagattttccggctctggcagcggcaccgatttcaccctgacaatatccagcctccagcctgaggacgtggccgtgtactactgccagcagagcaacgacgaccctctgacctttggacagggcaccaaggtggaaatcaaactcgagatccagaaccctgatcctgccgtgtaccagctgcgggatagcaagagcagcgacaagagcgtgtgtctgttcaccgacttcgacagccagaccaacgtgtcccagagcaaggactccgacgtgtacatcaccgataagtgcgtgctggacatgcggagcatggacttcaagagcaactccgccgtggcctggtccaacaagtccgatttcgcctgcgccaacgccttcaacaacagcattatccccgaggacacattcttcccaagccccgagagcagctgcggctttaccagcgagagctaccagcagggcgtgctgagcgccaccatcctgtacgagatcctgctgggcaaggccaccctgtacgccgtgctggtgtctgccctggtgctgatggctatggtcaagcggaaggacagccggggacgcgccaagagaagcggatctggcgtgaagcagaccctgaatttcgacctgctgaagctggctggcgacgtggaatccaacccaggccctactagtatggactggatttggcgcatccttttccttgtcggcgctgctaccggcgcgcattccttcgaagaagtccaacttgtggagtctggagggggcctggtgcagcccggcggctctctcagactgtcttgtgcggcaagcggctacaccttcagctcttactggatagaatgggtgaggcaggcacctggaaagggactggagtggattggagagattctgccaggagggggagatacaaattacaatgaaatcttcaaggggcgggccaccttttcagcggataccagcaagaatacagcttacctgcagatgaatagcctccgggcagaagataccgctgtttattattgcacgagacgggtgccaataagactggactattgggggcaagggactcttgtcaccgtcagttcaacgcgtgaggacctgaagaacgtgttcccacctgaggtggccgtgttcgagcctagcgaggccgagatcagccacacccagaaagccaccctcgtgtgcctggctaccggcttctaccccgaccatgtggaactgtcttggtgggtcaacggcaaagaggtgcacagcggcgtgtgtaccgacccccagccactgaaagaacagcccgccctgaacgacagccggtactgcctgagcagcagactgagagtgtccgccaccttctggcagaacccccggaaccacttcagatgccaggtgcagttctacggcctgagcgagaacgacgagtggacccaggacagagccaagcccgtgacccagatcgtgtctgccgaagcctggggcagagccgattgcgacgtgaagctggtggaaaagagcttcgagacagacaccaacctgaacttccagaacctgagcgtgatcggcttcagaatcctgctgctgaaagtggccggctttaacctgctgatgaccctgcggctgtggtccagc

SEQ ID NO: 38463 - DNA, 2268 bp, synthetic construct
  source 1..2268: mol_type = other DNA
atggccttaccagtgaccgccttgctcctgccgctggccttgctgctccacgccgccaggccggaagtgcagctggttgaatctggcggaggactggttcagcctggcggatctctgagactgtcttgtgccgccagcggcttcagcttcagcgacttttggatgagctgggtccgacaggcccctggcaaaggacttgaatgggtcgccacaatcagccaggccggcagcgagaaggactacgtggactctgtgaagggcagattcaccatcagccgggacaacgccaagaagtccctgtacctccagatgaacagcctgagagccgaggacaccgccgtgtactattgtgcctctggcgtgtacagcttcgactacagaggccagggcaccctggtcacagtctcttctggtaccggcggaggcggatctggcggcggaggtagcggtggcggaggatctgaattcgacatcgtgatgacacagagccctgatagcctggccgtgtctctgggagagagagccaccattaactgcaaggccagccagagcgtggactacgacggcgacagcttcctgaactggtatcagcagaagcccggccagcctcctaagctgctgatctacgccgccagcaatctggaaagcggcgtgccaagcagattttccggctctggcagcggcaccgatttcaccctgacaatatccagcctccagcctgaggacgtggccgtgtactactgccagcagagcaacgacgaccctctgacctttggacagggcaccaaggtggaaatcaaactcgaggacctgaagaacgtgttcccacctgaggtggccgtgttcgagcctagcgaggccgagatcagccacacccagaaagccaccctcgtgtgcctggctaccggcttctaccccgaccatgtggaactgtcttggtgggtcaacggcaaagaggtgcacagcggcgtgtgtaccgacccccagccactgaaagaacagcccgccctgaacgacagccggtactgcctgagcagcagactgagagtgtccgccaccttctggcagaacccccggaaccacttcagatgccaggtgcagttctacggcctgagcgagaacgacgagtggacccaggacagagccaagcccgtgacccagatcgtgtctgccgaagcctggggcagagccgattgcgacgtgaagctggtggaaaagagcttcgagacagacaccaacctgaacttccagaacctgagcgtgatcggcttcagaatcctgctgctgaaagtggccggctttaacctgctgatgaccctgcggctgtggtccagcagggccaagcgatctggatctggagcaacaaacttctcactactcaaacaagcaggtgacgtggaggagaatcccgggcctactagtatggactggatttggcgcatccttttccttgtcggcgctgctaccggcgcgcattccttcgaagaagtccaacttgtggagtctggagggggcctggtgcagcccggcggctctctcagactgtcttgtgcggcaagcggctacaccttcagctcttactggatagaatgggtgaggcaggcacctggaaagggactggagtggattggagagattctgccaggagggggagatacaaattacaatgaaatcttcaaggggcgggccaccttttcagcggataccagcaagaatacagcttacctgcagatgaatagcctccgggcagaagataccgctgtttattattgcacgagacgggtgccaataagactggactattgggggcaagggactcttgtcaccgtcagttcaacgcgtatccagaaccctgatcctgccgtgtaccagctgcgggatagcaagagcagcgacaagagcgtgtgtctgttcaccgacttcgacagccagaccaacgtgtcccagagcaaggactccgacgtgtacatcaccgataagtgcgtgctggacatgcggagcatggacttcaagagcaactccgccgtggcctggtccaacaagtccgatttcgcctgcgccaacgccttcaacaacagcattatccccgaggacacattcttcccaagccccgagagcagctgcggctttaccagcgagagctaccagcagggcgtgctgagcgccaccatcctgtacgagatcctgctgggcaaggccaccctgtacgccgtgctggtgtctgccctggtgctgatggctatggtcaagcggaaggacagccgggga

SEQ ID NO: 38464 - DNA, 2280 bp, synthetic construct
  source 1..2280: mol_type = other DNA
atggccttaccagtgaccgccttgctcctgccgctggccttgctgctccacgccgccaggccggaagtgcagctggttgaatctggcggaggactggttcagcctggcggatctctgagactgtcttgtgccgccagcggcttcagcttcagcgacttttggatgagctgggtccgacaggcccctggcaaaggacttgaatgggtcgccacaatcagccaggccggcagcgagaaggactacgtggactctgtgaagggcagattcaccatcagccgggacaacgccaagaagtccctgtacctccagatgaacagcctgagagccgaggacaccgccgtgtactattgtgcctctggcgtgtacagcttcgactacagaggccagggcaccctggtcacagtctcttctggtaccggcggaggcggatctggcggcggaggtagcggtggcggaggatctgaattcgacatcgtgatgacacagagccctgatagcctggccgtgtctctgggagagagagccaccattaactgcaaggccagccagagcgtggactacgacggcgacagcttcctgaactggtatcagcagaagcccggccagcctcctaagctgctgatctacgccgccagcaatctggaaagcggcgtgccaagcagattttccggctctggcagcggcaccgatttcaccctgacaatatccagcctccagcctgaggacgtggccgtgtactactgccagcagagcaacgacgaccctctgacctttggacagggcaccaaggtggaaatcaaactcgagatccagaaccctgatcctgccgtgtaccagctgcgggatagcaagagcagcgacaagagcgtgtgtctgttcaccgacttcgacagccagaccaacgtgtcccagagcaaggactccgacgtgtacatcaccgataagtgcgtgctggacatgcggagcatggacttcaagagcaactccgccgtggcctggtccaacaagtccgatttcgcctgcgccaacgccttcaacaacagcattatccccgaggacacattcttcccaagccccgagagcagctgcggctttaccagcgagagctaccagcagggcgtgctgagcgccaccatcctgtacgagatcctgctgggcaaggccaccctgtacgccgtgctggtgtctgccctggtgctgatggctatggtcaagcggaaggacagccggggacgcgccaagagaagcggatctggcgtgaagcagaccctgaatttcgacctgctgaagctggctggcgacgtggaatccaacccaggccctactagtatggactggatttggcgcatccttttccttgtcggcgctgctaccggcgcgcattccttcgaagaagtccaacttgtggagtctggagggggcctggtgcagcccggcggctctctcagactgtcttgtgcggcaagcggctacaccttcagctcttactggatagaatgggtgaggcaggcacctggaaagggactggagtggattggagagattctgccaggagggggagatacaaattacaatgaaatcttcaaggggcgggccaccttttcagcggataccagcaagaatacagcttacctgcagatgaatagcctccgggcagaagataccgctgtttattattgcacgagacgggtgccaataagactggactattgggggcaagggactcttgtcaccgtcagttcaacgcgtgaggacctgaagaacgtgttcccacctgaggtggccgtgttcgagcctagcgaggccgagatcagccacacccagaaagccaccctcgtgtgcctggctaccggcttctaccccgaccatgtggaactgtcttggtgggtcaacggcaaagaggtgcacagcggcgtgtgtaccgacccccagccactgaaagaacagcccgccctgaacgacagccggtactgcctgagcagcagactgagagtgtccgccaccttctggcagaacccccggaaccacttcagatgccaggtgcagttctacggcctgagcgagaacgacgagtggacccaggacagagccaagcccgtgacccagatcgtgtctgccgaagcctggggcagagccgattgcgacgtgaagctggtggaaaagagcttcgagacagacaccaacctgaacttccagaacctgagcgtgatcggcttcagaatcctgctgctgaaagtggccggctttaacctgctgatgaccctgcggctgtggtccagc

SEQ ID NO: 38465 - DNA, 2679 bp, synthetic construct
  source 1..2679: mol_type = other DNA
atggccttaccagtgaccgccttgctcctgccgctggccttgctgctccacgccgccaggccggaagtgcagctggttgaatctggcggaggactggttcagcctggcggatctctgagactgtcttgtgccgccagcggcttcagcttcagcgacttttggatgagctgggtccgacaggcccctggcaaaggacttgaatgggtcgccacaatcagccaggccggcagcgagaaggactacgtggactctgtgaagggcagattcaccatcagccgggacaacgccaagaagtccctgtacctccagatgaacagcctgagagccgaggacaccgccgtgtactattgtgcctctggcgtgtacagcttcgactacagaggccagggcaccctggtcacagtctcttctggtaccggcggaggcggatctggcggcggaggtagcggtggcggaggatctgaattcgacatcgtgatgacacagagccctgatagcctggccgtgtctctgggagagagagccaccattaactgcaaggccagccagagcgtggactacgacggcgacagcttcctgaactggtatcagcagaagcccggccagcctcctaagctgctgatctacgccgccagcaatctggaaagcggcgtgccaagcagattttccggctctggcagcggcaccgatttcaccctgacaatatccagcctccagcctgaggacgtggccgtgtactactgccagcagagcaacgacgaccctctgacctttggacagggcaccaaggtggaaatcaaactcgaggacctgaagaacgtgttcccacctgaggtggccgtgttcgagcctagcgaggccgagatcagccacacccagaaagccaccctcgtgtgcctggctaccggcttctaccccgaccatgtggaactgtcttggtgggtcaacggcaaagaggtgcacagcggcgtgtgtaccgacccccagccactgaaagaacagcccgccctgaacgacagccggtactgcctgagcagcagactgagagtgtccgccaccttctggcagaacccccggaaccacttcagatgccaggtgcagttctacggcctgagcgagaacgacgagtggacccaggacagagccaagcccgtgacccagatcgtgtctgccgaagcctggggcagagccgattgcgacgtgaagctggtggaaaagagcttcgagacagacaccaacctgaacttccagaacctgagcgtgatcggcttcagaatcctgctgctgaaagtggccggctttaacctgctgatgaccctgcggctgtggtccagcagggccaagcgatctggatctggagcaacaaacttctcactactcaaacaagcaggtgacgtggaggagaatcccgggcctactagtatggactggatttggcgcatccttttccttgtcggcgctgctaccggcgcgcattccgggccccagctccagctgcaagagtctggacctggcctggtcaagcctagcgagacactgagcctgacctgtaccgtgtccggcgatagcatcagcagcggcgattactactggggctggatcagacagcctcctggcaaaggactggaatggatcggccacatctactacagcggcgtgacctactacaaccccagcctgaagtccagagtgaccatcagcgtggacaccagccggaaccagttctccctgaagctgtctagcgtgacagccgccgataccgccgtgtactactgcaccagagaggacagcagcaactggcggagtagaggccagggaacactggtcacagttagctctggatccggcggaggcggaagtggaggcggaggatctggcggcggaggctctttcgaagaagtccaacttgtggagtctggagggggcctggtgcagcccggcggctctctcagactgtcttgtgcggcaagcggctacaccttcagctcttactggatagaatgggtgaggcaggcacctggaaagggactggagtggattggagagattctgccaggagggggagatacaaattacaatgaaatcttcaaggggcgggccaccttttcagcggataccagcaagaatacagcttacctgcagatgaatagcctccgggcagaagataccgctgtttattattgcacgagacgggtgccaataagactggactattgggggcaagggactcttgtcaccgtcagttcaacgcgtatccagaaccctgatcctgccgtgtaccagctgcgggatagcaagagcagcgacaagagcgtgtgtctgttcaccgacttcgacagccagaccaacgtgtcccagagcaaggactccgacgtgtacatcaccgataagtgcgtgctggacatgcggagcatggacttcaagagcaactccgccgtggcctggtccaacaagtccgatttcgcctgcgccaacgccttcaacaacagcattatccccgaggacacattcttcccaagccccgagagcagctgcggctttaccagcgagagctaccagcagggcgtgctgagcgccaccatcctgtacgagatcctgctgggcaaggccaccctgtacgccgtgctggtgtctgccctggtgctgatggctatggtcaagcggaaggacagccgggga

SEQ ID NO: 38466 - DNA, 2691 bp, synthetic construct
  source 1..2691: mol_type = other DNA
atggccttaccagtgaccgccttgctcctgccgctggccttgctgctccacgccgccaggccggaagtgcagctggttgaatctggcggaggactggttcagcctggcggatctctgagactgtcttgtgccgccagcggcttcagcttcagcgacttttggatgagctgggtccgacaggcccctggcaaaggacttgaatgggtcgccacaatcagccaggccggcagcgagaaggactacgtggactctgtgaagggcagattcaccatcagccgggacaacgccaagaagtccctgtacctccagatgaacagcctgagagccgaggacaccgccgtgtactattgtgcctctggcgtgtacagcttcgactacagaggccagggcaccctggtcacagtctcttctggtaccggcggaggcggatctggcggcggaggtagcggtggcggaggatctgaattcgacatcgtgatgacacagagccctgatagcctggccgtgtctctgggagagagagccaccattaactgcaaggccagccagagcgtggactacgacggcgacagcttcctgaactggtatcagcagaagcccggccagcctcctaagctgctgatctacgccgccagcaatctggaaagcggcgtgccaagcagattttccggctctggcagcggcaccgatttcaccctgacaatatccagcctccagcctgaggacgtggccgtgtactactgccagcagagcaacgacgaccctctgacctttggacagggcaccaaggtggaaatcaaactcgagatccagaaccctgatcctgccgtgtaccagctgcgggatagcaagagcagcgacaagagcgtgtgtctgttcaccgacttcgacagccagaccaacgtgtcccagagcaaggactccgacgtgtacatcaccgataagtgcgtgctggacatgcggagcatggacttcaagagcaactccgccgtggcctggtccaacaagtccgatttcgcctgcgccaacgccttcaacaacagcattatccccgaggacacattcttcccaagccccgagagcagctgcggctttaccagcgagagctaccagcagggcgtgctgagcgccaccatcctgtacgagatcctgctgggcaaggccaccctgtacgccgtgctggtgtctgccctggtgctgatggctatggtcaagcggaaggacagccggggacgcgccaagagaagcggatctggcgtgaagcagaccctgaatttcgacctgctgaagctggctggcgacgtggaatccaacccaggccctactagtatggactggatttggcgcatccttttccttgtcggcgctgctaccggcgcgcattccgggccccagctccagctgcaagagtctggacctggcctggtcaagcctagcgagacactgagcctgacctgtaccgtgtccggcgatagcatcagcagcggcgattactactggggctggatcagacagcctcctggcaaaggactggaatggatcggccacatctactacagcggcgtgacctactacaaccccagcctgaagtccagagtgaccatcagcgtggacaccagccggaaccagttctccctgaagctgtctagcgtgacagccgccgataccgccgtgtactactgcaccagagaggacagcagcaactggcggagtagaggccagggaacactggtcacagttagctctggatccggcggaggcggaagtggaggcggaggatctggcggcggaggctctttcgaagaagtccaacttgtggagtctggagggggcctggtgcagcccggcggctctctcagactgtcttgtgcggcaagcggctacaccttcagctcttactggatagaatgggtgaggcaggcacctggaaagggactggagtggattggagagattctgccaggagggggagatacaaattacaatgaaatcttcaaggggcgggccaccttttcagcggataccagcaagaatacagcttacctgcagatgaatagcctccgggcagaagataccgctgtttattattgcacgagacgggtgccaataagactggactattgggggcaagggactcttgtcaccgtcagttcaacgcgtgaggacctgaagaacgtgttcccacctgaggtggccgtgttcgagcctagcgaggccgagatcagccacacccagaaagccaccctcgtgtgcctggctaccggcttctaccccgaccatgtggaactgtcttggtgggtcaacggcaaagaggtgcacagcggcgtgtgtaccgacccccagccactgaaagaacagcccgccctgaacgacagccggtactgcctgagcagcagactgagagtgtccgccaccttctggcagaacccccggaaccacttcagatgccaggtgcagttctacggcctgagcgagaacgacgagtggacccaggacagagccaagcccgtgacccagatcgtgtctgccgaagcctggggcagagccgattgcgacgtgaagctggtggaaaagagcttcgagacagacaccaacctgaacttccagaacctgagcgtgatcggcttcagaatcctgctgctgaaagtggccggctttaacctgctgatgaccctgcggctgtggtccagc

SEQ ID NO: 38467 - DNA, 2073 bp, synthetic construct
  source 1..2073: mol_type = other DNA
atggccttaccagtgaccgccttgctcctgccgctggccttgctgctccacgccgccaggccggacatcgtgatgacacagagccctgatagcctggccgtgtctctgggagagagagccaccattaactgcaaggccagccagagcgtggactacgacggcgacagcttcctgaactggtatcagcagaagcccggccagcctcctaagctgctgatctacgccgccagcaatctggaaagcggcgtgccaagcagattttccggctctggcagcggcaccgatttcaccctgacaatatccagcctccagcctgaggacgtggccgtgtactactgccagcagagcaacgacgaccctctgacctttggacagggcaccaaggtggaaatcaaactcgaggacctgaagaacgtgttcccacctgaggtggccgtgttcgagcctagcgaggccgagatcagccacacccagaaagccaccctcgtgtgcctggctaccggcttctaccccgaccatgtggaactgtcttggtgggtcaacggcaaagaggtgcacagcggcgtgtgtaccgacccccagccactgaaagaacagcccgccctgaacgacagccggtactgcctgagcagcagactgagagtgtccgccaccttctggcagaacccccggaaccacttcagatgccaggtgcagttctacggcctgagcgagaacgacgagtggacccaggacagagccaagcccgtgacccagatcgtgtctgccgaagcctggggcagagccgattgcgacgtgaagctggtggaaaagagcttcgagacagacaccaacctgaacttccagaacctgagcgtgatcggcttcagaatcctgctgctgaaagtggccggctttaacctgctgatgaccctgcggctgtggtccagcagggccaagcgatctggatctggagcaacaaacttctcactactcaaacaagcaggtgacgtggaggagaatcccgggcctactagtatggactggatttggcgcatccttttccttgtcggcgctgctaccggcgcccattccgggcccatggaccccgacctggaaatcagagccgccttcctgcggcagagaaacacagccctgagaacagaggtggccgagctggaacaagaggtgcagcggctggaaaacgaggtgtcccagtacgagacaagatacggccctctcggaggcggaaaaggatccggcggcggaggatctggcggaggcggatctgggggcggaggctctttcgaagaagtccaacttgtggagtctggagggggcctggtgcagcccggcggctctctcagactgtcttgtgcggcaagcggctacaccttcagctcttactggatagaatgggtgaggcaggcacctggaaagggactggagtggattggagagattctgccaggagggggagatacaaattacaatgaaatcttcaaggggcgggccaccttttcagcggataccagcaagaatacagcttacctgcagatgaatagcctccgggcagaagataccgctgtttattattgcacgagacgggtgccaataagactggactattgggggcaagggactcttgtcaccgtcagttcaacgcgtatccagaaccctgatcctgccgtgtaccagctgcgggatagcaagagcagcgacaagagcgtgtgtctgttcaccgacttcgacagccagaccaacgtgtcccagagcaaggactccgacgtgtacatcaccgataagtgcgtgctggacatgcggagcatggacttcaagagcaactccgccgtggcctggtccaacaagtccgatttcgcctgcgccaacgccttcaacaacagcattatccccgaggacacattcttcccaagccccgagagcagctgcggctttaccagcgagagctaccagcagggcgtgctgagcgccaccatcctgtacgagatcctgctgggcaaggccaccctgtacgccgtgctggtgtctgccctggtgctgatggctatggtcaagcggaaggacagccgggga

SEQ ID NO: 38468 - DNA, 2085 bp, synthetic construct
  source 1..2085: mol_type = other DNA
atggccttaccagtgaccgccttgctcctgccgctggccttgctgctccacgccgccaggccggacatcgtgatgacacagagccctgatagcctggccgtgtctctgggagagagagccaccattaactgcaaggccagccagagcgtggactacgacggcgacagcttcctgaactggtatcagcagaagcccggccagcctcctaagctgctgatctacgccgccagcaatctggaaagcggcgtgccaagcagattttccggctctggcagcggcaccgatttcaccctgacaatatccagcctccagcctgaggacgtggccgtgtactactgccagcagagcaacgacgaccctctgacctttggacagggcaccaaggtggaaatcaaactcgagatccagaaccctgatcctgccgtgtaccagctgcgggatagcaagagcagcgacaagagcgtgtgtctgttcaccgacttcgacagccagaccaacgtgtcccagagcaaggactccgacgtgtacatcaccgataagtgcgtgctggacatgcggagcatggacttcaagagcaactccgccgtggcctggtccaacaagtccgatttcgcctgcgccaacgccttcaacaacagcattatccccgaggacacattcttcccaagccccgagagcagctgcggctttaccagcgagagctaccagcagggcgtgctgagcgccaccatcctgtacgagatcctgctgggcaaggccaccctgtacgccgtgctggtgtctgccctggtgctgatggctatggtcaagcggaaggacagccggggacgcgccaagagaagcggatctggcgtgaagcagaccctgaatttcgacctgctgaagctggctggcgacgtggaatccaacccaggccctactagtatggactggatttggcgcatccttttccttgtcggcgctgctaccggcgcccattccgggcccatggaccccgacctggaaatcagagccgccttcctgcggcagagaaacacagccctgagaacagaggtggccgagctggaacaagaggtgcagcggctggaaaacgaggtgtcccagtacgagacaagatacggccctctcggaggcggaaaaggatccggcggcggaggatctggcggaggcggatctgggggcggaggctctttcgaagaagtccaacttgtggagtctggagggggcctggtgcagcccggcggctctctcagactgtcttgtgcggcaagcggctacaccttcagctcttactggatagaatgggtgaggcaggcacctggaaagggactggagtggattggagagattctgccaggagggggagatacaaattacaatgaaatcttcaaggggcgggccaccttttcagcggataccagcaagaatacagcttacctgcagatgaatagcctccgggcagaagataccgctgtttattattgcacgagacgggtgccaataagactggactattgggggcaagggactcttgtcaccgtcagttcaacgcgtgaggacctgaagaacgtgttcccacctgaggtggccgtgttcgagcctagcgaggccgagatcagccacacccagaaagccaccctcgtgtgcctggctaccggcttctaccccgaccatgtggaactgtcttggtgggtcaacggcaaagaggtgcacagcggcgtgtgtaccgacccccagccactgaaagaacagcccgccctgaacgacagccggtactgcctgagcagcagactgagagtgtccgccaccttctggcagaacccccggaaccacttcagatgccaggtgcagttctacggcctgagcgagaacgacgagtggacccaggacagagccaagcccgtgacccagatcgtgtctgccgaagcctggggcagagccgattgcgacgtgaagctggtggaaaagagcttcgagacagacaccaacctgaacttccagaacctgagcgtgatcggcttcagaatcctgctgctgaaagtggccggctttaacctgctgatgaccctgcggctgtggtccagc

SEQ ID NO: 38469 - DNA, 2004 bp, synthetic construct
  source 1..2004: mol_type = other DNA
atggccttaccagtgaccgccttgctcctgccgctggccttgctgctccacgccgccaggccggacatcgtgatgacacagagccctgatagcctggccgtgtctctgggagagagagccaccattaactgcaaggccagccagagcgtggactacgacggcgacagcttcctgaactggtatcagcagaagcccggccagcctcctaagctgctgatctacgccgccagcaatctggaaagcggcgtgccaagcagattttccggctctggcagcggcaccgatttcaccctgacaatatccagcctccagcctgaggacgtggccgtgtactactgccagcagagcaacgacgaccctctgacctttggacagggcaccaaggtggaaatcaaactcgaggacctgaagaacgtgttcccacctgaggtggccgtgttcgagcctagcgaggccgagatcagccacacccagaaagccaccctcgtgtgcctggctaccggcttctaccccgaccatgtggaactgtcttggtgggtcaacggcaaagaggtgcacagcggcgtgtgtaccgacccccagccactgaaagaacagcccgccctgaacgacagccggtactgcctgagcagcagactgagagtgtccgccaccttctggcagaacccccggaaccacttcagatgccaggtgcagttctacggcctgagcgagaacgacgagtggacccaggacagagccaagcccgtgacccagatcgtgtctgccgaagcctggggcagagccgattgcgacgtgaagctggtggaaaagagcttcgagacagacaccaacctgaacttccagaacctgagcgtgatcggcttcagaatcctgctgctgaaagtggccggctttaacctgctgatgaccctgcggctgtggtccagcagggccaagcgatctggatctggagcaacaaacttctcactactcaaacaagcaggtgacgtggaggagaatcccgggcctactagtatggactggatttggcgcatccttttccttgtcggcgctgctaccggcgcccattccgggcccgaagttgctgccctcgagaaggaggtagcagctttggaaaaagaagtcgcagcccttgagaaagaagttgcggctctggagaagggatccggcggcggaggatctggcggaggcggatctgggggcggaggctctttcgaagaagtccaacttgtggagtctggagggggcctggtgcagcccggcggctctctcagactgtcttgtgcggcaagcggctacaccttcagctcttactggatagaatgggtgaggcaggcacctggaaagggactggagtggattggagagattctgccaggagggggagatacaaattacaatgaaatcttcaaggggcgggccaccttttcagcggataccagcaagaatacagcttacctgcagatgaatagcctccgggcagaagataccgctgtttattattgcacgagacgggtgccaataagactggactattgggggcaagggactcttgtcaccgtcagttcaacgcgtatccagaaccctgatcctgccgtgtaccagctgcgggatagcaagagcagcgacaagagcgtgtgtctgttcaccgacttcgacagccagaccaacgtgtcccagagcaaggactccgacgtgtacatcaccgataagtgcgtgctggacatgcggagcatggacttcaagagcaactccgccgtggcctggtccaacaagtccgatttcgcctgcgccaacgccttcaacaacagcattatccccgaggacacattcttcccaagccccgagagcagctgcggctttaccagcgagagctaccagcagggcgtgctgagcgccaccatcctgtacgagatcctgctgggcaaggccaccctgtacgccgtgctggtgtctgccctggtgctgatggctatggtcaagcggaaggacagccgggga

SEQ ID NO: 38470 - DNA, 2016 bp, synthetic construct
  source 1..2016: mol_type = other DNA
atggccttaccagtgaccgccttgctcctgccgctggccttgctgctccacgccgccaggccggacatcgtgatgacacagagccctgatagcctggccgtgtctctgggagagagagccaccattaactgcaaggccagccagagcgtggactacgacggcgacagcttcctgaactggtatcagcagaagcccggccagcctcctaagctgctgatctacgccgccagcaatctggaaagcggcgtgccaagcagattttccggctctggcagcggcaccgatttcaccctgacaatatccagcctccagcctgaggacgtggccgtgtactactgccagcagagcaacgacgaccctctgacctttggacagggcaccaaggtggaaatcaaactcgagatccagaaccctgatcctgccgtgtaccagctgcgggatagcaagagcagcgacaagagcgtgtgtctgttcaccgacttcgacagccagaccaacgtgtcccagagcaaggactccgacgtgtacatcaccgataagtgcgtgctggacatgcggagcatggacttcaagagcaactccgccgtggcctggtccaacaagtccgatttcgcctgcgccaacgccttcaacaacagcattatccccgaggacacattcttcccaagccccgagagcagctgcggctttaccagcgagagctaccagcagggcgtgctgagcgccaccatcctgtacgagatcctgctgggcaaggccaccctgtacgccgtgctggtgtctgccctggtgctgatggctatggtcaagcggaaggacagccggggacgcgccaagagaagcggatctggcgtgaagcagaccctgaatttcgacctgctgaagctggctggcgacgtggaatccaacccaggccctactagtatggactggatttggcgcatccttttccttgtcggcgctgctaccggcgcccattccgggcccgaagttgctgccctcgagaaggaggtagcagctttggaaaaagaagtcgcagcccttgagaaagaagttgcggctctggagaagggatccggcggcggaggatctggcggaggcggatctgggggcggaggctctttcgaagaagtccaacttgtggagtctggagggggcctggtgcagcccggcggctctctcagactgtcttgtgcggcaagcggctacaccttcagctcttactggatagaatgggtgaggcaggcacctggaaagggactggagtggattggagagattctgccaggagggggagatacaaattacaatgaaatcttcaaggggcgggccaccttttcagcggataccagcaagaatacagcttacctgcagatgaatagcctccgggcagaagataccgctgtttattattgcacgagacgggtgccaataagactggactattgggggcaagggactcttgtcaccgtcagttcaacgcgtgaggacctgaagaacgtgttcccacctgaggtggccgtgttcgagcctagcgaggccgagatcagccacacccagaaagccaccctcgtgtgcctggctaccggcttctaccccgaccatgtggaactgtcttggtgggtcaacggcaaagaggtgcacagcggcgtgtgtaccgacccccagccactgaaagaacagcccgccctgaacgacagccggtactgcctgagcagcagactgagagtgtccgccaccttctggcagaacccccggaaccacttcagatgccaggtgcagttctacggcctgagcgagaacgacgagtggacccaggacagagccaagcccgtgacccagatcgtgtctgccgaagcctggggcagagccgattgcgacgtgaagctggtggaaaagagcttcgagacagacaccaacctgaacttccagaacctgagcgtgatcggcttcagaatcctgctgctgaaagtggccggctttaacctgctgatgaccctgcggctgtggtccagc

SEQ ID NO: 38471 - DNA, 2274 bp, synthetic construct
  source 1..2274: mol_type = other DNA
atggccttaccagtgaccgccttgctcctgccgctggccttgctgctccacgccgccaggccggacatcgtgatgacacagagccctgatagcctggccgtgtctctgggagagagagccaccattaactgcaaggccagccagagcgtggactacgacggcgacagcttcctgaactggtatcagcagaagcccggccagcctcctaagctgctgatctacgccgccagcaatctggaaagcggcgtgccaagcagattttccggctctggcagcggcaccgatttcaccctgacaatatccagcctccagcctgaggacgtggccgtgtactactgccagcagagcaacgacgaccctctgacctttggacagggcaccaaggtggaaatcaaactcgaggacctgaagaacgtgttcccacctgaggtggccgtgttcgagcctagcgaggccgagatcagccacacccagaaagccaccctcgtgtgcctggctaccggcttctaccccgaccatgtggaactgtcttggtgggtcaacggcaaagaggtgcacagcggcgtgtgtaccgacccccagccactgaaagaacagcccgccctgaacgacagccggtactgcctgagcagcagactgagagtgtccgccaccttctggcagaacccccggaaccacttcagatgccaggtgcagttctacggcctgagcgagaacgacgagtggacccaggacagagccaagcccgtgacccagatcgtgtctgccgaagcctggggcagagccgattgcgacgtgaagctggtggaaaagagcttcgagacagacaccaacctgaacttccagaacctgagcgtgatcggcttcagaatcctgctgctgaaagtggccggctttaacctgctgatgaccctgcggctgtggtccagcagggccaagcgatctggatctggagcaacaaacttctcactactcaaacaagcaggtgacgtggaggagaatcccgggcctactagtatggactggatttggcgcatccttttccttgtcggcgctgctaccggcgcccattccgggccccaggttcagctgcaagagtctggcggaggacttgctcaagctggcggaagcctgagactgtcttgtgccgcctctggcagaaccttcagcatgggctggtttagacaggcccctggcaaagagagagagttcgtcgccgccatcacatacagcggcggcagcccttactacgcctcttctgtcagaggccggttcaccatcagccgggacaacgccaagaacaccgtgtacctccagatgaacagcctgaagccagaggacaccgccgtgtactactgtgccgccaatccaacctacggcagcgactggaatgccgagaattggggccagggcacccaagtgacagtgtctagtggatccggcggcggaggatctggcggaggcggatctgggggcggaggctctttcgaagaagtccaacttgtggagtctggagggggcctggtgcagcccggcggctctctcagactgtcttgtgcggcaagcggctacaccttcagctcttactggatagaatgggtgaggcaggcacctggaaagggactggagtggattggagagattctgccaggagggggagatacaaattacaatgaaatcttcaaggggcgggccaccttttcagcggataccagcaagaatacagcttacctgcagatgaatagcctccgggcagaagataccgctgtttattattgcacgagacgggtgccaataagactggactattgggggcaagggactcttgtcaccgtcagttcaacgcgtatccagaaccctgatcctgccgtgtaccagctgcgggatagcaagagcagcgacaagagcgtgtgtctgttcaccgacttcgacagccagaccaacgtgtcccagagcaaggactccgacgtgtacatcaccgataagtgcgtgctggacatgcggagcatggacttcaagagcaactccgccgtggcctggtccaacaagtccgatttcgcctgcgccaacgccttcaacaacagcattatccccgaggacacattcttcccaagccccgagagcagctgcggctttaccagcgagagctaccagcagggcgtgctgagcgccaccatcctgtacgagatcctgctgggcaaggccaccctgtacgccgtgctggtgtctgccctggtgctgatggctatggtcaagcggaaggacagccgggga

SEQ ID NO: 38472 - DNA, 2286 bp, synthetic construct
  source 1..2286: mol_type = other DNA
atggccttaccagtgaccgccttgctcctgccgctggccttgctgctccacgccgccaggccggacatcgtgatgacacagagccctgatagcctggccgtgtctctgggagagagagccaccattaactgcaaggccagccagagcgtggactacgacggcgacagcttcctgaactggtatcagcagaagcccggccagcctcctaagctgctgatctacgccgccagcaatctggaaagcggcgtgccaagcagattttccggctctggcagcggcaccgatttcaccctgacaatatccagcctccagcctgaggacgtggccgtgtactactgccagcagagcaacgacgaccctctgacctttggacagggcaccaaggtggaaatcaaactcgagatccagaaccctgatcctgccgtgtaccagctgcgggatagcaagagcagcgacaagagcgtgtgtctgttcaccgacttcgacagccagaccaacgtgtcccagagcaaggactccgacgtgtacatcaccgataagtgcgtgctggacatgcggagcatggacttcaagagcaactccgccgtggcctggtccaacaagtccgatttcgcctgcgccaacgccttcaacaacagcattatccccgaggacacattcttcccaagccccgagagcagctgcggctttaccagcgagagctaccagcagggcgtgctgagcgccaccatcctgtacgagatcctgctgggcaaggccaccctgtacgccgtgctggtgtctgccctggtgctgatggctatggtcaagcggaaggacagccggggacgcgccaagagaagcggatctggcgtgaagcagaccctgaatttcgacctgctgaagctggctggcgacgtggaatccaacccaggccctactagtatggactggatttggcgcatccttttccttgtcggcgctgctaccggcgcccattccgggccccaggttcagctgcaagagtctggcggaggacttgctcaagctggcggaagcctgagactgtcttgtgccgcctctggcagaaccttcagcatgggctggtttagacaggcccctggcaaagagagagagttcgtcgccgccatcacatacagcggcggcagcccttactacgcctcttctgtcagaggccggttcaccatcagccgggacaacgccaagaacaccgtgtacctccagatgaacagcctgaagccagaggacaccgccgtgtactactgtgccgccaatccaacctacggcagcgactggaatgccgagaattggggccagggcacccaagtgacagtgtctagtggatccggcggcggaggatctggcggaggcggatctgggggcggaggctctttcgaagaagtccaacttgtggagtctggagggggcctggtgcagcccggcggctctctcagactgtcttgtgcggcaagcggctacaccttcagctcttactggatagaatgggtgaggcaggcacctggaaagggactggagtggattggagagattctgccaggagggggagatacaaattacaatgaaatcttcaaggggcgggccaccttttcagcggataccagcaagaatacagcttacctgcagatgaatagcctccgggcagaagataccgctgtttattattgcacgagacgggtgccaataagactggactattgggggcaagggactcttgtcaccgtcagttcaacgcgtgaggacctgaagaacgtgttcccacctgaggtggccgtgttcgagcctagcgaggccgagatcagccacacccagaaagccaccctcgtgtgcctggctaccggcttctaccccgaccatgtggaactgtcttggtgggtcaacggcaaagaggtgcacagcggcgtgtgtaccgacccccagccactgaaagaacagcccgccctgaacgacagccggtactgcctgagcagcagactgagagtgtccgccaccttctggcagaacccccggaaccacttcagatgccaggtgcagttctacggcctgagcgagaacgacgagtggacccaggacagagccaagcccgtgacccagatcgtgtctgccgaagcctggggcagagccgattgcgacgtgaagctggtggaaaagagcttcgagacagacaccaacctgaacttccagaacctgagcgtgatcggcttcagaatcctgctgctgaaagtggccggctttaacctgctgatgaccctgcggctgtggtccagc

SEQ ID NO: 38473 - DNA, 2292 bp, synthetic construct
  source 1..2292: mol_type = other DNA
atggccttaccagtgaccgccttgctcctgccgctggccttgctgctccacgccgccaggccggaagtgcaactggtggaatctggaggctctctggtgcagccagggggaagcctgagactgtcttgtgccgcttccggcttcaccttcgacgactacgccatgagctgggtgcgccaggtgccaggcaaaggcctggaatgggtgtccagcatcaactggagcggcacccacaccgattacgccgactccgtgaaaggcagattcacaatcagcagaaacaacgccaacaataccctgtacctgcagatgaactccctgaagtctgaggatacagcagtgtattattgcgccaagaactggcgggacgccggcaccacttggtttgagaaaagcggctctgccggacagggaacccaagtgacagtgtcctccggtaccggcggaggcggatctggcggcggaggtagcggtggcggaggatctgaattcgacatcgtgatgacacagagccctgatagcctggccgtgtctctgggagagagagccaccattaactgcaaggccagccagagcgtggactacgacggcgacagcttcctgaactggtatcagcagaagcccggccagcctcctaagctgctgatctacgccgccagcaatctggaaagcggcgtgccaagcagattttccggctctggcagcggcaccgatttcaccctgacaatatccagcctccagcctgaggacgtggccgtgtactactgccagcagagcaacgacgaccctctgacctttggacagggcaccaaggtggaaatcaaactcgaggacctgaagaacgtgttcccacctgaggtggccgtgttcgagcctagcgaggccgagatcagccacacccagaaagccaccctcgtgtgcctggctaccggcttctaccccgaccatgtggaactgtcttggtgggtcaacggcaaagaggtgcacagcggcgtgtgtaccgacccccagccactgaaagaacagcccgccctgaacgacagccggtactgcctgagcagcagactgagagtgtccgccaccttctggcagaacccccggaaccacttcagatgccaggtgcagttctacggcctgagcgagaacgacgagtggacccaggacagagccaagcccgtgacccagatcgtgtctgccgaagcctggggcagagccgattgcgacgtgaagctggtggaaaagagcttcgagacagacaccaacctgaacttccagaacctgagcgtgatcggcttcagaatcctgctgctgaaagtggccggctttaacctgctgatgaccctgcggctgtggtccagcagggccaagcgatctggatctggagcaacaaacttctcactactcaaacaagcaggtgacgtggaggagaatcccgggcctactagtatggactggatttggcgcatccttttccttgtcggcgctgctaccggcgcgcattccttcgaagaagtccaacttgtggagtctggagggggcctggtgcagcccggcggctctctcagactgtcttgtgcggcaagcggctacaccttcagctcttactggatagaatgggtgaggcaggcacctggaaagggactggagtggattggagagattctgccaggagggggagatacaaattacaatgaaatcttcaaggggcgggccaccttttcagcggataccagcaagaatacagcttacctgcagatgaatagcctccgggcagaagataccgctgtttattattgcacgagacgggtgccaataagactggactattgggggcaagggactcttgtcaccgtcagttcaacgcgtatccagaaccctgatcctgccgtgtaccagctgcgggatagcaagagcagcgacaagagcgtgtgtctgttcaccgacttcgacagccagaccaacgtgtcccagagcaaggactccgacgtgtacatcaccgataagtgcgtgctggacatgcggagcatggacttcaagagcaactccgccgtggcctggtccaacaagtccgatttcgcctgcgccaacgccttcaacaacagcattatccccgaggacacattcttcccaagccccgagagcagctgcggctttaccagcgagagctaccagcagggcgtgctgagcgccaccatcctgtacgagatcctgctgggcaaggccaccctgtacgccgtgctggtgtctgccctggtgctgatggctatggtcaagcggaaggacagccgggga

SEQ ID NO: 38474 - DNA, 2304 bp, synthetic construct
  source 1..2304: mol_type = other DNA
atggccttaccagtgaccgccttgctcctgccgctggccttgctgctccacgccgccaggccggaagtgcaactggtggaatctggaggctctctggtgcagccagggggaagcctgagactgtcttgtgccgcttccggcttcaccttcgacgactacgccatgagctgggtgcgccaggtgccaggcaaaggcctggaatgggtgtccagcatcaactggagcggcacccacaccgattacgccgactccgtgaaaggcagattcacaatcagcagaaacaacgccaacaataccctgtacctgcagatgaactccctgaagtctgaggatacagcagtgtattattgcgccaagaactggcgggacgccggcaccacttggtttgagaaaagcggctctgccggacagggaacccaagtgacagtgtcctccggtaccggcggaggcggatctggcggcggaggtagcggtggcggaggatctgaattcgacatcgtgatgacacagagccctgatagcctggccgtgtctctgggagagagagccaccattaactgcaaggccagccagagcgtggactacgacggcgacagcttcctgaactggtatcagcagaagcccggccagcctcctaagctgctgatctacgccgccagcaatctggaaagcggcgtgccaagcagattttccggctctggcagcggcaccgatttcaccctgacaatatccagcctccagcctgaggacgtggccgtgtactactgccagcagagcaacgacgaccctctgacctttggacagggcaccaaggtggaaatcaaactcgagatccagaaccctgatcctgccgtgtaccagctgcgggatagcaagagcagcgacaagagcgtgtgtctgttcaccgacttcgacagccagaccaacgtgtcccagagcaaggactccgacgtgtacatcaccgataagtgcgtgctggacatgcggagcatggacttcaagagcaactccgccgtggcctggtccaacaagtccgatttcgcctgcgccaacgccttcaacaacagcattatccccgaggacacattcttcccaagccccgagagcagctgcggctttaccagcgagagctaccagcagggcgtgctgagcgccaccatcctgtacgagatcctgctgggcaaggccaccctgtacgccgtgctggtgtctgccctggtgctgatggctatggtcaagcggaaggacagccggggacgcgccaagagaagcggatctggcgtgaagcagaccctgaatttcgacctgctgaagctggctggcgacgtggaatccaacccaggccctactagtatggactggatttggcgcatccttttccttgtcggcgctgctaccggcgcgcattccttcgaagaagtccaacttgtggagtctggagggggcctggtgcagcccggcggctctctcagactgtcttgtgcggcaagcggctacaccttcagctcttactggatagaatgggtgaggcaggcacctggaaagggactggagtggattggagagattctgccaggagggggagatacaaattacaatgaaatcttcaaggggcgggccaccttttcagcggataccagcaagaatacagcttacctgcagatgaatagcctccgggcagaagataccgctgtttattattgcacgagacgggtgccaataagactggactattgggggcaagggactcttgtcaccgtcagttcaacgcgtgaggacctgaagaacgtgttcccacctgaggtggccgtgttcgagcctagcgaggccgagatcagccacacccagaaagccaccctcgtgtgcctggctaccggcttctaccccgaccatgtggaactgtcttggtgggtcaacggcaaagaggtgcacagcggcgtgtgtaccgacccccagccactgaaagaacagcccgccctgaacgacagccggtactgcctgagcagcagactgagagtgtccgccaccttctggcagaacccccggaaccacttcagatgccaggtgcagttctacggcctgagcgagaacgacgagtggacccaggacagagccaagcccgtgacccagatcgtgtctgccgaagcctggggcagagccgattgcgacgtgaagctggtggaaaagagcttcgagacagacaccaacctgaacttccagaacctgagcgtgatcggcttcagaatcctgctgctgaaagtggccggctttaacctgctgatgaccctgcggctgtggtccagc

SEQ ID NO: 38475 - DNA, 2286 bp, synthetic construct
  source 1..2286: mol_type = other DNA
atggccttaccagtgaccgccttgctcctgccgctggccttgctgctccacgccgccaggccggaagttcagctgcttgagtctggcggaggactggttcaacctggcggaagcctgagactgtcttgtgccgccagcggcttcatcttcagcagctacgccatgagctgggtccgacaggctcctggaaagggccaagaatgggtttccggcgttagcggcacaggcgtgaacacctactacgccgatagcgtgaagggcagattcaccatcagccgggacaacagcaagaacaccctgtacctccagatgaacagcctgagagccgaggacaccgccgtgtactattgtgcctctggcaaaggctgggacagcggctcttggtacgaggactatagaggccagggcaccctggtcacagtttcttcaggtaccggcggaggcggatctggcggcggaggtagcggtggcggaggatctgaattcgacatcgtgatgacacagagccctgatagcctggccgtgtctctgggagagagagccaccattaactgcaaggccagccagagcgtggactacgacggcgacagcttcctgaactggtatcagcagaagcccggccagcctcctaagctgctgatctacgccgccagcaatctggaaagcggcgtgccaagcagattttccggctctggcagcggcaccgatttcaccctgacaatatccagcctccagcctgaggacgtggccgtgtactactgccagcagagcaacgacgaccctctgacctttggacagggcaccaaggtggaaatcaaactcgaggacctgaagaacgtgttcccacctgaggtggccgtgttcgagcctagcgaggccgagatcagccacacccagaaagccaccctcgtgtgcctggctaccggcttctaccccgaccatgtggaactgtcttggtgggtcaacggcaaagaggtgcacagcggcgtgtgtaccgacccccagccactgaaagaacagcccgccctgaacgacagccggtactgcctgagcagcagactgagagtgtccgccaccttctggcagaacccccggaaccacttcagatgccaggtgcagttctacggcctgagcgagaacgacgagtggacccaggacagagccaagcccgtgacccagatcgtgtctgccgaagcctggggcagagccgattgcgacgtgaagctggtggaaaagagcttcgagacagacaccaacctgaacttccagaacctgagcgtgatcggcttcagaatcctgctgctgaaagtggccggctttaacctgctgatgaccctgcggctgtggtccagcagggccaagcgatctggatctggagcaacaaacttctcactactcaaacaagcaggtgacgtggaggagaatcccgggcctactagtatggactggatttggcgcatccttttccttgtcggcgctgctaccggcgcgcattccttcgaagaagtccaacttgtggagtctggagggggcctggtgcagcccggcggctctctcagactgtcttgtgcggcaagcggctacaccttcagctcttactggatagaatgggtgaggcaggcacctggaaagggactggagtggattggagagattctgccaggagggggagatacaaattacaatgaaatcttcaaggggcgggccaccttttcagcggataccagcaagaatacagcttacctgcagatgaatagcctccgggcagaagataccgctgtttattattgcacgagacgggtgccaataagactggactattgggggcaagggactcttgtcaccgtcagttcaacgcgtatccagaaccctgatcctgccgtgtaccagctgcgggatagcaagagcagcgacaagagcgtgtgtctgttcaccgacttcgacagccagaccaacgtgtcccagagcaaggactccgacgtgtacatcaccgataagtgcgtgctggacatgcggagcatggacttcaagagcaactccgccgtggcctggtccaacaagtccgatttcgcctgcgccaacgccttcaacaacagcattatccccgaggacacattcttcccaagccccgagagcagctgcggctttaccagcgagagctaccagcagggcgtgctgagcgccaccatcctgtacgagatcctgctgggcaaggccaccctgtacgccgtgctggtgtctgccctggtgctgatggctatggtcaagcggaaggacagccgggga

SEQ ID NO: 38476 - DNA, 2298 bp, synthetic construct
  source 1..2298: mol_type = other DNA
atggccttaccagtgaccgccttgctcctgccgctggccttgctgctccacgccgccaggccggaagttcagctgcttgagtctggcggaggactggttcaacctggcggaagcctgagactgtcttgtgccgccagcggcttcatcttcagcagctacgccatgagctgggtccgacaggctcctggaaagggccaagaatgggtttccggcgttagcggcacaggcgtgaacacctactacgccgatagcgtgaagggcagattcaccatcagccgggacaacagcaagaacaccctgtacctccagatgaacagcctgagagccgaggacaccgccgtgtactattgtgcctctggcaaaggctgggacagcggctcttggtacgaggactatagaggccagggcaccctggtcacagtttcttcaggtaccggcggaggcggatctggcggcggaggtagcggtggcggaggatctgaattcgacatcgtgatgacacagagccctgatagcctggccgtgtctctgggagagagagccaccattaactgcaaggccagccagagcgtggactacgacggcgacagcttcctgaactggtatcagcagaagcccggccagcctcctaagctgctgatctacgccgccagcaatctggaaagcggcgtgccaagcagattttccggctctggcagcggcaccgatttcaccctgacaatatccagcctccagcctgaggacgtggccgtgtactactgccagcagagcaacgacgaccctctgacctttggacagggcaccaaggtggaaatcaaactcgagatccagaaccctgatcctgccgtgtaccagctgcgggatagcaagagcagcgacaagagcgtgtgtctgttcaccgacttcgacagccagaccaacgtgtcccagagcaaggactccgacgtgtacatcaccgataagtgcgtgctggacatgcggagcatggacttcaagagcaactccgccgtggcctggtccaacaagtccgatttcgcctgcgccaacgccttcaacaacagcattatccccgaggacacattcttcccaagccccgagagcagctgcggctttaccagcgagagctaccagcagggcgtgctgagcgccaccatcctgtacgagatcctgctgggcaaggccaccctgtacgccgtgctggtgtctgccctggtgctgatggctatggtcaagcggaaggacagccggggacgcgccaagagaagcggatctggcgtgaagcagaccctgaatttcgacctgctgaagctggctggcgacgtggaatccaacccaggccctactagtatggactggatttggcgcatccttttccttgtcggcgctgctaccggcgcgcattccttcgaagaagtccaacttgtggagtctggagggggcctggtgcagcccggcggctctctcagactgtcttgtgcggcaagcggctacaccttcagctcttactggatagaatgggtgaggcaggcacctggaaagggactggagtggattggagagattctgccaggagggggagatacaaattacaatgaaatcttcaaggggcgggccaccttttcagcggataccagcaagaatacagcttacctgcagatgaatagcctccgggcagaagataccgctgtttattattgcacgagacgggtgccaataagactggactattgggggcaagggactcttgtcaccgtcagttcaacgcgtgaggacctgaagaacgtgttcccacctgaggtggccgtgttcgagcctagcgaggccgagatcagccacacccagaaagccaccctcgtgtgcctggctaccggcttctaccccgaccatgtggaactgtcttggtgggtcaacggcaaagaggtgcacagcggcgtgtgtaccgacccccagccactgaaagaacagcccgccctgaacgacagccggtactgcctgagcagcagactgagagtgtccgccaccttctggcagaacccccggaaccacttcagatgccaggtgcagttctacggcctgagcgagaacgacgagtggacccaggacagagccaagcccgtgacccagatcgtgtctgccgaagcctggggcagagccgattgcgacgtgaagctggtggaaaagagcttcgagacagacaccaacctgaacttccagaacctgagcgtgatcggcttcagaatcctgctgctgaaagtggccggctttaacctgctgatgaccctgcggctgtggtccagc

SEQ ID NO: 38477 - DNA, 2190 bp, synthetic construct
  source 1..2190: mol_type = other DNA
atggccttaccagtgaccgccttgctcctgccgctggccttgctgctccacgccgccaggccgatgctgcccgctcctaagaatctggtggtgtccagaatcaccgaggacagcgccagactgtcttggacagctcctgatgccgccttcgacagcttccccatccggtacatcgagacactgatctggggcgaagccatctggctggatgtgcctggaagcgagagaagctacgacctgaccggactgaagcctggcacagagtatgccgtggtcatcaccggcgtgaaaggcggcagattctctagccctctggtggcctctttcaccaccggtaccggcggaggcggatctggcggcggaggtagcggtggcggaggatctgaattcgacatcgtgatgacacagagccctgatagcctggccgtgtctctgggagagagagccaccattaactgcaaggccagccagagcgtggactacgacggcgacagcttcctgaactggtatcagcagaagcccggccagcctcctaagctgctgatctacgccgccagcaatctggaaagcggcgtgccaagcagattttccggctctggcagcggcaccgatttcaccctgacaatatccagcctccagcctgaggacgtggccgtgtactactgccagcagagcaacgacgaccctctgacctttggacagggcaccaaggtggaaatcaaactcgaggacctgaagaacgtgttcccacctgaggtggccgtgttcgagcctagcgaggccgagatcagccacacccagaaagccaccctcgtgtgcctggctaccggcttctaccccgaccatgtggaactgtcttggtgggtcaacggcaaagaggtgcacagcggcgtgtgtaccgacccccagccactgaaagaacagcccgccctgaacgacagccggtactgcctgagcagcagactgagagtgtccgccaccttctggcagaacccccggaaccacttcagatgccaggtgcagttctacggcctgagcgagaacgacgagtggacccaggacagagccaagcccgtgacccagatcgtgtctgccgaagcctggggcagagccgattgcgacgtgaagctggtggaaaagagcttcgagacagacaccaacctgaacttccagaacctgagcgtgatcggcttcagaatcctgctgctgaaagtggccggctttaacctgctgatgaccctgcggctgtggtccagcagggccaagcgatctggatctggagcaacaaacttctcactactcaaacaagcaggtgacgtggaggagaatcccgggcctactagtatggactggatttggcgcatccttttccttgtcggcgctgctaccggcgcgcattccttcgaagaagtccaacttgtggagtctggagggggcctggtgcagcccggcggctctctcagactgtcttgtgcggcaagcggctacaccttcagctcttactggatagaatgggtgaggcaggcacctggaaagggactggagtggattggagagattctgccaggagggggagatacaaattacaatgaaatcttcaaggggcgggccaccttttcagcggataccagcaagaatacagcttacctgcagatgaatagcctccgggcagaagataccgctgtttattattgcacgagacgggtgccaataagactggactattgggggcaagggactcttgtcaccgtcagttcaacgcgtatccagaaccctgatcctgccgtgtaccagctgcgggatagcaagagcagcgacaagagcgtgtgtctgttcaccgacttcgacagccagaccaacgtgtcccagagcaaggactccgacgtgtacatcaccgataagtgcgtgctggacatgcggagcatggacttcaagagcaactccgccgtggcctggtccaacaagtccgatttcgcctgcgccaacgccttcaacaacagcattatccccgaggacacattcttcccaagccccgagagcagctgcggctttaccagcgagagctaccagcagggcgtgctgagcgccaccatcctgtacgagatcctgctgggcaaggccaccctgtacgccgtgctggtgtctgccctggtgctgatggctatggtcaagcggaaggacagccgggga

SEQ ID NO: 38478 - DNA, 2202 bp, synthetic construct
  source 1..2202: mol_type = other DNA
atggccttaccagtgaccgccttgctcctgccgctggccttgctgctccacgccgccaggccgatgctgcccgctcctaagaatctggtggtgtccagaatcaccgaggacagcgccagactgtcttggacagctcctgatgccgccttcgacagcttccccatccggtacatcgagacactgatctggggcgaagccatctggctggatgtgcctggaagcgagagaagctacgacctgaccggactgaagcctggcacagagtatgccgtggtcatcaccggcgtgaaaggcggcagattctctagccctctggtggcctctttcaccaccggtaccggcggaggcggatctggcggcggaggtagcggtggcggaggatctgaattcgacatcgtgatgacacagagccctgatagcctggccgtgtctctgggagagagagccaccattaactgcaaggccagccagagcgtggactacgacggcgacagcttcctgaactggtatcagcagaagcccggccagcctcctaagctgctgatctacgccgccagcaatctggaaagcggcgtgccaagcagattttccggctctggcagcggcaccgatttcaccctgacaatatccagcctccagcctgaggacgtggccgtgtactactgccagcagagcaacgacgaccctctgacctttggacagggcaccaaggtggaaatcaaactcgagatccagaaccctgatcctgccgtgtaccagctgcgggatagcaagagcagcgacaagagcgtgtgtctgttcaccgacttcgacagccagaccaacgtgtcccagagcaaggactccgacgtgtacatcaccgataagtgcgtgctggacatgcggagcatggacttcaagagcaactccgccgtggcctggtccaacaagtccgatttcgcctgcgccaacgccttcaacaacagcattatccccgaggacacattcttcccaagccccgagagcagctgcggctttaccagcgagagctaccagcagggcgtgctgagcgccaccatcctgtacgagatcctgctgggcaaggccaccctgtacgccgtgctggtgtctgccctggtgctgatggctatggtcaagcggaaggacagccggggacgcgccaagagaagcggatctggcgtgaagcagaccctgaatttcgacctgctgaagctggctggcgacgtggaatccaacccaggccctactagtatggactggatttggcgcatccttttccttgtcggcgctgctaccggcgcgcattccttcgaagaagtccaacttgtggagtctggagggggcctggtgcagcccggcggctctctcagactgtcttgtgcggcaagcggctacaccttcagctcttactggatagaatgggtgaggcaggcacctggaaagggactggagtggattggagagattctgccaggagggggagatacaaattacaatgaaatcttcaaggggcgggccaccttttcagcggataccagcaagaatacagcttacctgcagatgaatagcctccgggcagaagataccgctgtttattattgcacgagacgggtgccaataagactggactattgggggcaagggactcttgtcaccgtcagttcaacgcgtgaggacctgaagaacgtgttcccacctgaggtggccgtgttcgagcctagcgaggccgagatcagccacacccagaaagccaccctcgtgtgcctggctaccggcttctaccccgaccatgtggaactgtcttggtgggtcaacggcaaagaggtgcacagcggcgtgtgtaccgacccccagccactgaaagaacagcccgccctgaacgacagccggtactgcctgagcagcagactgagagtgtccgccaccttctggcagaacccccggaaccacttcagatgccaggtgcagttctacggcctgagcgagaacgacgagtggacccaggacagagccaagcccgtgacccagatcgtgtctgccgaagcctggggcagagccgattgcgacgtgaagctggtggaaaagagcttcgagacagacaccaacctgaacttccagaacctgagcgtgatcggcttcagaatcctgctgctgaaagtggccggctttaacctgctgatgaccctgcggctgtggtccagc

SEQ ID NO: 38479 - DNA, 2277 bp, synthetic construct
  source 1..2277: mol_type = other DNA
atggccttaccagtgaccgccttgctcctgccgctggccttgctgctccacgccgccaggccggaggtgcagctggttgaatctggcggaggactggttcagcctggcggatctctgagactgtcttgtgccgccagcggcttcaacatcaaggatacctgtatcggctgggttcgcagagcccctggcaaagaggaagaactggtcgccaaaatctgcaagtacagcggccacaccagatacgccgacagcgtgaagggcagattcaccatcagcgccgacaccagcaagaacaccgcctacctccagatgaacagcctgagagccgaggacaccgccgtgtactattgtgccgctgtgtccgtcagagatgggcactacaattactggggccagggcaccaccgtgaccgtttcttcaggtaccggcggaggcggatctggcggcggaggtagcggtggcggaggatctgaattcgacatcgtgatgacacagagccctgatagcctggccgtgtctctgggagagagagccaccattaactgcaaggccagccagagcgtggactacgacggcgacagcttcctgaactggtatcagcagaagcccggccagcctcctaagctgctgatctacgccgccagcaatctggaaagcggcgtgccaagcagattttccggctctggcagcggcaccgatttcaccctgacaatatccagcctccagcctgaggacgtggccgtgtactactgccagcagagcaacgacgaccctctgacctttggacagggcaccaaggtggaaatcaaactcgaggacctgaagaacgtgttcccacctgaggtggccgtgttcgagcctagcgaggccgagatcagccacacccagaaagccaccctcgtgtgcctggctaccggcttctaccccgaccatgtggaactgtcttggtgggtcaacggcaaagaggtgcacagcggcgtgtgtaccgacccccagccactgaaagaacagcccgccctgaacgacagccggtactgcctgagcagcagactgagagtgtccgccaccttctggcagaacccccggaaccacttcagatgccaggtgcagttctacggcctgagcgagaacgacgagtggacccaggacagagccaagcccgtgacccagatcgtgtctgccgaagcctggggcagagccgattgcgacgtgaagctggtggaaaagagcttcgagacagacaccaacctgaacttccagaacctgagcgtgatcggcttcagaatcctgctgctgaaagtggccggctttaacctgctgatgaccctgcggctgtggtccagcagggccaagcgatctggatctggagcaacaaacttctcactactcaaacaagcaggtgacgtggaggagaatcccgggcctactagtatggactggatttggcgcatccttttccttgtcggcgctgctaccggcgcgcattccttcgaagaagtccaacttgtggagtctggagggggcctggtgcagcccggcggctctctcagactgtcttgtgcggcaagcggctacaccttcagctcttactggatagaatgggtgaggcaggcacctggaaagggactggagtggattggagagattctgccaggagggggagatacaaattacaatgaaatcttcaaggggcgggccaccttttcagcggataccagcaagaatacagcttacctgcagatgaatagcctccgggcagaagataccgctgtttattattgcacgagacgggtgccaataagactggactattgggggcaagggactcttgtcaccgtcagttcaacgcgtatccagaaccctgatcctgccgtgtaccagctgcgggatagcaagagcagcgacaagagcgtgtgtctgttcaccgacttcgacagccagaccaacgtgtcccagagcaaggactccgacgtgtacatcaccgataagtgcgtgctggacatgcggagcatggacttcaagagcaactccgccgtggcctggtccaacaagtccgatttcgcctgcgccaacgccttcaacaacagcattatccccgaggacacattcttcccaagccccgagagcagctgcggctttaccagcgagagctaccagcagggcgtgctgagcgccaccatcctgtacgagatcctgctgggcaaggccaccctgtacgccgtgctggtgtctgccctggtgctgatggctatggtcaagcggaaggacagccgggga

SEQ ID NO: 38480 - DNA, 2289 bp, synthetic construct
  source 1..2289: mol_type = other DNA
atggccttaccagtgaccgccttgctcctgccgctggccttgctgctccacgccgccaggccggaggtgcagctggttgaatctggcggaggactggttcagcctggcggatctctgagactgtcttgtgccgccagcggcttcaacatcaaggatacctgtatcggctgggttcgcagagcccctggcaaagaggaagaactggtcgccaaaatctgcaagtacagcggccacaccagatacgccgacagcgtgaagggcagattcaccatcagcgccgacaccagcaagaacaccgcctacctccagatgaacagcctgagagccgaggacaccgccgtgtactattgtgccgctgtgtccgtcagagatgggcactacaattactggggccagggcaccaccgtgaccgtttcttcaggtaccggcggaggcggatctggcggcggaggtagcggtggcggaggatctgaattcgacatcgtgatgacacagagccctgatagcctggccgtgtctctgggagagagagccaccattaactgcaaggccagccagagcgtggactacgacggcgacagcttcctgaactggtatcagcagaagcccggccagcctcctaagctgctgatctacgccgccagcaatctggaaagcggcgtgccaagcagattttccggctctggcagcggcaccgatttcaccctgacaatatccagcctccagcctgaggacgtggccgtgtactactgccagcagagcaacgacgaccctctgacctttggacagggcaccaaggtggaaatcaaactcgagatccagaaccctgatcctgccgtgtaccagctgcgggatagcaagagcagcgacaagagcgtgtgtctgttcaccgacttcgacagccagaccaacgtgtcccagagcaaggactccgacgtgtacatcaccgataagtgcgtgctggacatgcggagcatggacttcaagagcaactccgccgtggcctggtccaacaagtccgatttcgcctgcgccaacgccttcaacaacagcattatccccgaggacacattcttcccaagccccgagagcagctgcggctttaccagcgagagctaccagcagggcgtgctgagcgccaccatcctgtacgagatcctgctgggcaaggccaccctgtacgccgtgctggtgtctgccctggtgctgatggctatggtcaagcggaaggacagccggggacgcgccaagagaagcggatctggcgtgaagcagaccctgaatttcgacctgctgaagctggctggcgacgtggaatccaacccaggccctactagtatggactggatttggcgcatccttttccttgtcggcgctgctaccggcgcgcattccttcgaagaagtccaacttgtggagtctggagggggcctggtgcagcccggcggctctctcagactgtcttgtgcggcaagcggctacaccttcagctcttactggatagaatgggtgaggcaggcacctggaaagggactggagtggattggagagattctgccaggagggggagatacaaattacaatgaaatcttcaaggggcgggccaccttttcagcggataccagcaagaatacagcttacctgcagatgaatagcctccgggcagaagataccgctgtttattattgcacgagacgggtgccaataagactggactattgggggcaagggactcttgtcaccgtcagttcaacgcgtgaggacctgaagaacgtgttcccacctgaggtggccgtgttcgagcctagcgaggccgagatcagccacacccagaaagccaccctcgtgtgcctggctaccggcttctaccccgaccatgtggaactgtcttggtgggtcaacggcaaagaggtgcacagcggcgtgtgtaccgacccccagccactgaaagaacagcccgccctgaacgacagccggtactgcctgagcagcagactgagagtgtccgccaccttctggcagaacccccggaaccacttcagatgccaggtgcagttctacggcctgagcgagaacgacgagtggacccaggacagagccaagcccgtgacccagatcgtgtctgccgaagcctggggcagagccgattgcgacgtgaagctggtggaaaagagcttcgagacagacaccaacctgaacttccagaacctgagcgtgatcggcttcagaatcctgctgctgaaagtggccggctttaacctgctgatgaccctgcggctgtggtccagc

SEQ ID NO: 38481 - DNA, 3393 bp, synthetic construct
  source 1..3393: mol_type = other DNA
atggccttaccagtgaccgccttgctcctgccgctggccttgctgctccacgccgccaggccggaagtgcagctggttgaatctggcggaggactggttcaggctggcggatctctgagactgtcttgtgccgccagcggcagaacctttagcatgggctggtttagacaggcccctggcaaagagagagagttcgtcgccgccatcacatactctggcggcagcccttactacgccgactctgtgaagggcagattcaccatcagccgggacaacgccaagaacaccgtgtacctccagatgaacagcctgaagcctgaggacaccgccgtgtactactgcgccgccaatccaacatacggcagcgactggaacgccgagaattggggccagggaacccaagtgacagtgtctagcggtaccggcggaggcggatctggcggcggaggtagcggtggcggaggatctgaattcgacatcgtgatgacacagagccctgatagcctggccgtgtctctgggagagagagccaccattaactgcaaggccagccagagcgtggactacgacggcgacagcttcctgaactggtatcagcagaagcccggccagcctcctaagctgctgatctacgccgccagcaatctggaaagcggcgtgccaagcagattttccggctctggcagcggcaccgatttcaccctgacaatatccagcctccagcctgaggacgtggccgtgtactactgccagcagagcaacgacgaccctctgacctttggacagggcaccaaggtggaaatcaaactcgaggacctgaagaacgtgttcccacctgaggtggccgtgttcgagcctagcgaggccgagatcagccacacccagaaagccaccctcgtgtgcctggctaccggcttctaccccgaccatgtggaactgtcttggtgggtcaacggcaaagaggtgcacagcggcgtgtgtaccgacccccagccactgaaagaacagcccgccctgaacgacagccggtactgcctgagcagcagactgagagtgtccgccaccttctggcagaacccccggaaccacttcagatgccaggtgcagttctacggcctgagcgagaacgacgagtggacccaggacagagccaagcccgtgacccagatcgtgtctgccgaagcctggggcagagccgattgcgacgtgaagctggtggaaaagagcttcgagacagacaccaacctgaacttccagaacctgagcgtgatcggcttcagaatcctgctgctgaaagtggccggctttaacctgctgatgaccctgcggctgtggtccagcagggccaagcgatctggatctggagcaacaaacttctcactactcaaacaagcaggtgacgtggaggagaatcccgggcctactagtgccaccatggactggatttggcgcatccttttccttgtcggcgctgctaccggcgcccattccgggcccgaagtgcaactggttgaatccggtggcggcctggtgcaagcaggcggatctctcagacttagctgtgccgcctccggcagaaccttcacaatgggatggtttaggcaggctccagggaaagagagagagttcgtcgccgccatctctctgtctcccacactggcctactacgccgactctgtgaaaggccggttcaccatctccagagataatgccaagaacaccgtggtgctgcaaatgaactctctgaaacccgaggatacagccctgtactattgtgccgctgaccggaagtccgtgatgagcatcagacccgattactggggacagggcacacaagtcacagtgtcctctggatccggcggcggaggatctggcggaggcggatctgggggcggaggctctttcgaagaagtccaacttgtggagtctggagggggcctggtgcagcccggcggctctctcagactgtcttgtgcggcaagcggctacaccttcagctcttactggatagaatgggtgaggcaggcacctggaaagggactggagtggattggagagattctgccaggagggggagatacaaattacaatgaaatcttcaaggggcgggccaccttttcagcggataccagcaagaatacagcttacctgcagatgaatagcctccgggcagaagataccgctgtttattattgcacgagacgggtgccaataagactggactattgggggcaagggactcttgtcaccgtcagttcaacgcgtatccagaaccctgatcctgccgtgtaccagctgcgggatagcaagagcagcgacaagagcgtgtgtctgttcaccgacttcgacagccagaccaacgtgtcccagagcaaggactccgacgtgtacatcaccgataagtgcgtgctggacatgcggagcatggacttcaagagcaactccgccgtggcctggtccaacaagtccgatttcgcctgcgccaacgccttcaacaacagcattatccccgaggacacattcttcccaagccccgagagcagctgcggctttaccagcgagagctaccagcagggcgtgctgagcgccaccatcctgtacgagatcctgctgggcaaggccaccctgtacgccgtgctggtgtctgccctggtgctgatggctatggtcaagcggaaggacagccggggacgcgccaagagaagcggatctggcgtgaagcagaccctgaatttcgacctgctgaagctggctggcgacgtggaatccaacccaggcccttctagaggccatatgaccgagtacaagcccacggtgcgcctcgccacccgcgacgacgtccccagggccgtacgcaccctcgccgccgcgttcgccgactaccccgccacgcgccacaccgtcgatccggaccgccacatcgagcgggtcaccgagctgcaagaactcttcctcacgcgcgtcgggctcgacatcggcaaggtgtgggtcgcggacgacggcgccgcggtggcggtctggaccacgccggagagcgtcgaagcgggggcggtgttcgccgagatcggcccgcgcatggccgagttgagcggttcccggctggccgcgcagcaacagatggaaggcctcctggcgccgcaccggcccaaggagcccgcgtggttcctggccaccgtcggcgtctcgcccgaccaccagggcaagggtctgggcagcgccgtcgtgctccccggagtggaggcggccgagcgcgccggggtgcccgccttcctggagacctccgcgccccgcaacctccccttctacgagcggctcggcttcaccgtcaccgccgacgtcgaggtgcccgaaggaccgcgcacctggtgcatgacccgcaagcccggtgcctga

SEQ ID NO: 38482 - DNA, 2307 bp, synthetic construct
  source 1..2307: mol_type = other DNA
atggccttaccagtgaccgccttgctcctgccgctggccttgctgctccacgccgccaggccggaagtgcagctggttgaatctggcggaggactggttcagcctggcggatctctgagactgtcttgtgccgcctctggcttcgccagcgactactatatcatcggctggttcagacaggcccctggcaaagagagagagggcgtcagctgtatcagcagcagatacgccaacaccaactacgccgacagcgtgaagggcagattcaccatcagccgggacaacgccaagaacaccgtgtacctccagatgaacagcctgaagcctgaggacaccgccgtgtactactgtgccgccgacaccagaagatacacctgtcctgacattgccaccatgcaccggaacttcgattcttggggccagggcacactggtcaccgtttcttctggtaccggcggaggcggatctggcggcggaggtagcggtggcggaggatctgaattcgacatcgtgatgacacagagccctgatagcctggccgtgtctctgggagagagagccaccattaactgcaaggccagccagagcgtggactacgacggcgacagcttcctgaactggtatcagcagaagcccggccagcctcctaagctgctgatctacgccgccagcaatctggaaagcggcgtgccaagcagattttccggctctggcagcggcaccgatttcaccctgacaatatccagcctccagcctgaggacgtggccgtgtactactgccagcagagcaacgacgaccctctgacctttggacagggcaccaaggtggaaatcaaactcgaggacctgaagaacgtgttcccacctgaggtggccgtgttcgagcctagcgaggccgagatcagccacacccagaaagccaccctcgtgtgcctggctaccggcttctaccccgaccatgtggaactgtcttggtgggtcaacggcaaagaggtgcacagcggcgtgtgtaccgacccccagccactgaaagaacagcccgccctgaacgacagccggtactgcctgagcagcagactgagagtgtccgccaccttctggcagaacccccggaaccacttcagatgccaggtgcagttctacggcctgagcgagaacgacgagtggacccaggacagagccaagcccgtgacccagatcgtgtctgccgaagcctggggcagagccgattgcgacgtgaagctggtggaaaagagcttcgagacagacaccaacctgaacttccagaacctgagcgtgatcggcttcagaatcctgctgctgaaagtggccggctttaacctgctgatgaccctgcggctgtggtccagcagggccaagcgatctggatctggagcaacaaacttctcactactcaaacaagcaggtgacgtggaggagaatcccgggcctactagtatggactggatttggcgcatccttttccttgtcggcgctgctaccggcgcgcattccttcgaagaagtccaacttgtggagtctggagggggcctggtgcagcccggcggctctctcagactgtcttgtgcggcaagcggctacaccttcagctcttactggatagaatgggtgaggcaggcacctggaaagggactggagtggattggagagattctgccaggagggggagatacaaattacaatgaaatcttcaaggggcgggccaccttttcagcggataccagcaagaatacagcttacctgcagatgaatagcctccgggcagaagataccgctgtttattattgcacgagacgggtgccaataagactggactattgggggcaagggactcttgtcaccgtcagttcaacgcgtatccagaaccctgatcctgccgtgtaccagctgcgggatagcaagagcagcgacaagagcgtgtgtctgttcaccgacttcgacagccagaccaacgtgtcccagagcaaggactccgacgtgtacatcaccgataagtgcgtgctggacatgcggagcatggacttcaagagcaactccgccgtggcctggtccaacaagtccgatttcgcctgcgccaacgccttcaacaacagcattatccccgaggacacattcttcccaagccccgagagcagctgcggctttaccagcgagagctaccagcagggcgtgctgagcgccaccatcctgtacgagatcctgctgggcaaggccaccctgtacgccgtgctggtgtctgccctggtgctgatggctatggtcaagcggaaggacagccggggataa

SEQ ID NO: 38483 - DNA, 2307 bp, synthetic construct
  source 1..2307: mol_type = other DNA
atggccttaccagtgaccgccttgctcctgccgctggccttgctgctccacgccgccaggccggaagtgcagctggttgaatctggcggaggactggttcagcctggcggatctctgagactgagctgtgaagccagcggcttcgccagcgacgattacatcatcggctggttcagacaggcccctggcaaagagagagagggcgtcagctgcatcagctctaagtacgccaacaccgtgtacaccgacagcgtgaagggcagattcagactgagcagaggcaccgccaagaataccgtgtacctccagatgagcgccctgaagcctgaggataccgccgtgtactactgcgctatggacagccgcagagtgacatgccctgagatcagcaccatgcaccggaacttcgattcttggggccagggcacactggtcacagtgtcatctggtaccggcggaggcggatctggcggcggaggtagcggtggcggaggatctgaattcgacatcgtgatgacacagagccctgatagcctggccgtgtctctgggagagagagccaccattaactgcaaggccagccagagcgtggactacgacggcgacagcttcctgaactggtatcagcagaagcccggccagcctcctaagctgctgatctacgccgccagcaatctggaaagcggcgtgccaagcagattttccggctctggcagcggcaccgatttcaccctgacaatatccagcctccagcctgaggacgtggccgtgtactactgccagcagagcaacgacgaccctctgacctttggacagggcaccaaggtggaaatcaaactcgaggacctgaagaacgtgttcccacctgaggtggccgtgttcgagcctagcgaggccgagatcagccacacccagaaagccaccctcgtgtgcctggctaccggcttctaccccgaccatgtggaactgtcttggtgggtcaacggcaaagaggtgcacagcggcgtgtgtaccgacccccagccactgaaagaacagcccgccctgaacgacagccggtactgcctgagcagcagactgagagtgtccgccaccttctggcagaacccccggaaccacttcagatgccaggtgcagttctacggcctgagcgagaacgacgagtggacccaggacagagccaagcccgtgacccagatcgtgtctgccgaagcctggggcagagccgattgcgacgtgaagctggtggaaaagagcttcgagacagacaccaacctgaacttccagaacctgagcgtgatcggcttcagaatcctgctgctgaaagtggccggctttaacctgctgatgaccctgcggctgtggtccagcagggccaagcgatctggatctggagcaacaaacttctcactactcaaacaagcaggtgacgtggaggagaatcccgggcctactagtatggactggatttggcgcatccttttccttgtcggcgctgctaccggcgcgcattccttcgaagaagtccaacttgtggagtctggagggggcctggtgcagcccggcggctctctcagactgtcttgtgcggcaagcggctacaccttcagctcttactggatagaatgggtgaggcaggcacctggaaagggactggagtggattggagagattctgccaggagggggagatacaaattacaatgaaatcttcaaggggcgggccaccttttcagcggataccagcaagaatacagcttacctgcagatgaatagcctccgggcagaagataccgctgtttattattgcacgagacgggtgccaataagactggactattgggggcaagggactcttgtcaccgtcagttcaacgcgtatccagaaccctgatcctgccgtgtaccagctgcgggatagcaagagcagcgacaagagcgtgtgtctgttcaccgacttcgacagccagaccaacgtgtcccagagcaaggactccgacgtgtacatcaccgataagtgcgtgctggacatgcggagcatggacttcaagagcaactccgccgtggcctggtccaacaagtccgatttcgcctgcgccaacgccttcaacaacagcattatccccgaggacacattcttcccaagccccgagagcagctgcggctttaccagcgagagctaccagcagggcgtgctgagcgccaccatcctgtacgagatcctgctgggcaaggccaccctgtacgccgtgctggtgtctgccctggtgctgatggctatggtcaagcggaaggacagccggggataa

SEQ ID NO: 38484 - DNA, 2304 bp, synthetic construct
  source 1..2304: mol_type = other DNA
atggccttaccagtgaccgccttgctcctgccgctggccttgctgctccacgccgccaggccggaagtgcagctggttgaatctggcggaggactggttcagcctggcggatctctgagactgtcttgtgccgcctctggcttcgccagcgactactatatcatcggctggttcagacaggcccctggcaaagagagagagggcgtcagctgtatcagcagcagatacgccaacaccaactacgccgacagcgtgaagggcagattcaccatcagccgggacaacgccaagaacaccgtgtacctccagatgaacagcctgaagcctgaggacaccgccgtgtactactgtgccgccgacaccagaagatacacctgtcctgacattgccaccatgcaccggaacttcgattcttggggccagggcacactggtcaccgtttcttctggtaccggcggaggcggatctggcggcggaggtagcggtggcggaggatctgaattcgacatcgtgatgacacagagccctgatagcctggccgtgtctctgggagagagagccaccattaactgcaaggccagccagagcgtggactacgacggcgacagcttcctgaactggtatcagcagaagcccggccagcctcctaagctgctgatctacgccgccagcaatctggaaagcggcgtgccaagcagattttccggctctggcagcggcaccgatttcaccctgacaatatccagcctccagcctgaggacgtggccgtgtactactgccagcagagcaacgacgaccctctgacctttggacagggcaccaaggtggaaatcaaactcgagatccagaaccctgatcctgccgtgtaccagctgcgggatagcaagagcagcgacaagagcgtgtgtctgttcaccgacttcgacagccagaccaacgtgtcccagagcaaggactccgacgtgtacatcaccgataagtgcgtgctggacatgcggagcatggacttcaagagcaactccgccgtggcctggtccaacaagtccgatttcgcctgcgccaacgccttcaacaacagcattatccccgaggacacattcttcccaagccccgagagcagctgcggctttaccagcgagagctaccagcagggcgtgctgagcgccaccatcctgtacgagatcctgctgggcaaggccaccctgtacgccgtgctggtgtctgccctggtgctgatggctatggtcaagcggaaggacagccggggaagggccaagcgatctggatctggagcaacaaacttctcactactcaaacaagcaggtgacgtggaggagaatcccgggcctactagtatggactggatttggcgcatccttttccttgtcggcgctgctaccggcgcgcattccttcgaagaagtccaacttgtggagtctggagggggcctggtgcagcccggcggctctctcagactgtcttgtgcggcaagcggctacaccttcagctcttactggatagaatgggtgaggcaggcacctggaaagggactggagtggattggagagattctgccaggagggggagatacaaattacaatgaaatcttcaaggggcgggccaccttttcagcggataccagcaagaatacagcttacctgcagatgaatagcctccgggcagaagataccgctgtttattattgcacgagacgggtgccaataagactggactattgggggcaagggactcttgtcaccgtcagttcaacgcgtgacctgaagaacgtgttcccacctgaggtggccgtgttcgagcctagcgaggccgagatcagccacacccagaaagccaccctcgtgtgcctggctaccggcttctaccccgaccatgtggaactgtcttggtgggtcaacggcaaagaggtgcacagcggcgtgtgtaccgacccccagccactgaaagaacagcccgccctgaacgacagccggtactgcctgagcagcagactgagagtgtccgccaccttctggcagaacccccggaaccacttcagatgccaggtgcagttctacggcctgagcgagaacgacgagtggacccaggacagagccaagcccgtgacccagatcgtgtctgccgaagcctggggcagagccgattgcgacgtgaagctggtggaaaagagcttcgagacagacaccaacctgaacttccagaacctgagcgtgatcggcttcagaatcctgctgctgaaagtggccggctttaacctgctgatgaccctgcggctgtggtccagc

SEQ ID NO: 38485 - DNA, 2304 bp, synthetic construct
  source 1..2304: mol_type = other DNA
atggccttaccagtgaccgccttgctcctgccgctggccttgctgctccacgccgccaggccggaagtgcagctggttgaatctggcggaggactggttcagcctggcggatctctgagactgagctgtgaagccagcggcttcgccagcgacgattacatcatcggctggttcagacaggcccctggcaaagagagagagggcgtcagctgcatcagctctaagtacgccaacaccgtgtacaccgacagcgtgaagggcagattcagactgagcagaggcaccgccaagaataccgtgtacctccagatgagcgccctgaagcctgaggataccgccgtgtactactgcgctatggacagccgcagagtgacatgccctgagatcagcaccatgcaccggaacttcgattcttggggccagggcacactggtcacagtgtcatctggtaccggcggaggcggatctggcggcggaggtagcggtggcggaggatctgaattcgacatcgtgatgacacagagccctgatagcctggccgtgtctctgggagagagagccaccattaactgcaaggccagccagagcgtggactacgacggcgacagcttcctgaactggtatcagcagaagcccggccagcctcctaagctgctgatctacgccgccagcaatctggaaagcggcgtgccaagcagattttccggctctggcagcggcaccgatttcaccctgacaatatccagcctccagcctgaggacgtggccgtgtactactgccagcagagcaacgacgaccctctgacctttggacagggcaccaaggtggaaatcaaactcgagatccagaaccctgatcctgccgtgtaccagctgcgggatagcaagagcagcgacaagagcgtgtgtctgttcaccgacttcgacagccagaccaacgtgtcccagagcaaggactccgacgtgtacatcaccgataagtgcgtgctggacatgcggagcatggacttcaagagcaactccgccgtggcctggtccaacaagtccgatttcgcctgcgccaacgccttcaacaacagcattatccccgaggacacattcttcccaagccccgagagcagctgcggctttaccagcgagagctaccagcagggcgtgctgagcgccaccatcctgtacgagatcctgctgggcaaggccaccctgtacgccgtgctggtgtctgccctggtgctgatggctatggtcaagcggaaggacagccggggaagggccaagcgatctggatctggagcaacaaacttctcactactcaaacaagcaggtgacgtggaggagaatcccgggcctactagtatggactggatttggcgcatccttttccttgtcggcgctgctaccggcgcgcattccttcgaagaagtccaacttgtggagtctggagggggcctggtgcagcccggcggctctctcagactgtcttgtgcggcaagcggctacaccttcagctcttactggatagaatgggtgaggcaggcacctggaaagggactggagtggattggagagattctgccaggagggggagatacaaattacaatgaaatcttcaaggggcgggccaccttttcagcggataccagcaagaatacagcttacctgcagatgaatagcctccgggcagaagataccgctgtttattattgcacgagacgggtgccaataagactggactattgggggcaagggactcttgtcaccgtcagttcaacgcgtgacctgaagaacgtgttcccacctgaggtggccgtgttcgagcctagcgaggccgagatcagccacacccagaaagccaccctcgtgtgcctggctaccggcttctaccccgaccatgtggaactgtcttggtgggtcaacggcaaagaggtgcacagcggcgtgtgtaccgacccccagccactgaaagaacagcccgccctgaacgacagccggtactgcctgagcagcagactgagagtgtccgccaccttctggcagaacccccggaaccacttcagatgccaggtgcagttctacggcctgagcgagaacgacgagtggacccaggacagagccaagcccgtgacccagatcgtgtctgccgaagcctggggcagagccgattgcgacgtgaagctggtggaaaagagcttcgagacagacaccaacctgaacttccagaacctgagcgtgatcggcttcagaatcctgctgctgaaagtggccggctttaacctgctgatgaccctgcggctgtggtccagc

SEQ ID NO: 38486 - DNA, 2277 bp, synthetic construct
  source 1..2277: mol_type = other DNA
atggccttaccagtgaccgccttgctcctgccgctggccttgctgctccacgccgccaggccgcaagtcaaactggaagaaagcggtggcggcctggtgcaacctggcgaatctctgagactgagctgtagcgccagcggctccatcttcaaggtgttcagagtgttcgccatgagctggtacaggcaaggccctggcaagcagagagagctggtcgcctctatcagcagcggcgagacaaccacatacgccgaatctgtgaaaggccggttcaccatcagccgggataatgccaagaataccgcctatctccagatggactccctgaagcctgaagatacagctgtgtactactgcaacgccgaccataccttcaccggcgatttttggggccagggaacccaagtgaccgtgtctagtggtaccggcggaggcggatctggcggcggaggtagcggtggcggaggatctgaattcgacatcgtgatgacacagagccctgatagcctggccgtgtctctgggagagagagccaccattaactgcaaggccagccagagcgtggactacgacggcgacagcttcctgaactggtatcagcagaagcccggccagcctcctaagctgctgatctacgccgccagcaatctggaaagcggcgtgccaagcagattttccggctctggcagcggcaccgatttcaccctgacaatatccagcctccagcctgaggacgtggccgtgtactactgccagcagagcaacgacgaccctctgacctttggacagggcaccaaggtggaaatcaaactcgagatccagaaccctgatcctgccgtgtaccagctgcgggatagcaagagcagcgacaagagcgtgtgtctgttcaccgacttcgacagccagaccaacgtgtcccagagcaaggactccgacgtgtacatcaccgataagtgcgtgctggacatgcggagcatggacttcaagagcaactccgccgtggcctggtccaacaagtccgatttcgcctgcgccaacgccttcaacaacagcattatccccgaggacacattcttcccaagccccgagagcagctgcggctttaccagcgagagctaccagcagggcgtgctgagcgccaccatcctgtacgagatcctgctgggcaaggccaccctgtacgccgtgctggtgtctgccctggtgctgatggctatggtcaagcggaaggacagccggggaagggccaagcgatctggatctggagcaacaaacttctcactactcaaacaagcaggtgacgtggaggagaatcccgggcctactagtatggactggatttggcgcatccttttccttgtcggcgctgctaccggcgcgcattccttcgaagaagtccaacttgtggagtctggagggggcctggtgcagcccggcggctctctcagactgtcttgtgcggcaagcggctacaccttcagctcttactggatagaatgggtgaggcaggcacctggaaagggactggagtggattggagagattctgccaggagggggagatacaaattacaatgaaatcttcaaggggcgggccaccttttcagcggataccagcaagaatacagcttacctgcagatgaatagcctccgggcagaagataccgctgtttattattgcacgagacgggtgccaataagactggactattgggggcaagggactcttgtcaccgtcagttcaacgcgtgacctgaagaacgtgttcccacctgaggtggccgtgttcgagcctagcgaggccgagatcagccacacccagaaagccaccctcgtgtgcctggctaccggcttctaccccgaccatgtggaactgtcttggtgggtcaacggcaaagaggtgcacagcggcgtgtgtaccgacccccagccactgaaagaacagcccgccctgaacgacagccggtactgcctgagcagcagactgagagtgtccgccaccttctggcagaacccccggaaccacttcagatgccaggtgcagttctacggcctgagcgagaacgacgagtggacccaggacagagccaagcccgtgacccagatcgtgtctgccgaagcctggggcagagccgattgcgacgtgaagctggtggaaaagagcttcgagacagacaccaacctgaacttccagaacctgagcgtgatcggcttcagaatcctgctgctgaaagtggccggctttaacctgctgatgaccctgcggctgtggtccagc

SEQ ID NO: 38487 - DNA, 2283 bp, synthetic construct
  source 1..2283: mol_type = other DNA
atggccttaccagtgaccgccttgctcctgccgctggccttgctgctccacgccgccaggccggacatcgtgatgacacagagccctgatagcctggccgtgtctctgggagagagagccaccattaactgcaaggccagccagagcgtggactacgacggcgacagcttcctgaactggtatcagcagaagcccggccagcctcctaagctgctgatctacgccgccagcaatctggaaagcggcgtgccaagcagattttccggctctggcagcggcaccgatttcaccctgacaatatccagcctccagcctgaggacgtggccgtgtactactgccagcagagcaacgacgaccctctgacctttggacagggcaccaaggtggaaatcaaactcgaggacctgaagaacgtgttcccacctgaggtggccgtgttcgagcctagcgaggccgagatcagccacacccagaaagccaccctcgtgtgcctggctaccggcttctaccccgaccatgtggaactgtcttggtgggtcaacggcaaagaggtgcacagcggcgtgtgtaccgacccccagccactgaaagaacagcccgccctgaacgacagccggtactgcctgagcagcagactgagagtgtccgccaccttctggcagaacccccggaaccacttcagatgccaggtgcagttctacggcctgagcgagaacgacgagtggacccaggacagagccaagcccgtgacccagatcgtgtctgccgaagcctggggcagagccgattgcgacgtgaagctggtggaaaagagcttcgagacagacaccaacctgaacttccagaacctgagcgtgatcggcttcagaatcctgctgctgaaagtggccggctttaacctgctgatgaccctgcggctgtggtccagcagggccaagcgatctggatctggagcaacaaacttctcactactcaaacaagcaggtgacgtggaggagaatcccgggcctactagtgccaccatggactggatttggcgcatccttttccttgtcggcgctgctaccggcgcccattccgggcccgaagtgcagctggttgaatctggcggaggactggttcaggctggcggatctctgagactgtcttgtgccgccagcggcagaacctttagcatgggctggtttagacaggcccctggcaaagagagagagttcgtcgccgccatcacatactctggcggcagcccttactacgccgactctgtgaagggcagattcaccatcagccgggacaacgccaagaacaccgtgtacctccagatgaacagcctgaagcctgaggacaccgccgtgtactactgcgccgccaatccaacatacggcagcgactggaacgccgagaattggggccagggaacccaagtgacagtgtctagcggatccggcggcggaggatctggcggaggcggatctgggggcggaggctctttcgaagaagtccaacttgtggagtctggagggggcctggtgcagcccggcggctctctcagactgtcttgtgcggcaagcggctacaccttcagctcttactggatagaatgggtgaggcaggcacctggaaagggactggagtggattggagagattctgccaggagggggagatacaaattacaatgaaatcttcaaggggcgggccaccttttcagcggataccagcaagaatacagcttacctgcagatgaatagcctccgggcagaagataccgctgtttattattgcacgagacgggtgccaataagactggactattgggggcaagggactcttgtcaccgtcagttcaacgcgtatccagaaccctgatcctgccgtgtaccagctgcgggatagcaagagcagcgacaagagcgtgtgtctgttcaccgacttcgacagccagaccaacgtgtcccagagcaaggactccgacgtgtacatcaccgataagtgcgtgctggacatgcggagcatggacttcaagagcaactccgccgtggcctggtccaacaagtccgatttcgcctgcgccaacgccttcaacaacagcattatccccgaggacacattcttcccaagccccgagagcagctgcggctttaccagcgagagctaccagcagggcgtgctgagcgccaccatcctgtacgagatcctgctgggcaaggccaccctgtacgccgtgctggtgtctgccctggtgctgatggctatggtcaagcggaaggacagccggggataa

SEQ ID NO: 38488 - DNA, 2286 bp, synthetic construct
  source 1..2286: mol_type = other DNA
atggccttaccagtgaccgccttgctcctgccgctggccttgctgctccacgccgccaggccggacatcgtgatgacacagagccctgatagcctggccgtgtctctgggagagagagccaccattaactgcaaggccagccagagcgtggactacgacggcgacagcttcctgaactggtatcagcagaagcccggccagcctcctaagctgctgatctacgccgccagcaatctggaaagcggcgtgccaagcagattttccggctctggcagcggcaccgatttcaccctgacaatatccagcctccagcctgaggacgtggccgtgtactactgccagcagagcaacgacgaccctctgacctttggacagggcaccaaggtggaaatcaaactcgaggacctgaagaacgtgttcccacctgaggtggccgtgttcgagcctagcgaggccgagatcagccacacccagaaagccaccctcgtgtgcctggctaccggcttctaccccgaccatgtggaactgtcttggtgggtcaacggcaaagaggtgcacagcggcgtgtgtaccgacccccagccactgaaagaacagcccgccctgaacgacagccggtactgcctgagcagcagactgagagtgtccgccaccttctggcagaacccccggaaccacttcagatgccaggtgcagttctacggcctgagcgagaacgacgagtggacccaggacagagccaagcccgtgacccagatcgtgtctgccgaagcctggggcagagccgattgcgacgtgaagctggtggaaaagagcttcgagacagacaccaacctgaacttccagaacctgagcgtgatcggcttcagaatcctgctgctgaaagtggccggctttaacctgctgatgaccctgcggctgtggtccagcagggccaagcgatctggatctggagcaacaaacttctcactactcaaacaagcaggtgacgtggaggagaatcccgggcctactagtgccaccatggactggatttggcgcatccttttccttgtcggcgctgctaccggcgcccattccgggcccgaagtgcaactggtggaatctgggggcggactggtgcagccaggcggaagtctgaggctgtcttgtgccgcctccggcagcatcttcggcttcaacgacatggcctggtatcggcaggctcccggaaaacagcgcgagctggtggctctgattagcagagtgggcgtgaccagcagcgccgactctgtgaagggcagattcacaatctccagagtgaacgccaaggatacagtgtacctccagatgaactctctgaaacctgaggatacagcagtgtactattgctacatggaccagcggctggacggcagcacactggcctactggggacagggaactcaagtgacagtgtctagcggatccggcggcggaggatctggcggaggcggatctgggggcggaggctctttcgaagaagtccaacttgtggagtctggagggggcctggtgcagcccggcggctctctcagactgtcttgtgcggcaagcggctacaccttcagctcttactggatagaatgggtgaggcaggcacctggaaagggactggagtggattggagagattctgccaggagggggagatacaaattacaatgaaatcttcaaggggcgggccaccttttcagcggataccagcaagaatacagcttacctgcagatgaatagcctccgggcagaagataccgctgtttattattgcacgagacgggtgccaataagactggactattgggggcaagggactcttgtcaccgtcagttcaacgcgtatccagaaccctgatcctgccgtgtaccagctgcgggatagcaagagcagcgacaagagcgtgtgtctgttcaccgacttcgacagccagaccaacgtgtcccagagcaaggactccgacgtgtacatcaccgataagtgcgtgctggacatgcggagcatggacttcaagagcaactccgccgtggcctggtccaacaagtccgatttcgcctgcgccaacgccttcaacaacagcattatccccgaggacacattcttcccaagccccgagagcagctgcggctttaccagcgagagctaccagcagggcgtgctgagcgccaccatcctgtacgagatcctgctgggcaaggccaccctgtacgccgtgctggtgtctgccctggtgctgatggctatggtcaagcggaaggacagccggggataa

SEQ ID NO: 38489 - DNA, 2274 bp, synthetic construct
  source 1..2274: mol_type = other DNA
atggccttaccagtgaccgccttgctcctgccgctggccttgctgctccacgccgccaggccggacatcgtgatgacacagagccctgatagcctggccgtgtctctgggagagagagccaccattaactgcaaggccagccagagcgtggactacgacggcgacagcttcctgaactggtatcagcagaagcccggccagcctcctaagctgctgatctacgccgccagcaatctggaaagcggcgtgccaagcagattttccggctctggcagcggcaccgatttcaccctgacaatatccagcctccagcctgaggacgtggccgtgtactactgccagcagagcaacgacgaccctctgacctttggacagggcaccaaggtggaaatcaaactcgaggacctgaagaacgtgttcccacctgaggtggccgtgttcgagcctagcgaggccgagatcagccacacccagaaagccaccctcgtgtgcctggctaccggcttctaccccgaccatgtggaactgtcttggtgggtcaacggcaaagaggtgcacagcggcgtgtgtaccgacccccagccactgaaagaacagcccgccctgaacgacagccggtactgcctgagcagcagactgagagtgtccgccaccttctggcagaacccccggaaccacttcagatgccaggtgcagttctacggcctgagcgagaacgacgagtggacccaggacagagccaagcccgtgacccagatcgtgtctgccgaagcctggggcagagccgattgcgacgtgaagctggtggaaaagagcttcgagacagacaccaacctgaacttccagaacctgagcgtgatcggcttcagaatcctgctgctgaaagtggccggctttaacctgctgatgaccctgcggctgtggtccagcagggccaagcgatctggatctggagcaacaaacttctcactactcaaacaagcaggtgacgtggaggagaatcccgggcctactagtgccaccatggactggatttggcgcatccttttccttgtcggcgctgctaccggcgcccattccgggcccgaggtgcagctggttgaatctggcggaggactggttcaggctggcggatctctgagactgtcttgtgccgccagcggctctgtgttcagcggcaatgtgatgggctggtacagacaggcccctggcaaagaaagagagtgggttgccgccattgccagcggcggcagcatctactacagagactctgtgaagggcagattcaccatcagccgggacaacgccaagaacaccgtgtacctccagatgaacagcctgaagcctgaggacaccgccgtgtactactgcaactctcaccctcctacactgccctattggggcctgggaacccaagtgacagtgtcctctggatccggcggcggaggatctggcggaggcggatctgggggcggaggctctttcgaagaagtccaacttgtggagtctggagggggcctggtgcagcccggcggctctctcagactgtcttgtgcggcaagcggctacaccttcagctcttactggatagaatgggtgaggcaggcacctggaaagggactggagtggattggagagattctgccaggagggggagatacaaattacaatgaaatcttcaaggggcgggccaccttttcagcggataccagcaagaatacagcttacctgcagatgaatagcctccgggcagaagataccgctgtttattattgcacgagacgggtgccaataagactggactattgggggcaagggactcttgtcaccgtcagttcaacgcgtatccagaaccctgatcctgccgtgtaccagctgcgggatagcaagagcagcgacaagagcgtgtgtctgttcaccgacttcgacagccagaccaacgtgtcccagagcaaggactccgacgtgtacatcaccgataagtgcgtgctggacatgcggagcatggacttcaagagcaactccgccgtggcctggtccaacaagtccgatttcgcctgcgccaacgccttcaacaacagcattatccccgaggacacattcttcccaagccccgagagcagctgcggctttaccagcgagagctaccagcagggcgtgctgagcgccaccatcctgtacgagatcctgctgggcaaggccaccctgtacgccgtgctggtgtctgccctggtgctgatggctatggtcaagcggaaggacagccggggataa

SEQ ID NO: 38490 - DNA, 2268 bp, synthetic construct
  source 1..2268: mol_type = other DNA
atggccttaccagtgaccgccttgctcctgccgctggccttgctgctccacgccgccaggccggacatcgtgatgacacagagccctgatagcctggccgtgtctctgggagagagagccaccattaactgcaaggccagccagagcgtggactacgacggcgacagcttcctgaactggtatcagcagaagcccggccagcctcctaagctgctgatctacgccgccagcaatctggaaagcggcgtgccaagcagattttccggctctggcagcggcaccgatttcaccctgacaatatccagcctccagcctgaggacgtggccgtgtactactgccagcagagcaacgacgaccctctgacctttggacagggcaccaaggtggaaatcaaactcgaggacctgaagaacgtgttcccacctgaggtggccgtgttcgagcctagcgaggccgagatcagccacacccagaaagccaccctcgtgtgcctggctaccggcttctaccccgaccatgtggaactgtcttggtgggtcaacggcaaagaggtgcacagcggcgtgtgtaccgacccccagccactgaaagaacagcccgccctgaacgacagccggtactgcctgagcagcagactgagagtgtccgccaccttctggcagaacccccggaaccacttcagatgccaggtgcagttctacggcctgagcgagaacgacgagtggacccaggacagagccaagcccgtgacccagatcgtgtctgccgaagcctggggcagagccgattgcgacgtgaagctggtggaaaagagcttcgagacagacaccaacctgaacttccagaacctgagcgtgatcggcttcagaatcctgctgctgaaagtggccggctttaacctgctgatgaccctgcggctgtggtccagcagggccaagcgatctggatctggagcaacaaacttctcactactcaaacaagcaggtgacgtggaggagaatcccgggcctactagtgccaccatggactggatttggcgcatccttttccttgtcggcgctgctaccggcgcccattccgggcccgaagttcagctgctggaatctggcggaggactcgttcaacctggcggctctctgagactgagctgtgccgcttctggcttcagcttctctagctacgccctgagctgggttcgacaagctcccggaaagggccttgaatgggtgtccagcatcggcgagaatgacggcaccacagactatgccgatgccgtgaaaggccggtttaccatcagcagagacaattccaagaacacgctctatctgcaaatgaactccctgcgcgtggaagatacagccgtgtattattgcgtgaaggacggcatccactggggacagggaaccctggttacagtgtctagcggatccggcggcggaggatctggcggaggcggatctgggggcggaggctctttcgaagaagtccaacttgtggagtctggagggggcctggtgcagcccggcggctctctcagactgtcttgtgcggcaagcggctacaccttcagctcttactggatagaatgggtgaggcaggcacctggaaagggactggagtggattggagagattctgccaggagggggagatacaaattacaatgaaatcttcaaggggcgggccaccttttcagcggataccagcaagaatacagcttacctgcagatgaatagcctccgggcagaagataccgctgtttattattgcacgagacgggtgccaataagactggactattgggggcaagggactcttgtcaccgtcagttcaacgcgtatccagaaccctgatcctgccgtgtaccagctgcgggatagcaagagcagcgacaagagcgtgtgtctgttcaccgacttcgacagccagaccaacgtgtcccagagcaaggactccgacgtgtacatcaccgataagtgcgtgctggacatgcggagcatggacttcaagagcaactccgccgtggcctggtccaacaagtccgatttcgcctgcgccaacgccttcaacaacagcattatccccgaggacacattcttcccaagccccgagagcagctgcggctttaccagcgagagctaccagcagggcgtgctgagcgccaccatcctgtacgagatcctgctgggcaaggccaccctgtacgccgtgctggtgtctgccctggtgctgatggctatggtcaagcggaaggacagccggggataa

SEQ ID NO: 38491 - DNA, 3375 bp, synthetic construct
  source 1..3375: mol_type = other DNA
atgggacccagactgctgttttgggctctgctgtgtctgctcggcacaggacctgttgaagctggcgtgacacagagccccacacacctgattaagaccagaggccagcaggccacactgagatgcagccctatcagcggccacaccagcgtgtactggtatcagcaggctctcggactgggcctccagttcctgctttggtacgacgagggcgaagagagaaaccggggcaacttccctcctcggttttccggcagacagttccccaactacagcagcgagctgaacgtgaacgccctggaactggaagatagcgccctgtacctgtgtgcctcttctcttggtggacctcgcggactggctggactgagaggggatgagcagtttttcggccctggcaccagactgaccgtgctggaaggtaccggcggaggcggatctggcggcggagaattcgacatcgtgatgacacagagccctgatagcctggccgtgtctctgggagagagagccaccattaactgcaaggccagccagagcgtggactacgacggcgacagcttcctgaactggtatcagcagaagcccggccagcctcctaagctgctgatctacgccgccagcaatctggaaagcggcgtgccaagcagattttccggctctggcagcggcaccgatttcaccctgacaatatccagcctccagcctgaggacgtggccgtgtactactgccagcagagcaacgacgaccctctgacctttggacagggcaccaaggtggaaatcaaactcgaggacctgaagaacgtgttcccacctgaggtggccgtgttcgagcctagcgaggccgagatcagccacacccagaaagccaccctcgtgtgcctggctaccggcttctaccccgaccatgtggaactgtcttggtgggtcaacggcaaagaggtgcacagcggcgtgtgtaccgacccccagccactgaaagaacagcccgccctgaacgacagccggtactgcctgagcagcagactgagagtgtccgccaccttctggcagaacccccggaaccacttcagatgccaggtgcagttctacggcctgagcgagaacgacgagtggacccaggacagagccaagcccgtgacccagatcgtgtctgccgaagcctggggcagagccgattgcgacgtgaagctggtggaaaagagcttcgagacagacaccaacctgaacttccagaacctgagcgtgatcggcttcagaatcctgctgctgaaagtggccggctttaacctgctgatgaccctgcggctgtggtccagcagggccaagcgatctggatctggagcaacaaacttctcactactcaaacaagcaggtgacgtggaggagaatcccgggcctactagtgccaccatggactggatttggcgcatccttttccttgtcggcgctgctaccggcgcccattccgggcccgaagtgcagctggttgaatctggcggaggactggttcaggctggcggatctctgagactgtcttgtgccgccagcggcagaacctttagcatgggctggtttagacaggcccctggcaaagagagagagttcgtcgccgccatcacatactctggcggcagcccttactacgccgactctgtgaagggcagattcaccatcagccgggacaacgccaagaacaccgtgtacctccagatgaacagcctgaagcctgaggacaccgccgtgtactactgcgccgccaatccaacatacggcagcgactggaacgccgagaattggggccagggaacccaagtgacagtgtctagcggatccggcggcggaggatctggcggaggcggatctgggggcggaggctctttcgaagaagtccaacttgtggagtctggagggggcctggtgcagcccggcggctctctcagactgtcttgtgcggcaagcggctacaccttcagctcttactggatagaatgggtgaggcaggcacctggaaagggactggagtggattggagagattctgccaggagggggagatacaaattacaatgaaatcttcaaggggcgggccaccttttcagcggataccagcaagaatacagcttacctgcagatgaatagcctccgggcagaagataccgctgtttattattgcacgagacgggtgccaataagactggactattgggggcaagggactcttgtcaccgtcagttcaacgcgtatccagaaccctgatcctgccgtgtaccagctgcgggatagcaagagcagcgacaagagcgtgtgtctgttcaccgacttcgacagccagaccaacgtgtcccagagcaaggactccgacgtgtacatcaccgataagtgcgtgctggacatgcggagcatggacttcaagagcaactccgccgtggcctggtccaacaagtccgatttcgcctgcgccaacgccttcaacaacagcattatccccgaggacacattcttcccaagccccgagagcagctgcggctttaccagcgagagctaccagcagggcgtgctgagcgccaccatcctgtacgagatcctgctgggcaaggccaccctgtacgccgtgctggtgtctgccctggtgctgatggctatggtcaagcggaaggacagccggggacgcgccaagagaagcggatctggcgtgaagcagaccctgaatttcgacctgctgaagctggctggcgacgtggaatccaacccaggcccttctagaggccatatgaccgagtacaagcccacggtgcgcctcgccacccgcgacgacgtccccagggccgtacgcaccctcgccgccgcgttcgccgactaccccgccacgcgccacaccgtcgatccggaccgccacatcgagcgggtcaccgagctgcaagaactcttcctcacgcgcgtcgggctcgacatcggcaaggtgtgggtcgcggacgacggcgccgcggtggcggtctggaccacgccggagagcgtcgaagcgggggcggtgttcgccgagatcggcccgcgcatggccgagttgagcggttcccggctggccgcgcagcaacagatggaaggcctcctggcgccgcaccggcccaaggagcccgcgtggttcctggccaccgtcggcgtctcgcccgaccaccagggcaagggtctgggcagcgccgtcgtgctccccggagtggaggcggccgagcgcgccggggtgcccgccttcctggagacctccgcgccccgcaacctccccttctacgagcggctcggcttcaccgtcaccgccgacgtcgaggtgcccgaaggaccgcgcacctggtgcatgacccgcaagcccggtgcctga

SEQ ID NO: 38492 - DNA, 3372 bp, synthetic construct
  source 1..3372: mol_type = other DNA
atgggacccagactgctgttttgggctctgctgtgtctgctcggcacaggacctgttgaagctggcgtgacacagagccccacacacctgattaagaccagaggccagcaggccacactgagatgcagccctatcagcggccacaccagcgtgtactggtatcagcaggctctcggactgggcctccagttcctgctttggtacgacgagggcgaagagagaaaccggggcaacttccctcctcggttttccggcagacagttccccaactacagcagcgagctgaacgtgaacgccctggaactggaagatagcgccctgtacctgtgtgccagctctctcggcggagatgaactgggagccgatggcaacgagcagttctttggccctggcaccagactgaccgtgctggaaggtaccggcggaggcggatctggcggcggaagcgaattcgacatcgtgatgacacagagccctgatagcctggccgtgtctctgggagagagagccaccattaactgcaaggccagccagagcgtggactacgacggcgacagcttcctgaactggtatcagcagaagcccggccagcctcctaagctgctgatctacgccgccagcaatctggaaagcggcgtgccaagcagattttccggctctggcagcggcaccgatttcaccctgacaatatccagcctccagcctgaggacgtggccgtgtactactgccagcagagcaacgacgaccctctgacctttggacagggcaccaaggtggaaatcaaactcgaggacctgaagaacgtgttcccacctgaggtggccgtgttcgagcctagcgaggccgagatcagccacacccagaaagccaccctcgtgtgcctggctaccggcttctaccccgaccatgtggaactgtcttggtgggtcaacggcaaagaggtgcacagcggcgtgtgtaccgacccccagccactgaaagaacagcccgccctgaacgacagccggtactgcctgagcagcagactgagagtgtccgccaccttctggcagaacccccggaaccacttcagatgccaggtgcagttctacggcctgagcgagaacgacgagtggacccaggacagagccaagcccgtgacccagatcgtgtctgccgaagcctggggcagagccgattgcgacgtgaagctggtggaaaagagcttcgagacagacaccaacctgaacttccagaacctgagcgtgatcggcttcagaatcctgctgctgaaagtggccggctttaacctgctgatgaccctgcggctgtggtccagcagggccaagcgatctggatctggagcaacaaacttctcactactcaaacaagcaggtgacgtggaggagaatcccgggcctactagtgccaccatggactggatttggcgcatccttttccttgtcggcgctgctaccggcgcccattccgggcccgaagtgcagctggttgaatctggcggaggactggttcaggctggcggatctctgagactgtcttgtgccgccagcggcagaacctttagcatgggctggtttagacaggcccctggcaaagagagagagttcgtcgccgccatcacatactctggcggcagcccttactacgccgactctgtgaagggcagattcaccatcagccgggacaacgccaagaacaccgtgtacctccagatgaacagcctgaagcctgaggacaccgccgtgtactactgcgccgccaatccaacatacggcagcgactggaacgccgagaattggggccagggaacccaagtgacagtgtctagcggatccggcggcggaggatctggcggaggcggatctgggggcggaggctctttcgaagaagtccaacttgtggagtctggagggggcctggtgcagcccggcggctctctcagactgtcttgtgcggcaagcggctacaccttcagctcttactggatagaatgggtgaggcaggcacctggaaagggactggagtggattggagagattctgccaggagggggagatacaaattacaatgaaatcttcaaggggcgggccaccttttcagcggataccagcaagaatacagcttacctgcagatgaatagcctccgggcagaagataccgctgtttattattgcacgagacgggtgccaataagactggactattgggggcaagggactcttgtcaccgtcagttcaacgcgtatccagaaccctgatcctgccgtgtaccagctgcgggatagcaagagcagcgacaagagcgtgtgtctgttcaccgacttcgacagccagaccaacgtgtcccagagcaaggactccgacgtgtacatcaccgataagtgcgtgctggacatgcggagcatggacttcaagagcaactccgccgtggcctggtccaacaagtccgatttcgcctgcgccaacgccttcaacaacagcattatccccgaggacacattcttcccaagccccgagagcagctgcggctttaccagcgagagctaccagcagggcgtgctgagcgccaccatcctgtacgagatcctgctgggcaaggccaccctgtacgccgtgctggtgtctgccctggtgctgatggctatggtcaagcggaaggacagccggggacgcgccaagagaagcggatctggcgtgaagcagaccctgaatttcgacctgctgaagctggctggcgacgtggaatccaacccaggcccttctagaggccatatgaccgagtacaagcccacggtgcgcctcgccacccgcgacgacgtccccagggccgtacgcaccctcgccgccgcgttcgccgactaccccgccacgcgccacaccgtcgatccggaccgccacatcgagcgggtcaccgagctgcaagaactcttcctcacgcgcgtcgggctcgacatcggcaaggtgtgggtcgcggacgacggcgccgcggtggcggtctggaccacgccggagagcgtcgaagcgggggcggtgttcgccgagatcggcccgcgcatggccgagttgagcggttcccggctggccgcgcagcaacagatggaaggcctcctggcgccgcaccggcccaaggagcccgcgtggttcctggccaccgtcggcgtctcgcccgaccaccagggcaagggtctgggcagcgccgtcgtgctccccggagtggaggcggccgagcgcgccggggtgcccgccttcctggagacctccgcgccccgcaacctccccttctacgagcggctcggcttcaccgtcaccgccgacgtcgaggtgcccgaaggaccgcgcacctggtgcatgacccgcaagcccggtgcctga

SEQ ID NO: 38493 - DNA, 2847 bp, synthetic construct
  source 1..2847: mol_type = other DNA
atggccttaccagtgaccgccttgctcctgccgctggccttgctgctccacgccgccaggccggacatcgtgatgacacagagccctgatagcctggccgtgtctctgggagagagagccaccattaactgcaaggccagccagagcgtggactacgacggcgacagcttcctgaactggtatcagcagaagcccggccagcctcctaagctgctgatctacgccgccagcaatctggaaagcggcgtgccaagcagattttccggctctggcagcggcaccgatttcaccctgacaatatccagcctccagcctgaggacgtggccgtgtactactgccagcagagcaacgacgaccctctgacctttggacagggcaccaaggtggaaatcaaactcgaggacctgaagaacgtgttcccacctgaggtggccgtgttcgagcctagcgaggccgagatcagccacacccagaaagccaccctcgtgtgcctggctaccggcttctaccccgaccatgtggaactgtcttggtgggtcaacggcaaagaggtgcacagcggcgtgtgtaccgacccccagccactgaaagaacagcccgccctgaacgacagccggtactgcctgagcagcagactgagagtgtccgccaccttctggcagaacccccggaaccacttcagatgccaggtgcagttctacggcctgagcgagaacgacgagtggacccaggacagagccaagcccgtgacccagatcgtgtctgccgaagcctggggcagagccgattgcgacgtgaagctggtggaaaagagcttcgagacagacaccaacctgaacttccagaacctgagcgtgatcggcttcagaatcctgctgctgaaagtggccggctttaacctgctgatgaccctgcggctgtggtccagcagggccaagcgatctggatctggagcaacaaacttctcactactcaaacaagcaggtgacgtggaggagaatcccgggcctactagtgccaccatggactggatttggcgcatccttttccttgtcggcgctgctaccggcgcccattccgggcccatgggaagctggcttgagttctaccacagactcaacgccattgacagcaggctgtgggcacttggcggaagcgaagctgaactcgccgcttttgaaaaagaaattgccgctttcgagtccgagcttcaggcttacaaaggcaaagggaatcctgaggtcgagagcctgagagatcacgctgcccacattagagagtggttgcaggcataccggcacaatggatccggcggcggaggatctggcggaggcggatctgggggcggaggctctttcgaagaagtccaacttgtggagtctggagggggcctggtgcagcccggcggctctctcagactgtcttgtgcggcaagcggctacaccttcagctcttactggatagaatgggtgaggcaggcacctggaaagggactggagtggattggagagattctgccaggagggggagatacaaattacaatgaaatcttcaaggggcgggccaccttttcagcggataccagcaagaatacagcttacctgcagatgaatagcctccgggcagaagataccgctgtttattattgcacgagacgggtgccaataagactggactattgggggcaagggactcttgtcaccgtcagttcaacgcgtatccagaaccctgatcctgccgtgtaccagctgcgggatagcaagagcagcgacaagagcgtgtgtctgttcaccgacttcgacagccagaccaacgtgtcccagagcaaggactccgacgtgtacatcaccgataagtgcgtgctggacatgcggagcatggacttcaagagcaactccgccgtggcctggtccaacaagtccgatttcgcctgcgccaacgccttcaacaacagcattatccccgaggacacattcttcccaagccccgagagcagctgcggctttaccagcgagagctaccagcagggcgtgctgagcgccaccatcctgtacgagatcctgctgggcaaggccaccctgtacgccgtgctggtgtctgccctggtgctgatggctatggtcaagcggaaggacagccggggacgcgccaagagaagcggatctggcgtgaagcagaccctgaatttcgacctgctgaagctggctggcgacgtggaatccaacccaggcccttctagaggccatatgaccgagtacaagcccacggtgcgcctcgccacccgcgacgacgtccccagggccgtacgcaccctcgccgccgcgttcgccgactaccccgccacgcgccacaccgtcgatccggaccgccacatcgagcgggtcaccgagctgcaagaactcttcctcacgcgcgtcgggctcgacatcggcaaggtgtgggtcgcggacgacggcgccgcggtggcggtctggaccacgccggagagcgtcgaagcgggggcggtgttcgccgagatcggcccgcgcatggccgagttgagcggttcccggctggccgcgcagcaacagatggaaggcctcctggcgccgcaccggcccaaggagcccgcgtggttcctggccaccgtcggcgtctcgcccgaccaccagggcaagggtctgggcagcgccgtcgtgctccccggagtggaggcggccgagcgcgccggggtgcccgccttcctggagacctccgcgccccgcaacctccccttctacgagcggctcggcttcaccgtcaccgccgacgtcgaggtgcccgaaggaccgcgcacctggtgcatgacccgcaagcccggtgcctga

SEQ ID NO: 38494 - DNA, 2847 bp, synthetic construct
  source 1..2847: mol_type = other DNA
atggccttaccagtgaccgccttgctcctgccgctggccttgctgctccacgccgccaggccggcatgcatgggcagttggttcgagttctacgaccggctgaatgccatcgacgccagactgtgggctctcggaggatctgaagctgagctggccgccttcgagaaagagatcgccgcctttgagagcgagctgcaagcctacaaaggcaagggcaaccccgaggtggaaaacctgagagtgcacgccgctgccatcagagaatggctccaggcttacagacacaacggtaccggcggaggcggatctggcggcggaggtagcggtggcggaggatctgaattcgacatcgtgatgacacagagccctgatagcctggccgtgtctctgggagagagagccaccattaactgcaaggccagccagagcgtggactacgacggcgacagcttcctgaactggtatcagcagaagcccggccagcctcctaagctgctgatctacgccgccagcaatctggaaagcggcgtgccaagcagattttccggctctggcagcggcaccgatttcaccctgacaatatccagcctccagcctgaggacgtggccgtgtactactgccagcagagcaacgacgaccctctgacctttggacagggcaccaaggtggaaatcaaactcgaggacctgaagaacgtgttcccacctgaggtggccgtgttcgagcctagcgaggccgagatcagccacacccagaaagccaccctcgtgtgcctggctaccggcttctaccccgaccatgtggaactgtcttggtgggtcaacggcaaagaggtgcacagcggcgtgtgtaccgacccccagccactgaaagaacagcccgccctgaacgacagccggtactgcctgagcagcagactgagagtgtccgccaccttctggcagaacccccggaaccacttcagatgccaggtgcagttctacggcctgagcgagaacgacgagtggacccaggacagagccaagcccgtgacccagatcgtgtctgccgaagcctggggcagagccgattgcgacgtgaagctggtggaaaagagcttcgagacagacaccaacctgaacttccagaacctgagcgtgatcggcttcagaatcctgctgctgaaagtggccggctttaacctgctgatgaccctgcggctgtggtccagcagggccaagcgatctggatctggagcaacaaacttctcactactcaaacaagcaggtgacgtggaggagaatcccgggcctactagtatggactggatttggcgcatccttttccttgtcggcgctgctaccggcgcgcattccttcgaagaagtccaacttgtggagtctggagggggcctggtgcagcccggcggctctctcagactgtcttgtgcggcaagcggctacaccttcagctcttactggatagaatgggtgaggcaggcacctggaaagggactggagtggattggagagattctgccaggagggggagatacaaattacaatgaaatcttcaaggggcgggccaccttttcagcggataccagcaagaatacagcttacctgcagatgaatagcctccgggcagaagataccgctgtttattattgcacgagacgggtgccaataagactggactattgggggcaagggactcttgtcaccgtcagttcaacgcgtatccagaaccctgatcctgccgtgtaccagctgcgggatagcaagagcagcgacaagagcgtgtgtctgttcaccgacttcgacagccagaccaacgtgtcccagagcaaggactccgacgtgtacatcaccgataagtgcgtgctggacatgcggagcatggacttcaagagcaactccgccgtggcctggtccaacaagtccgatttcgcctgcgccaacgccttcaacaacagcattatccccgaggacacattcttcccaagccccgagagcagctgcggctttaccagcgagagctaccagcagggcgtgctgagcgccaccatcctgtacgagatcctgctgggcaaggccaccctgtacgccgtgctggtgtctgccctggtgctgatggctatggtcaagcggaaggacagccggggacgcgccaagagaagcggatctggcgtgaagcagaccctgaatttcgacctgctgaagctggctggcgacgtggaatccaacccaggcccttctagaggccatatgaccgagtacaagcccacggtgcgcctcgccacccgcgacgacgtccccagggccgtacgcaccctcgccgccgcgttcgccgactaccccgccacgcgccacaccgtcgatccggaccgccacatcgagcgggtcaccgagctgcaagaactcttcctcacgcgcgtcgggctcgacatcggcaaggtgtgggtcgcggacgacggcgccgcggtggcggtctggaccacgccggagagcgtcgaagcgggggcggtgttcgccgagatcggcccgcgcatggccgagttgagcggttcccggctggccgcgcagcaacagatggaaggcctcctggcgccgcaccggcccaaggagcccgcgtggttcctggccaccgtcggcgtctcgcccgaccaccagggcaagggtctgggcagcgccgtcgtgctccccggagtggaggcggccgagcgcgccggggtgcccgccttcctggagacctccgcgccccgcaacctccccttctacgagcggctcggcttcaccgtcaccgccgacgtcgaggtgcccgaaggaccgcgcacctggtgcatgacccgcaagcccggtgcctga

SEQ ID NO: 38495 - DNA, 3198 bp, synthetic construct
  source 1..3198: mol_type = other DNA
atggccttaccagtgaccgccttgctcctgccgctggccttgctgctccacgccgccaggccggcatgcatggaccccgacctggaaatcagagccgccttcctgcggcagagaaacacagccctgagaacagaggtggccgagctggaacaagaggtgcagcggctggaaaacgaggtgtcccagtacgagacaagatacggccctctcggaggcggaaaaggtaccggcggaggcggatctggcggcggaggtagcggtggcggaggatctgaattcgacatcgtgatgacacagagccctgatagcctggccgtgtctctgggagagagagccaccattaactgcaaggccagccagagcgtggactacgacggcgacagcttcctgaactggtatcagcagaagcccggccagcctcctaagctgctgatctacgccgccagcaatctggaaagcggcgtgccaagcagattttccggctctggcagcggcaccgatttcaccctgacaatatccagcctccagcctgaggacgtggccgtgtactactgccagcagagcaacgacgaccctctgacctttggacagggcaccaaggtggaaatcaaactcgaggacctgaagaacgtgttcccacctgaggtggccgtgttcgagcctagcgaggccgagatcagccacacccagaaagccaccctcgtgtgcctggctaccggcttctaccccgaccatgtggaactgtcttggtgggtcaacggcaaagaggtgcacagcggcgtgtgtaccgacccccagccactgaaagaacagcccgccctgaacgacagccggtactgcctgagcagcagactgagagtgtccgccaccttctggcagaacccccggaaccacttcagatgccaggtgcagttctacggcctgagcgagaacgacgagtggacccaggacagagccaagcccgtgacccagatcgtgtctgccgaagcctggggcagagccgattgcgacgtgaagctggtggaaaagagcttcgagacagacaccaacctgaacttccagaacctgagcgtgatcggcttcagaatcctgctgctgaaagtggccggctttaacctgctgatgaccctgcggctgtggtccagcagggccaagcgatctggatctggagcaacaaacttctcactactcaaacaagcaggtgacgtggaggagaatcccgggcctactagtgccaccatggactggatttggcgcatccttttccttgtcggcgctgctaccggcgcccattccgggcccgaagtgcagctggttgaatctggcggaggactggttcaggctggcggatctctgagactgtcttgtgccgccagcggcagaacctttagcatgggctggtttagacaggcccctggcaaagagagagagttcgtcgccgccatcacatactctggcggcagcccttactacgccgactctgtgaagggcagattcaccatcagccgggacaacgccaagaacaccgtgtacctccagatgaacagcctgaagcctgaggacaccgccgtgtactactgcgccgccaatccaacatacggcagcgactggaacgccgagaattggggccagggaacccaagtgacagtgtctagcggatccggcggcggaggatctggcggaggcggatctgggggcggaggctctttcgaagaagtccaacttgtggagtctggagggggcctggtgcagcccggcggctctctcagactgtcttgtgcggcaagcggctacaccttcagctcttactggatagaatgggtgaggcaggcacctggaaagggactggagtggattggagagattctgccaggagggggagatacaaattacaatgaaatcttcaaggggcgggccaccttttcagcggataccagcaagaatacagcttacctgcagatgaatagcctccgggcagaagataccgctgtttattattgcacgagacgggtgccaataagactggactattgggggcaagggactcttgtcaccgtcagttcaacgcgtatccagaaccctgatcctgccgtgtaccagctgcgggatagcaagagcagcgacaagagcgtgtgtctgttcaccgacttcgacagccagaccaacgtgtcccagagcaaggactccgacgtgtacatcaccgataagtgcgtgctggacatgcggagcatggacttcaagagcaactccgccgtggcctggtccaacaagtccgatttcgcctgcgccaacgccttcaacaacagcattatccccgaggacacattcttcccaagccccgagagcagctgcggctttaccagcgagagctaccagcagggcgtgctgagcgccaccatcctgtacgagatcctgctgggcaaggccaccctgtacgccgtgctggtgtctgccctggtgctgatggctatggtcaagcggaaggacagccggggacgcgccaagagaagcggatctggcgtgaagcagaccctgaatttcgacctgctgaagctggctggcgacgtggaatccaacccaggcccttctagaggccatatgaccgagtacaagcccacggtgcgcctcgccacccgcgacgacgtccccagggccgtacgcaccctcgccgccgcgttcgccgactaccccgccacgcgccacaccgtcgatccggaccgccacatcgagcgggtcaccgagctgcaagaactcttcctcacgcgcgtcgggctcgacatcggcaaggtgtgggtcgcggacgacggcgccgcggtggcggtctggaccacgccggagagcgtcgaagcgggggcggtgttcgccgagatcggcccgcgcatggccgagttgagcggttcccggctggccgcgcagcaacagatggaaggcctcctggcgccgcaccggcccaaggagcccgcgtggttcctggccaccgtcggcgtctcgcccgaccaccagggcaagggtctgggcagcgccgtcgtgctccccggagtggaggcggccgagcgcgccggggtgcccgccttcctggagacctccgcgccccgcaacctccccttctacgagcggctcggcttcaccgtcaccgccgacgtcgaggtgcccgaaggaccgcgcacctggtgcatgacccgcaagcccggtgcctga

SEQ ID NO: 38496 - DNA, 2847 bp, synthetic construct
  source 1..2847: mol_type = other DNA
atggccttaccagtgaccgccttgctcctgccgctggccttgctgctccacgccgccaggccggacatcgtgatgacacagagccctgatagcctggccgtgtctctgggagagagagccaccattaactgcaaggccagccagagcgtggactacgacggcgacagcttcctgaactggtatcagcagaagcccggccagcctcctaagctgctgatctacgccgccagcaatctggaaagcggcgtgccaagcagattttccggctctggcagcggcaccgatttcaccctgacaatatccagcctccagcctgaggacgtggccgtgtactactgccagcagagcaacgacgaccctctgacctttggacagggcaccaaggtggaaatcaaactcgaggacctgaagaacgtgttcccacctgaggtggccgtgttcgagcctagcgaggccgagatcagccacacccagaaagccaccctcgtgtgcctggctaccggcttctaccccgaccatgtggaactgtcttggtgggtcaacggcaaagaggtgcacagcggcgtgtgtaccgacccccagccactgaaagaacagcccgccctgaacgacagccggtactgcctgagcagcagactgagagtgtccgccaccttctggcagaacccccggaaccacttcagatgccaggtgcagttctacggcctgagcgagaacgacgagtggacccaggacagagccaagcccgtgacccagatcgtgtctgccgaagcctggggcagagccgattgcgacgtgaagctggtggaaaagagcttcgagacagacaccaacctgaacttccagaacctgagcgtgatcggcttcagaatcctgctgctgaaagtggccggctttaacctgctgatgaccctgcggctgtggtccagcagggccaagcgatctggatctggagcaacaaacttctcactactcaaacaagcaggtgacgtggaggagaatcccgggcctactagtgccaccatggactggatttggcgcatccttttccttgtcggcgctgctaccggcgcccattccgggcccatgggatcttggagcgagttttacgatcggctgcacgccattcaccaccggctgtatgctctcggaggaagcgaagctgagctggccgcttttgaaaaagaaattgccgctttcgagtccgagcttcaggcttacaaaggcaaagggaatcctgaggtcgaggccctgagagataccgccgccttcatcagaacccggttgcaggcataccggcacaacggatccggcggcggaggatctggcggaggcggatctgggggcggaggctctttcgaagaagtccaacttgtggagtctggagggggcctggtgcagcccggcggctctctcagactgtcttgtgcggcaagcggctacaccttcagctcttactggatagaatgggtgaggcaggcacctggaaagggactggagtggattggagagattctgccaggagggggagatacaaattacaatgaaatcttcaaggggcgggccaccttttcagcggataccagcaagaatacagcttacctgcagatgaatagcctccgggcagaagataccgctgtttattattgcacgagacgggtgccaataagactggactattgggggcaagggactcttgtcaccgtcagttcaacgcgtatccagaaccctgatcctgccgtgtaccagctgcgggatagcaagagcagcgacaagagcgtgtgtctgttcaccgacttcgacagccagaccaacgtgtcccagagcaaggactccgacgtgtacatcaccgataagtgcgtgctggacatgcggagcatggacttcaagagcaactccgccgtggcctggtccaacaagtccgatttcgcctgcgccaacgccttcaacaacagcattatccccgaggacacattcttcccaagccccgagagcagctgcggctttaccagcgagagctaccagcagggcgtgctgagcgccaccatcctgtacgagatcctgctgggcaaggccaccctgtacgccgtgctggtgtctgccctggtgctgatggctatggtcaagcggaaggacagccggggacgcgccaagagaagcggatctggcgtgaagcagaccctgaatttcgacctgctgaagctggctggcgacgtggaatccaacccaggcccttctagaggccatatgaccgagtacaagcccacggtgcgcctcgccacccgcgacgacgtccccagggccgtacgcaccctcgccgccgcgttcgccgactaccccgccacgcgccacaccgtcgatccggaccgccacatcgagcgggtcaccgagctgcaagaactcttcctcacgcgcgtcgggctcgacatcggcaaggtgtgggtcgcggacgacggcgccgcggtggcggtctggaccacgccggagagcgtcgaagcgggggcggtgttcgccgagatcggcccgcgcatggccgagttgagcggttcccggctggccgcgcagcaacagatggaaggcctcctggcgccgcaccggcccaaggagcccgcgtggttcctggccaccgtcggcgtctcgcccgaccaccagggcaagggtctgggcagcgccgtcgtgctccccggagtggaggcggccgagcgcgccggggtgcccgccttcctggagacctccgcgccccgcaacctccccttctacgagcggctcggcttcaccgtcaccgccgacgtcgaggtgcccgaaggaccgcgcacctggtgcatgacccgcaagcccggtgcctga

SEQ ID NO: 38497 - DNA, 3477 bp, synthetic construct
  source 1..3477: mol_type = other DNA
atggccttaccagtgaccgccttgctcctgccgctggccttgctgctccacgccgccaggccggacatcgtgatgacacagagccctgatagcctggccgtgtctctgggagagagagccaccattaactgcaaggccagccagagcgtggactacgacggcgacagcttcctgaactggtatcagcagaagcccggccagcctcctaagctgctgatctacgccgccagcaatctggaaagcggcgtgccaagcagattttccggctctggcagcggcaccgatttcaccctgacaatatccagcctccagcctgaggacgtggccgtgtactactgccagcagagcaacgacgaccctctgacctttggacagggcaccaaggtggaaatcaaactcgaggacctgaagaacgtgttcccacctgaggtggccgtgttcgagcctagcgaggccgagatcagccacacccagaaagccaccctcgtgtgcctggctaccggcttctaccccgaccatgtggaactgtcttggtgggtcaacggcaaagaggtgcacagcggcgtgtgtaccgacccccagccactgaaagaacagcccgccctgaacgacagccggtactgcctgagcagcagactgagagtgtccgccaccttctggcagaacccccggaaccacttcagatgccaggtgcagttctacggcctgagcgagaacgacgagtggacccaggacagagccaagcccgtgacccagatcgtgtctgccgaagcctggggcagagccgattgcgacgtgaagctggtggaaaagagcttcgagacagacaccaacctgaacttccagaacctgagcgtgatcggcttcagaatcctgctgctgaaagtggccggctttaacctgctgatgaccctgcggctgtggtccagcagggccaagcgatctggatctggagcaacaaacttctcactactcaaacaagcaggtgacgtggaggagaatcccgggcctactagtaccatggactggatttggcgcatccttttccttgtcggcgctgctaccggcgcccattccctgttcaatcaagaggtgcagatccctctgaccgagagctactgtggcccctgtcctaagaactggatctgctacaagaacaactgctaccagttcttcgacgagagcaagaattggtacgagagccaggccagctgcatgagccagaatgccagcctgctgaaggtgtacagcaaagaggaccaggacctgctgaaactggtcaagagcgcccactggatgggccttgtgcacatccccaccaatggctcttggcagtgggaggacggcagcattctgagccctaacctgctgaccatcatcgagatgcagaagggcgactgcgccctgtacgccagcagctttaagggctacatcgagaattgcagcaccccgaacacctacatctgtatgcagagaaccgtttctggcggaggcggctctggaggaggcggaagtggcggcggaggcgacctctttaatcaagaagtccagattccactcaccgaatcctactgcggaccttgtccaaaaaattggatttgttataagaacaactgttatcaattctttgatgagtctaaaaattggtatgagtcccaggcttcctgcatgtctcagaacgcttctctgctgaaagtctactctaaagaagatcaggatctcctgaagctcgtcaagtctgcccattggatggggctcgtccacattcctaccaacggaagctggcaatgggaagatggctccatcctgtctccaaatctgctcacgattattgaaatgcagaaaggggattgtgctctctacgccagctccttcaagggatatattgagaactgtagcacgcccaatacttatatctgtatgcaacggaccgtgggatccggcggcggaggatctggcggaggcggatctgggggcggaggctctttcgaagaagtccaacttgtggagtctggagggggcctggtgcagcccggcggctctctcagactgtcttgtgcggcaagcggctacaccttcagctcttactggatagaatgggtgaggcaggcacctggaaagggactggagtggattggagagattctgccaggagggggagatacaaattacaatgaaatcttcaaggggcgggccaccttttcagcggataccagcaagaatacagcttacctgcagatgaatagcctccgggcagaagataccgctgtttattattgcacgagacgggtgccaataagactggactattgggggcaagggactcttgtcaccgtcagttcaacgcgtatccagaaccctgatcctgccgtgtaccagctgcgggatagcaagagcagcgacaagagcgtgtgtctgttcaccgacttcgacagccagaccaacgtgtcccagagcaaggactccgacgtgtacatcaccgataagtgcgtgctggacatgcggagcatggacttcaagagcaactccgccgtggcctggtccaacaagtccgatttcgcctgcgccaacgccttcaacaacagcattatccccgaggacacattcttcccaagccccgagagcagctgcggctttaccagcgagagctaccagcagggcgtgctgagcgccaccatcctgtacgagatcctgctgggcaaggccaccctgtacgccgtgctggtgtctgccctggtgctgatggctatggtcaagcggaaggacagccggggacgcgccaagagaagcggatctggcgtgaagcagaccctgaatttcgacctgctgaagctggctggcgacgtggaatccaacccaggcccttctagaggccatatgaccgagtacaagcccacggtgcgcctcgccacccgcgacgacgtccccagggccgtacgcaccctcgccgccgcgttcgccgactaccccgccacgcgccacaccgtcgatccggaccgccacatcgagcgggtcaccgagctgcaagaactcttcctcacgcgcgtcgggctcgacatcggcaaggtgtgggtcgcggacgacggcgccgcggtggcggtctggaccacgccggagagcgtcgaagcgggggcggtgttcgccgagatcggcccgcgcatggccgagttgagcggttcccggctggccgcgcagcaacagatggaaggcctcctggcgccgcaccggcccaaggagcccgcgtggttcctggccaccgtcggcgtctcgcccgaccaccagggcaagggtctgggcagcgccgtcgtgctccccggagtggaggcggccgagcgcgccggggtgcccgccttcctggagacctccgcgccccgcaacctccccttctacgagcggctcggcttcaccgtcaccgccgacgtcgaggtgcccgaaggaccgcgcacctggtgcatgacccgcaagcccggtgcctga

SEQ ID NO: 38498 - DNA, 1863 bp, synthetic construct
  source 1..1863: mol_type = other DNA
atggccttaccagtgaccgccttgctcctgccgctggccttgctgctccacgccgccaggccggacatcgtgatgacacagagccctgatagcctggccgtgtctctgggagagagagccaccattaactgcaaggccagccagagcgtggactacgacggcgacagcttcctgaactggtatcagcagaagcccggccagcctcctaagctgctgatctacgccgccagcaatctggaaagcggcgtgccaagcagattttccggctctggcagcggcaccgatttcaccctgacaatatccagcctccagcctgaggacgtggccgtgtactactgccagcagagcaacgacgaccctctgacctttggacagggcaccaaggtggaaatcaaactcgaggacctgaagaacgtgttcccacctgaggtggccgtgttcgagcctagcgaggccgagatcagccacacccagaaagccaccctcgtgtgcctggctaccggcttctaccccgaccatgtggaactgtcttggtgggtcaacggcaaagaggtgcacagcggcgtgtgtaccgacccccagccactgaaagaacagcccgccctgaacgacagccggtactgcctgagcagcagactgagagtgtccgccaccttctggcagaacccccggaaccacttcagatgccaggtgcagttctacggcctgagcgagaacgacgagtggacccaggacagagccaagcccgtgacccagatcgtgtctgccgaagcctggggcagagccgattgcggctttaccagcgagagctaccagcagggcgtgctgagcgccaccaacctgagcgtgatcggcttcagaatcctgctgctgaaagtggccggctttaacctgctgatgaccctgcggctgtggtccagcagggccaagcgatctggatctggagcaacaaacttctcactactcaaacaagcaggtgacgtggaggagaatcccgggcctactagtatggactggatttggcgcatccttttccttgtcggcgctgctaccggcgcgcattccttcgaagaagtccaacttgtggagtctggagggggcctggtgcagcccggcggctctctcagactgtcttgtgcggcaagcggctacaccttcagctcttactggatagaatgggtgaggcaggcacctggaaagggactggagtggattggagagattctgccaggagggggagatacaaattacaatgaaatcttcaaggggcgggccaccttttcagcggataccagcaagaatacagcttacctgcagatgaatagcctccgggcagaagataccgctgtttattattgcacgagacgggtgccaataagactggactattgggggcaagggactcttgtcaccgtcagttcaacgcgtatccagaaccctgatcctgccgtgtaccagctgcgggatagcaagagcagcgacaagagcgtgtgtctgttcaccgacttcgacagccagaccaacgtgtcccagagcaaggactccgacgtgtacatcaccgataagtgcgtgctggacatgcggagcatggacttcaagagcaactccgccgtggcctggtccaacaagtccgatttcgcctgcgccaacgccttcaacaacagcattatccccgaggacacattcttcccaagccccgagagcagctgcgacgtgaagctggtggaaaagagcttcgagacagacaccaacctgaacttccagatcctgtacgagatcctgctgggcaaggccaccctgtacgccgtgctggtgtctgccctggtgctgatggctatggtcaagcggaaggacagccgggga

SEQ ID NO: 38499 - DNA, 1875 bp, synthetic construct
  source 1..1875: mol_type = other DNA
atggccttaccagtgaccgccttgctcctgccgctggccttgctgctccacgccgccaggccggacatcgtgatgacacagagccctgatagcctggccgtgtctctgggagagagagccaccattaactgcaaggccagccagagcgtggactacgacggcgacagcttcctgaactggtatcagcagaagcccggccagcctcctaagctgctgatctacgccgccagcaatctggaaagcggcgtgccaagcagattttccggctctggcagcggcaccgatttcaccctgacaatatccagcctccagcctgaggacgtggccgtgtactactgccagcagagcaacgacgaccctctgacctttggacagggcaccaaggtggaaatcaaactcgagatccagaaccctgatcctgccgtgtaccagctgcgggatagcaagagcagcgacaagagcgtgtgtctgttcaccgacttcgacagccagaccaacgtgtcccagagcaaggactccgacgtgtacatcaccgataagtgcgtgctggacatgcggagcatggacttcaagagcaactccgccgtggcctggtccaacaagtccgatttcgcctgcgccaacgccttcaacaacagcattatccccgaggacacattcttcccaagccccgagagcagctgcgacgtgaagctggtggaaaagagcttcgagacagacaccaacctgaacttccagatcctgtacgagatcctgctgggcaaggccaccctgtacgccgtgctggtgtctgccctggtgctgatggctatggtcaagcggaaggacagccggggacgcgccaagagaagcggatctggcgtgaagcagaccctgaatttcgacctgctgaagctggctggcgacgtggaatccaacccaggccctactagtatggactggatttggcgcatccttttccttgtcggcgctgctaccggcgcgcattccttcgaagaagtccaacttgtggagtctggagggggcctggtgcagcccggcggctctctcagactgtcttgtgcggcaagcggctacaccttcagctcttactggatagaatgggtgaggcaggcacctggaaagggactggagtggattggagagattctgccaggagggggagatacaaattacaatgaaatcttcaaggggcgggccaccttttcagcggataccagcaagaatacagcttacctgcagatgaatagcctccgggcagaagataccgctgtttattattgcacgagacgggtgccaataagactggactattgggggcaagggactcttgtcaccgtcagttcaacgcgtgaggacctgaagaacgtgttcccacctgaggtggccgtgttcgagcctagcgaggccgagatcagccacacccagaaagccaccctcgtgtgcctggctaccggcttctaccccgaccatgtggaactgtcttggtgggtcaacggcaaagaggtgcacagcggcgtgtgtaccgacccccagccactgaaagaacagcccgccctgaacgacagccggtactgcctgagcagcagactgagagtgtccgccaccttctggcagaacccccggaaccacttcagatgccaggtgcagttctacggcctgagcgagaacgacgagtggacccaggacagagccaagcccgtgacccagatcgtgtctgccgaagcctggggcagagccgattgcggctttaccagcgagagctaccagcagggcgtgctgagcgccaccaacctgagcgtgatcggcttcagaatcctgctgctgaaagtggccggctttaacctgctgatgaccctgcggctgtggtccagc

SEQ ID NO: 38500 - DNA, 2268 bp, synthetic construct
  source 1..2268: mol_type = other DNA
atggccttaccagtgaccgccttgctcctgccgctggccttgctgctccacgccgccaggccggaagtgcagctggttgaatctggcggaggactggttcagcctggcggatctctgagactgtcttgtgccgccagcggcttcagcttcagcgacttttggatgagctgggtccgacaggcccctggcaaaggacttgaatgggtcgccacaatcagccaggccggcagcgagaaggactacgtggactctgtgaagggcagattcaccatcagccgggacaacgccaagaagtccctgtacctccagatgaacagcctgagagccgaggacaccgccgtgtactattgtgcctctggcgtgtacagcttcgactacagaggccagggcaccctggtcacagtctcttctggtaccggcggaggcggatctggcggcggaggtagcggtggcggaggatctgaattcgacatcgtgatgacacagagccctgatagcctggccgtgtctctgggagagagagccaccattaactgcaaggccagccagagcgtggactacgacggcgacagcttcctgaactggtatcagcagaagcccggccagcctcctaagctgctgatctacgccgccagcaatctggaaagcggcgtgccaagcagattttccggctctggcagcggcaccgatttcaccctgacaatatccagcctccagcctgaggacgtggccgtgtactactgccagcagagcaacgacgaccctctgacctttggacagggcaccaaggtggaaatcaaactcgaggacctgaagaacgtgttcccacctgaggtggccgtgttcgagcctagcgaggccgagatcagccacacccagaaagccaccctcgtgtgcctggctaccggcttctaccccgaccatgtggaactgtcttggtgggtcaacggcaaagaggtgcacagcggcgtgtgtaccgacccccagccactgaaagaacagcccgccctgaacgacagccggtactgcctgagcagcagactgagagtgtccgccaccttctggcagaacccccggaaccacttcagatgccaggtgcagttctacggcctgagcgagaacgacgagtggacccaggacagagccaagcccgtgacccagatcgtgtctgccgaagcctggggcagagccgattgcggctttaccagcgagagctaccagcagggcgtgctgagcgccaccaacctgagcgtgatcggcttcagaatcctgctgctgaaagtggccggctttaacctgctgatgaccctgcggctgtggtccagcagggccaagcgatctggatctggagcaacaaacttctcactactcaaacaagcaggtgacgtggaggagaatcccgggcctactagtatggactggatttggcgcatccttttccttgtcggcgctgctaccggcgcgcattccttcgaagaagtccaacttgtggagtctggagggggcctggtgcagcccggcggctctctcagactgtcttgtgcggcaagcggctacaccttcagctcttactggatagaatgggtgaggcaggcacctggaaagggactggagtggattggagagattctgccaggagggggagatacaaattacaatgaaatcttcaaggggcgggccaccttttcagcggataccagcaagaatacagcttacctgcagatgaatagcctccgggcagaagataccgctgtttattattgcacgagacgggtgccaataagactggactattgggggcaagggactcttgtcaccgtcagttcaacgcgtatccagaaccctgatcctgccgtgtaccagctgcgggatagcaagagcagcgacaagagcgtgtgtctgttcaccgacttcgacagccagaccaacgtgtcccagagcaaggactccgacgtgtacatcaccgataagtgcgtgctggacatgcggagcatggacttcaagagcaactccgccgtggcctggtccaacaagtccgatttcgcctgcgccaacgccttcaacaacagcattatccccgaggacacattcttcccaagccccgagagcagctgcgacgtgaagctggtggaaaagagcttcgagacagacaccaacctgaacttccagatcctgtacgagatcctgctgggcaaggccaccctgtacgccgtgctggtgtctgccctggtgctgatggctatggtcaagcggaaggacagccgggga

SEQ ID NO: 38501 - DNA, 2280 bp, synthetic construct
  source 1..2280: mol_type = other DNA
atggccttaccagtgaccgccttgctcctgccgctggccttgctgctccacgccgccaggccggaagtgcagctggttgaatctggcggaggactggttcagcctggcggatctctgagactgtcttgtgccgccagcggcttcagcttcagcgacttttggatgagctgggtccgacaggcccctggcaaaggacttgaatgggtcgccacaatcagccaggccggcagcgagaaggactacgtggactctgtgaagggcagattcaccatcagccgggacaacgccaagaagtccctgtacctccagatgaacagcctgagagccgaggacaccgccgtgtactattgtgcctctggcgtgtacagcttcgactacagaggccagggcaccctggtcacagtctcttctggtaccggcggaggcggatctggcggcggaggtagcggtggcggaggatctgaattcgacatcgtgatgacacagagccctgatagcctggccgtgtctctgggagagagagccaccattaactgcaaggccagccagagcgtggactacgacggcgacagcttcctgaactggtatcagcagaagcccggccagcctcctaagctgctgatctacgccgccagcaatctggaaagcggcgtgccaagcagattttccggctctggcagcggcaccgatttcaccctgacaatatccagcctccagcctgaggacgtggccgtgtactactgccagcagagcaacgacgaccctctgacctttggacagggcaccaaggtggaaatcaaactcgagatccagaaccctgatcctgccgtgtaccagctgcgggatagcaagagcagcgacaagagcgtgtgtctgttcaccgacttcgacagccagaccaacgtgtcccagagcaaggactccgacgtgtacatcaccgataagtgcgtgctggacatgcggagcatggacttcaagagcaactccgccgtggcctggtccaacaagtccgatttcgcctgcgccaacgccttcaacaacagcattatccccgaggacacattcttcccaagccccgagagcagctgcgacgtgaagctggtggaaaagagcttcgagacagacaccaacctgaacttccagatcctgtacgagatcctgctgggcaaggccaccctgtacgccgtgctggtgtctgccctggtgctgatggctatggtcaagcggaaggacagccggggacgcgccaagagaagcggatctggcgtgaagcagaccctgaatttcgacctgctgaagctggctggcgacgtggaatccaacccaggccctactagtatggactggatttggcgcatccttttccttgtcggcgctgctaccggcgcgcattccttcgaagaagtccaacttgtggagtctggagggggcctggtgcagcccggcggctctctcagactgtcttgtgcggcaagcggctacaccttcagctcttactggatagaatgggtgaggcaggcacctggaaagggactggagtggattggagagattctgccaggagggggagatacaaattacaatgaaatcttcaaggggcgggccaccttttcagcggataccagcaagaatacagcttacctgcagatgaatagcctccgggcagaagataccgctgtttattattgcacgagacgggtgccaataagactggactattgggggcaagggactcttgtcaccgtcagttcaacgcgtgaggacctgaagaacgtgttcccacctgaggtggccgtgttcgagcctagcgaggccgagatcagccacacccagaaagccaccctcgtgtgcctggctaccggcttctaccccgaccatgtggaactgtcttggtgggtcaacggcaaagaggtgcacagcggcgtgtgtaccgacccccagccactgaaagaacagcccgccctgaacgacagccggtactgcctgagcagcagactgagagtgtccgccaccttctggcagaacccccggaaccacttcagatgccaggtgcagttctacggcctgagcgagaacgacgagtggacccaggacagagccaagcccgtgacccagatcgtgtctgccgaagcctggggcagagccgattgcggctttaccagcgagagctaccagcagggcgtgctgagcgccaccaacctgagcgtgatcggcttcagaatcctgctgctgaaagtggccggctttaacctgctgatgaccctgcggctgtggtccagc

SEQ ID NO: 38502 - DNA, 2679 bp, synthetic construct
  source 1..2679: mol_type = other DNA
atggccttaccagtgaccgccttgctcctgccgctggccttgctgctccacgccgccaggccggaagtgcagctggttgaatctggcggaggactggttcagcctggcggatctctgagactgtcttgtgccgccagcggcttcagcttcagcgacttttggatgagctgggtccgacaggcccctggcaaaggacttgaatgggtcgccacaatcagccaggccggcagcgagaaggactacgtggactctgtgaagggcagattcaccatcagccgggacaacgccaagaagtccctgtacctccagatgaacagcctgagagccgaggacaccgccgtgtactattgtgcctctggcgtgtacagcttcgactacagaggccagggcaccctggtcacagtctcttctggtaccggcggaggcggatctggcggcggaggtagcggtggcggaggatctgaattcgacatcgtgatgacacagagccctgatagcctggccgtgtctctgggagagagagccaccattaactgcaaggccagccagagcgtggactacgacggcgacagcttcctgaactggtatcagcagaagcccggccagcctcctaagctgctgatctacgccgccagcaatctggaaagcggcgtgccaagcagattttccggctctggcagcggcaccgatttcaccctgacaatatccagcctccagcctgaggacgtggccgtgtactactgccagcagagcaacgacgaccctctgacctttggacagggcaccaaggtggaaatcaaactcgaggacctgaagaacgtgttcccacctgaggtggccgtgttcgagcctagcgaggccgagatcagccacacccagaaagccaccctcgtgtgcctggctaccggcttctaccccgaccatgtggaactgtcttggtgggtcaacggcaaagaggtgcacagcggcgtgtgtaccgacccccagccactgaaagaacagcccgccctgaacgacagccggtactgcctgagcagcagactgagagtgtccgccaccttctggcagaacccccggaaccacttcagatgccaggtgcagttctacggcctgagcgagaacgacgagtggacccaggacagagccaagcccgtgacccagatcgtgtctgccgaagcctggggcagagccgattgcggctttaccagcgagagctaccagcagggcgtgctgagcgccaccaacctgagcgtgatcggcttcagaatcctgctgctgaaagtggccggctttaacctgctgatgaccctgcggctgtggtccagcagggccaagcgatctggatctggagcaacaaacttctcactactcaaacaagcaggtgacgtggaggagaatcccgggcctactagtatggactggatttggcgcatccttttccttgtcggcgctgctaccggcgcgcattccgggccccagctccagctgcaagagtctggacctggcctggtcaagcctagcgagacactgagcctgacctgtaccgtgtccggcgatagcatcagcagcggcgattactactggggctggatcagacagcctcctggcaaaggactggaatggatcggccacatctactacagcggcgtgacctactacaaccccagcctgaagtccagagtgaccatcagcgtggacaccagccggaaccagttctccctgaagctgtctagcgtgacagccgccgataccgccgtgtactactgcaccagagaggacagcagcaactggcggagtagaggccagggaacactggtcacagttagctctggatccggcggaggcggaagtggaggcggaggatctggcggcggaggctctttcgaagaagtccaacttgtggagtctggagggggcctggtgcagcccggcggctctctcagactgtcttgtgcggcaagcggctacaccttcagctcttactggatagaatgggtgaggcaggcacctggaaagggactggagtggattggagagattctgccaggagggggagatacaaattacaatgaaatcttcaaggggcgggccaccttttcagcggataccagcaagaatacagcttacctgcagatgaatagcctccgggcagaagataccgctgtttattattgcacgagacgggtgccaataagactggactattgggggcaagggactcttgtcaccgtcagttcaacgcgtatccagaaccctgatcctgccgtgtaccagctgcgggatagcaagagcagcgacaagagcgtgtgtctgttcaccgacttcgacagccagaccaacgtgtcccagagcaaggactccgacgtgtacatcaccgataagtgcgtgctggacatgcggagcatggacttcaagagcaactccgccgtggcctggtccaacaagtccgatttcgcctgcgccaacgccttcaacaacagcattatccccgaggacacattcttcccaagccccgagagcagctgcgacgtgaagctggtggaaaagagcttcgagacagacaccaacctgaacttccagatcctgtacgagatcctgctgggcaaggccaccctgtacgccgtgctggtgtctgccctggtgctgatggctatggtcaagcggaaggacagccgggga

SEQ ID NO: 38503 - DNA, 2691 bp, synthetic construct
  source 1..2691: mol_type = other DNA
atggccttaccagtgaccgccttgctcctgccgctggccttgctgctccacgccgccaggccggaagtgcagctggttgaatctggcggaggactggttcagcctggcggatctctgagactgtcttgtgccgccagcggcttcagcttcagcgacttttggatgagctgggtccgacaggcccctggcaaaggacttgaatgggtcgccacaatcagccaggccggcagcgagaaggactacgtggactctgtgaagggcagattcaccatcagccgggacaacgccaagaagtccctgtacctccagatgaacagcctgagagccgaggacaccgccgtgtactattgtgcctctggcgtgtacagcttcgactacagaggccagggcaccctggtcacagtctcttctggtaccggcggaggcggatctggcggcggaggtagcggtggcggaggatctgaattcgacatcgtgatgacacagagccctgatagcctggccgtgtctctgggagagagagccaccattaactgcaaggccagccagagcgtggactacgacggcgacagcttcctgaactggtatcagcagaagcccggccagcctcctaagctgctgatctacgccgccagcaatctggaaagcggcgtgccaagcagattttccggctctggcagcggcaccgatttcaccctgacaatatccagcctccagcctgaggacgtggccgtgtactactgccagcagagcaacgacgaccctctgacctttggacagggcaccaaggtggaaatcaaactcgagatccagaaccctgatcctgccgtgtaccagctgcgggatagcaagagcagcgacaagagcgtgtgtctgttcaccgacttcgacagccagaccaacgtgtcccagagcaaggactccgacgtgtacatcaccgataagtgcgtgctggacatgcggagcatggacttcaagagcaactccgccgtggcctggtccaacaagtccgatttcgcctgcgccaacgccttcaacaacagcattatccccgaggacacattcttcccaagccccgagagcagctgcgacgtgaagctggtggaaaagagcttcgagacagacaccaacctgaacttccagatcctgtacgagatcctgctgggcaaggccaccctgtacgccgtgctggtgtctgccctggtgctgatggctatggtcaagcggaaggacagccggggacgcgccaagagaagcggatctggcgtgaagcagaccctgaatttcgacctgctgaagctggctggcgacgtggaatccaacccaggccctactagtatggactggatttggcgcatccttttccttgtcggcgctgctaccggcgcgcattccgggccccagctccagctgcaagagtctggacctggcctggtcaagcctagcgagacactgagcctgacctgtaccgtgtccggcgatagcatcagcagcggcgattactactggggctggatcagacagcctcctggcaaaggactggaatggatcggccacatctactacagcggcgtgacctactacaaccccagcctgaagtccagagtgaccatcagcgtggacaccagccggaaccagttctccctgaagctgtctagcgtgacagccgccgataccgccgtgtactactgcaccagagaggacagcagcaactggcggagtagaggccagggaacactggtcacagttagctctggatccggcggaggcggaagtggaggcggaggatctggcggcggaggctctttcgaagaagtccaacttgtggagtctggagggggcctggtgcagcccggcggctctctcagactgtcttgtgcggcaagcggctacaccttcagctcttactggatagaatgggtgaggcaggcacctggaaagggactggagtggattggagagattctgccaggagggggagatacaaattacaatgaaatcttcaaggggcgggccaccttttcagcggataccagcaagaatacagcttacctgcagatgaatagcctccgggcagaagataccgctgtttattattgcacgagacgggtgccaataagactggactattgggggcaagggactcttgtcaccgtcagttcaacgcgtgaggacctgaagaacgtgttcccacctgaggtggccgtgttcgagcctagcgaggccgagatcagccacacccagaaagccaccctcgtgtgcctggctaccggcttctaccccgaccatgtggaactgtcttggtgggtcaacggcaaagaggtgcacagcggcgtgtgtaccgacccccagccactgaaagaacagcccgccctgaacgacagccggtactgcctgagcagcagactgagagtgtccgccaccttctggcagaacccccggaaccacttcagatgccaggtgcagttctacggcctgagcgagaacgacgagtggacccaggacagagccaagcccgtgacccagatcgtgtctgccgaagcctggggcagagccgattgcggctttaccagcgagagctaccagcagggcgtgctgagcgccaccaacctgagcgtgatcggcttcagaatcctgctgctgaaagtggccggctttaacctgctgatgaccctgcggctgtggtccagc

SEQ ID NO: 38504 - DNA, 2175 bp, synthetic construct
  source 1..2175: mol_type = other DNA
atggccttaccagtgaccgccttgctcctgccgctggccttgctgctccacgccgccaggccggacatcgtgatgacacagagccctgatagcctggccgtgtctctgggagagagagccaccattaactgcaaggccagccagagcgtggactacgacggcgacagcttcctgaactggtatcagcagaagcccggccagcctcctaagctgctgatctacgccgccagcaatctggaaagcggcgtgccaagcagattttccggctctggcagcggcaccgatttcaccctgacaatatccagcctccagcctgaggacgtggccgtgtactactgccagcagagcaacgacgaccctctgacctttggacagggcaccaaggtggaaatcaaactcgaggacctgaagaacgtgttcccacctgaggtggccgtgttcgagcctagcgaggccgagatcagccacacccagaaagccaccctcgtgtgcctggctaccggcttctaccccgaccatgtggaactgtcttggtgggtcaacggcaaagaggtgcacagcggcgtgtgtaccgacccccagccactgaaagaacagcccgccctgaacgacagccggtactgcctgagcagcagactgagagtgtccgccaccttctggcagaacccccggaaccacttcagatgccaggtgcagttctacggcctgagcgagaacgacgagtggacccaggacagagccaagcccgtgacccagatcgtgtctgccgaagcctggggcagagccgatgatgtgattaagatccactggcaggaaaagaagtccaacaccatcctgggcagccaggaaggcaacaccatgaagaccaacgacacctacatgaagttcagctggctgaccgtgcccgagaagtccctggacaaagaacacagatgcatcgtgcggcacgaaaacaacaagaacggcgtggaccaggaaatcatcttcccacccatcaagaccgatgtgattacaatggaccccaaggacaactgctccaaggacgccaacgataccctgctgctccagctgaccaacaccagcgcctactacatgtacttgttgctgctgctgaagtccgtggtgtacttcgccatcatcacatgctgcctgctgatggctatggtcaagcggaaggacagccggggaagggccaagcgatctggatctggagcaacaaacttctcactactcaaacaagcaggtgacgtggaggagaatcccgggcctactagtatggactggatttggcgcatccttttccttgtcggcgctgctaccggcgcgcattccttcgaagaagtccaacttgtggagtctggagggggcctggtgcagcccggcggctctctcagactgtcttgtgcggcaagcggctacaccttcagctcttactggatagaatgggtgaggcaggcacctggaaagggactggagtggattggagagattctgccaggagggggagatacaaattacaatgaaatcttcaaggggcgggccaccttttcagcggataccagcaagaatacagcttacctgcagatgaatagcctccgggcagaagataccgctgtttattattgcacgagacgggtgccaataagactggactattgggggcaagggactcttgtcaccgtcagttcaacgcgtatccagaaccctgatcctgccgtgtaccagctgcgggatagcaagagcagcgacaagagcgtgtgtctgttcaccgacttcgacagccagaccaacgtgtcccagagcaaggactccgacgtgtacatcaccgataagtgcgtgctggacatgcggagcatggacttcaagagcaactccgccgtggcctggtccaacaagtccgatttcgcctgcgccaacgccttcaacaacagcattatccccgaggacacattcttcccaagccccgagagcagcgactccaccgaccacgtgaagcccaaagagacagagaacaccaagcagcccagcaagagctgccacaagcccaaggccatcgtgcacaccgagaaagtgaacatgatgagcctgaccgtgctgggcctgcggatgctgttcgccaaaaccgtggccgtgaacttcctgctgaccgccaagctgttcttcctcctcaccgcc

SEQ ID NO: 38505 - DNA, 2187 bp, synthetic construct
  source 1..2187: mol_type = other DNA
atggccttaccagtgaccgccttgctcctgccgctggccttgctgctccacgccgccaggccggacatcgtgatgacacagagccctgatagcctggccgtgtctctgggagagagagccaccattaactgcaaggccagccagagcgtggactacgacggcgacagcttcctgaactggtatcagcagaagcccggccagcctcctaagctgctgatctacgccgccagcaatctggaaagcggcgtgccaagcagattttccggctctggcagcggcaccgatttcaccctgacaatatccagcctccagcctgaggacgtggccgtgtactactgccagcagagcaacgacgaccctctgacctttggacagggcaccaaggtggaaatcaaactcgagatccagaaccctgatcctgccgtgtaccagctgcgggatagcaagagcagcgacaagagcgtgtgtctgttcaccgacttcgacagccagaccaacgtgtcccagagcaaggactccgacgtgtacatcaccgataagtgcgtgctggacatgcggagcatggacttcaagagcaactccgccgtggcctggtccaacaagtccgatttcgcctgcgccaacgccttcaacaacagcattatccccgaggacacattcttcccaagccccgagagcagcgactccaccgaccacgtgaagcccaaagagacagagaacaccaagcagcccagcaagagctgccacaagcccaaggccatcgtgcacaccgagaaagtgaacatgatgagcctgaccgtgctgggcctgcggatgctgttcgccaaaaccgtggccgtgaacttcctgctgaccgccaagctgttcttcctcctcaccgcccgcgccaagagaagcggatctggcgtgaagcagaccctgaatttcgacctgctgaagctggctggcgacgtggaatccaacccaggccctactagtatggactggatttggcgcatccttttccttgtcggcgctgctaccggcgcgcattccttcgaagaagtccaacttgtggagtctggagggggcctggtgcagcccggcggctctctcagactgtcttgtgcggcaagcggctacaccttcagctcttactggatagaatgggtgaggcaggcacctggaaagggactggagtggattggagagattctgccaggagggggagatacaaattacaatgaaatcttcaaggggcgggccaccttttcagcggataccagcaagaatacagcttacctgcagatgaatagcctccgggcagaagataccgctgtttattattgcacgagacgggtgccaataagactggactattgggggcaagggactcttgtcaccgtcagttcaacgcgtgaggacctgaagaacgtgttcccacctgaggtggccgtgttcgagcctagcgaggccgagatcagccacacccagaaagccaccctcgtgtgcctggctaccggcttctaccccgaccatgtggaactgtcttggtgggtcaacggcaaagaggtgcacagcggcgtgtgtaccgacccccagccactgaaagaacagcccgccctgaacgacagccggtactgcctgagcagcagactgagagtgtccgccaccttctggcagaacccccggaaccacttcagatgccaggtgcagttctacggcctgagcgagaacgacgagtggacccaggacagagccaagcccgtgacccagatcgtgtctgccgaagcctggggcagagccgatgatgtgattaagatccactggcaggaaaagaagtccaacaccatcctgggcagccaggaaggcaacaccatgaagaccaacgacacctacatgaagttcagctggctgaccgtgcccgagaagtccctggacaaagaacacagatgcatcgtgcggcacgaaaacaacaagaacggcgtggaccaggaaatcatcttcccacccatcaagaccgatgtgattacaatggaccccaaggacaactgctccaaggacgccaacgataccctgctgctccagctgaccaacaccagcgcctactacatgtacttgttgctgctgctgaagtccgtggtgtacttcgccatcatcacatgctgcctgctgatggctatggtcaagcggaaggacagccgggga

SEQ ID NO: 38506 - DNA, 2580 bp, synthetic construct
  source 1..2580: mol_type = other DNA
atggccttaccagtgaccgccttgctcctgccgctggccttgctgctccacgccgccaggccggaagtgcagctggttgaatctggcggaggactggttcagcctggcggatctctgagactgtcttgtgccgccagcggcttcagcttcagcgacttttggatgagctgggtccgacaggcccctggcaaaggacttgaatgggtcgccacaatcagccaggccggcagcgagaaggactacgtggactctgtgaagggcagattcaccatcagccgggacaacgccaagaagtccctgtacctccagatgaacagcctgagagccgaggacaccgccgtgtactattgtgcctctggcgtgtacagcttcgactacagaggccagggcaccctggtcacagtctcttctggtaccggcggaggcggatctggcggcggaggtagcggtggcggaggatctgaattcgacatcgtgatgacacagagccctgatagcctggccgtgtctctgggagagagagccaccattaactgcaaggccagccagagcgtggactacgacggcgacagcttcctgaactggtatcagcagaagcccggccagcctcctaagctgctgatctacgccgccagcaatctggaaagcggcgtgccaagcagattttccggctctggcagcggcaccgatttcaccctgacaatatccagcctccagcctgaggacgtggccgtgtactactgccagcagagcaacgacgaccctctgacctttggacagggcaccaaggtggaaatcaaactcgaggacctgaagaacgtgttcccacctgaggtggccgtgttcgagcctagcgaggccgagatcagccacacccagaaagccaccctcgtgtgcctggctaccggcttctaccccgaccatgtggaactgtcttggtgggtcaacggcaaagaggtgcacagcggcgtgtgtaccgacccccagccactgaaagaacagcccgccctgaacgacagccggtactgcctgagcagcagactgagagtgtccgccaccttctggcagaacccccggaaccacttcagatgccaggtgcagttctacggcctgagcgagaacgacgagtggacccaggacagagccaagcccgtgacccagatcgtgtctgccgaagcctggggcagagccgatgatgtgattaagatccactggcaggaaaagaagtccaacaccatcctgggcagccaggaaggcaacaccatgaagaccaacgacacctacatgaagttcagctggctgaccgtgcccgagaagtccctggacaaagaacacagatgcatcgtgcggcacgaaaacaacaagaacggcgtggaccaggaaatcatcttcccacccatcaagaccgatgtgattacaatggaccccaaggacaactgctccaaggacgccaacgataccctgctgctccagctgaccaacaccagcgcctactacatgtacttgttgctgctgctgaagtccgtggtgtacttcgccatcatcacatgctgcctgctgatggctatggtcaagcggaaggacagccggggaagggccaagcgatctggatctggagcaacaaacttctcactactcaaacaagcaggtgacgtggaggagaatcccgggcctactagtatggactggatttggcgcatccttttccttgtcggcgctgctaccggcgcgcattccttcgaagaagtccaacttgtggagtctggagggggcctggtgcagcccggcggctctctcagactgtcttgtgcggcaagcggctacaccttcagctcttactggatagaatgggtgaggcaggcacctggaaagggactggagtggattggagagattctgccaggagggggagatacaaattacaatgaaatcttcaaggggcgggccaccttttcagcggataccagcaagaatacagcttacctgcagatgaatagcctccgggcagaagataccgctgtttattattgcacgagacgggtgccaataagactggactattgggggcaagggactcttgtcaccgtcagttcaacgcgtatccagaaccctgatcctgccgtgtaccagctgcgggatagcaagagcagcgacaagagcgtgtgtctgttcaccgacttcgacagccagaccaacgtgtcccagagcaaggactccgacgtgtacatcaccgataagtgcgtgctggacatgcggagcatggacttcaagagcaactccgccgtggcctggtccaacaagtccgatttcgcctgcgccaacgccttcaacaacagcattatccccgaggacacattcttcccaagccccgagagcagcgactccaccgaccacgtgaagcccaaagagacagagaacaccaagcagcccagcaagagctgccacaagcccaaggccatcgtgcacaccgagaaagtgaacatgatgagcctgaccgtgctgggcctgcggatgctgttcgccaaaaccgtggccgtgaacttcctgctgaccgccaagctgttcttcctcctcaccgcc

SEQ ID NO: 38507 - DNA, 2592 bp, synthetic construct
  source 1..2592: mol_type = other DNA
atggccttaccagtgaccgccttgctcctgccgctggccttgctgctccacgccgccaggccggaagtgcagctggttgaatctggcggaggactggttcagcctggcggatctctgagactgtcttgtgccgccagcggcttcagcttcagcgacttttggatgagctgggtccgacaggcccctggcaaaggacttgaatgggtcgccacaatcagccaggccggcagcgagaaggactacgtggactctgtgaagggcagattcaccatcagccgggacaacgccaagaagtccctgtacctccagatgaacagcctgagagccgaggacaccgccgtgtactattgtgcctctggcgtgtacagcttcgactacagaggccagggcaccctggtcacagtctcttctggtaccggcggaggcggatctggcggcggaggtagcggtggcggaggatctgaattcgacatcgtgatgacacagagccctgatagcctggccgtgtctctgggagagagagccaccattaactgcaaggccagccagagcgtggactacgacggcgacagcttcctgaactggtatcagcagaagcccggccagcctcctaagctgctgatctacgccgccagcaatctggaaagcggcgtgccaagcagattttccggctctggcagcggcaccgatttcaccctgacaatatccagcctccagcctgaggacgtggccgtgtactactgccagcagagcaacgacgaccctctgacctttggacagggcaccaaggtggaaatcaaactcgagatccagaaccctgatcctgccgtgtaccagctgcgggatagcaagagcagcgacaagagcgtgtgtctgttcaccgacttcgacagccagaccaacgtgtcccagagcaaggactccgacgtgtacatcaccgataagtgcgtgctggacatgcggagcatggacttcaagagcaactccgccgtggcctggtccaacaagtccgatttcgcctgcgccaacgccttcaacaacagcattatccccgaggacacattcttcccaagccccgagagcagcgactccaccgaccacgtgaagcccaaagagacagagaacaccaagcagcccagcaagagctgccacaagcccaaggccatcgtgcacaccgagaaagtgaacatgatgagcctgaccgtgctgggcctgcggatgctgttcgccaaaaccgtggccgtgaacttcctgctgaccgccaagctgttcttcctcctcaccgcccgcgccaagagaagcggatctggcgtgaagcagaccctgaatttcgacctgctgaagctggctggcgacgtggaatccaacccaggccctactagtatggactggatttggcgcatccttttccttgtcggcgctgctaccggcgcgcattccttcgaagaagtccaacttgtggagtctggagggggcctggtgcagcccggcggctctctcagactgtcttgtgcggcaagcggctacaccttcagctcttactggatagaatgggtgaggcaggcacctggaaagggactggagtggattggagagattctgccaggagggggagatacaaattacaatgaaatcttcaaggggcgggccaccttttcagcggataccagcaagaatacagcttacctgcagatgaatagcctccgggcagaagataccgctgtttattattgcacgagacgggtgccaataagactggactattgggggcaagggactcttgtcaccgtcagttcaacgcgtgaggacctgaagaacgtgttcccacctgaggtggccgtgttcgagcctagcgaggccgagatcagccacacccagaaagccaccctcgtgtgcctggctaccggcttctaccccgaccatgtggaactgtcttggtgggtcaacggcaaagaggtgcacagcggcgtgtgtaccgacccccagccactgaaagaacagcccgccctgaacgacagccggtactgcctgagcagcagactgagagtgtccgccaccttctggcagaacccccggaaccacttcagatgccaggtgcagttctacggcctgagcgagaacgacgagtggacccaggacagagccaagcccgtgacccagatcgtgtctgccgaagcctggggcagagccgatgatgtgattaagatccactggcaggaaaagaagtccaacaccatcctgggcagccaggaaggcaacaccatgaagaccaacgacacctacatgaagttcagctggctgaccgtgcccgagaagtccctggacaaagaacacagatgcatcgtgcggcacgaaaacaacaagaacggcgtggaccaggaaatcatcttcccacccatcaagaccgatgtgattacaatggaccccaaggacaactgctccaaggacgccaacgataccctgctgctccagctgaccaacaccagcgcctactacatgtacttgttgctgctgctgaagtccgtggtgtacttcgccatcatcacatgctgcctgctgatggctatggtcaagcggaaggacagccgggga

SEQ ID NO: 38508 - DNA, 2991 bp, synthetic construct
  source 1..2991: mol_type = other DNA
atggccttaccagtgaccgccttgctcctgccgctggccttgctgctccacgccgccaggccggaagtgcagctggttgaatctggcggaggactggttcagcctggcggatctctgagactgtcttgtgccgccagcggcttcagcttcagcgacttttggatgagctgggtccgacaggcccctggcaaaggacttgaatgggtcgccacaatcagccaggccggcagcgagaaggactacgtggactctgtgaagggcagattcaccatcagccgggacaacgccaagaagtccctgtacctccagatgaacagcctgagagccgaggacaccgccgtgtactattgtgcctctggcgtgtacagcttcgactacagaggccagggcaccctggtcacagtctcttctggtaccggcggaggcggatctggcggcggaggtagcggtggcggaggatctgaattcgacatcgtgatgacacagagccctgatagcctggccgtgtctctgggagagagagccaccattaactgcaaggccagccagagcgtggactacgacggcgacagcttcctgaactggtatcagcagaagcccggccagcctcctaagctgctgatctacgccgccagcaatctggaaagcggcgtgccaagcagattttccggctctggcagcggcaccgatttcaccctgacaatatccagcctccagcctgaggacgtggccgtgtactactgccagcagagcaacgacgaccctctgacctttggacagggcaccaaggtggaaatcaaactcgaggacctgaagaacgtgttcccacctgaggtggccgtgttcgagcctagcgaggccgagatcagccacacccagaaagccaccctcgtgtgcctggctaccggcttctaccccgaccatgtggaactgtcttggtgggtcaacggcaaagaggtgcacagcggcgtgtgtaccgacccccagccactgaaagaacagcccgccctgaacgacagccggtactgcctgagcagcagactgagagtgtccgccaccttctggcagaacccccggaaccacttcagatgccaggtgcagttctacggcctgagcgagaacgacgagtggacccaggacagagccaagcccgtgacccagatcgtgtctgccgaagcctggggcagagccgatgatgtgattaagatccactggcaggaaaagaagtccaacaccatcctgggcagccaggaaggcaacaccatgaagaccaacgacacctacatgaagttcagctggctgaccgtgcccgagaagtccctggacaaagaacacagatgcatcgtgcggcacgaaaacaacaagaacggcgtggaccaggaaatcatcttcccacccatcaagaccgatgtgattacaatggaccccaaggacaactgctccaaggacgccaacgataccctgctgctccagctgaccaacaccagcgcctactacatgtacttgttgctgctgctgaagtccgtggtgtacttcgccatcatcacatgctgcctgctgatggctatggtcaagcggaaggacagccggggaagggccaagcgatctggatctggagcaacaaacttctcactactcaaacaagcaggtgacgtggaggagaatcccgggcctactagtatggactggatttggcgcatccttttccttgtcggcgctgctaccggcgcgcattccgggccccagctccagctgcaagagtctggacctggcctggtcaagcctagcgagacactgagcctgacctgtaccgtgtccggcgatagcatcagcagcggcgattactactggggctggatcagacagcctcctggcaaaggactggaatggatcggccacatctactacagcggcgtgacctactacaaccccagcctgaagtccagagtgaccatcagcgtggacaccagccggaaccagttctccctgaagctgtctagcgtgacagccgccgataccgccgtgtactactgcaccagagaggacagcagcaactggcggagtagaggccagggaacactggtcacagttagctctggatccggcggaggcggaagtggaggcggaggatctggcggcggaggctctttcgaagaagtccaacttgtggagtctggagggggcctggtgcagcccggcggctctctcagactgtcttgtgcggcaagcggctacaccttcagctcttactggatagaatgggtgaggcaggcacctggaaagggactggagtggattggagagattctgccaggagggggagatacaaattacaatgaaatcttcaaggggcgggccaccttttcagcggataccagcaagaatacagcttacctgcagatgaatagcctccgggcagaagataccgctgtttattattgcacgagacgggtgccaataagactggactattgggggcaagggactcttgtcaccgtcagttcaacgcgtatccagaaccctgatcctgccgtgtaccagctgcgggatagcaagagcagcgacaagagcgtgtgtctgttcaccgacttcgacagccagaccaacgtgtcccagagcaaggactccgacgtgtacatcaccgataagtgcgtgctggacatgcggagcatggacttcaagagcaactccgccgtggcctggtccaacaagtccgatttcgcctgcgccaacgccttcaacaacagcattatccccgaggacacattcttcccaagccccgagagcagcgactccaccgaccacgtgaagcccaaagagacagagaacaccaagcagcccagcaagagctgccacaagcccaaggccatcgtgcacaccgagaaagtgaacatgatgagcctgaccgtgctgggcctgcggatgctgttcgccaaaaccgtggccgtgaacttcctgctgaccgccaagctgttcttcctcctcaccgcc

SEQ ID NO: 38509 - DNA, 3003 bp, synthetic construct
  source 1..3003: mol_type = other DNA
atggccttaccagtgaccgccttgctcctgccgctggccttgctgctccacgccgccaggccggaagtgcagctggttgaatctggcggaggactggttcagcctggcggatctctgagactgtcttgtgccgccagcggcttcagcttcagcgacttttggatgagctgggtccgacaggcccctggcaaaggacttgaatgggtcgccacaatcagccaggccggcagcgagaaggactacgtggactctgtgaagggcagattcaccatcagccgggacaacgccaagaagtccctgtacctccagatgaacagcctgagagccgaggacaccgccgtgtactattgtgcctctggcgtgtacagcttcgactacagaggccagggcaccctggtcacagtctcttctggtaccggcggaggcggatctggcggcggaggtagcggtggcggaggatctgaattcgacatcgtgatgacacagagccctgatagcctggccgtgtctctgggagagagagccaccattaactgcaaggccagccagagcgtggactacgacggcgacagcttcctgaactggtatcagcagaagcccggccagcctcctaagctgctgatctacgccgccagcaatctggaaagcggcgtgccaagcagattttccggctctggcagcggcaccgatttcaccctgacaatatccagcctccagcctgaggacgtggccgtgtactactgccagcagagcaacgacgaccctctgacctttggacagggcaccaaggtggaaatcaaactcgagatccagaaccctgatcctgccgtgtaccagctgcgggatagcaagagcagcgacaagagcgtgtgtctgttcaccgacttcgacagccagaccaacgtgtcccagagcaaggactccgacgtgtacatcaccgataagtgcgtgctggacatgcggagcatggacttcaagagcaactccgccgtggcctggtccaacaagtccgatttcgcctgcgccaacgccttcaacaacagcattatccccgaggacacattcttcccaagccccgagagcagcgactccaccgaccacgtgaagcccaaagagacagagaacaccaagcagcccagcaagagctgccacaagcccaaggccatcgtgcacaccgagaaagtgaacatgatgagcctgaccgtgctgggcctgcggatgctgttcgccaaaaccgtggccgtgaacttcctgctgaccgccaagctgttcttcctcctcaccgcccgcgccaagagaagcggatctggcgtgaagcagaccctgaatttcgacctgctgaagctggctggcgacgtggaatccaacccaggccctactagtatggactggatttggcgcatccttttccttgtcggcgctgctaccggcgcgcattccgggccccagctccagctgcaagagtctggacctggcctggtcaagcctagcgagacactgagcctgacctgtaccgtgtccggcgatagcatcagcagcggcgattactactggggctggatcagacagcctcctggcaaaggactggaatggatcggccacatctactacagcggcgtgacctactacaaccccagcctgaagtccagagtgaccatcagcgtggacaccagccggaaccagttctccctgaagctgtctagcgtgacagccgccgataccgccgtgtactactgcaccagagaggacagcagcaactggcggagtagaggccagggaacactggtcacagttagctctggatccggcggaggcggaagtggaggcggaggatctggcggcggaggctctttcgaagaagtccaacttgtggagtctggagggggcctggtgcagcccggcggctctctcagactgtcttgtgcggcaagcggctacaccttcagctcttactggatagaatgggtgaggcaggcacctggaaagggactggagtggattggagagattctgccaggagggggagatacaaattacaatgaaatcttcaaggggcgggccaccttttcagcggataccagcaagaatacagcttacctgcagatgaatagcctccgggcagaagataccgctgtttattattgcacgagacgggtgccaataagactggactattgggggcaagggactcttgtcaccgtcagttcaacgcgtgaggacctgaagaacgtgttcccacctgaggtggccgtgttcgagcctagcgaggccgagatcagccacacccagaaagccaccctcgtgtgcctggctaccggcttctaccccgaccatgtggaactgtcttggtgggtcaacggcaaagaggtgcacagcggcgtgtgtaccgacccccagccactgaaagaacagcccgccctgaacgacagccggtactgcctgagcagcagactgagagtgtccgccaccttctggcagaacccccggaaccacttcagatgccaggtgcagttctacggcctgagcgagaacgacgagtggacccaggacagagccaagcccgtgacccagatcgtgtctgccgaagcctggggcagagccgatgatgtgattaagatccactggcaggaaaagaagtccaacaccatcctgggcagccaggaaggcaacaccatgaagaccaacgacacctacatgaagttcagctggctgaccgtgcccgagaagtccctggacaaagaacacagatgcatcgtgcggcacgaaaacaacaagaacggcgtggaccaggaaatcatcttcccacccatcaagaccgatgtgattacaatggaccccaaggacaactgctccaaggacgccaacgataccctgctgctccagctgaccaacaccagcgcctactacatgtacttgttgctgctgctgaagtccgtggtgtacttcgccatcatcacatgctgcctgctgatggctatggtcaagcggaaggacagccgggga

SEQ ID NO: 38510 - DNA, 2169 bp, synthetic construct
  source 1..2169: mol_type = other DNA
atggccttaccagtgaccgccttgctcctgccgctggccttgctgctccacgccgccaggccggacatcgtgatgacacagagccctgatagcctggccgtgtctctgggagagagagccaccattaactgcaaggccagccagagcgtggactacgacggcgacagcttcctgaactggtatcagcagaagcccggccagcctcctaagctgctgatctacgccgccagcaatctggaaagcggcgtgccaagcagattttccggctctggcagcggcaccgatttcaccctgacaatatccagcctccagcctgaggacgtggccgtgtactactgccagcagagcaacgacgaccctctgacctttggacagggcaccaaggtggaaatcaaactcgaggacctgaagaacgtgttcccacctgaggtggccgtgttcgagcctagcgaggccgagatcagccacacccagaaagccaccctcgtgtgcctggctaccggcttctaccccgaccatgtggaactgtcttggtgggtcaacggcaaagaggtgcacagcggcgtgtgtaccgacccccagccactgaaagaacagcccgccctgaacgacagccggtactgcctgagcagcagactgagagtgtccgccaccttctggcagaacccccggaaccacttcagatgccaggtgcagttctacggcctgagcgagaacgacgagtggacccaggacagagccaagcccgtgacccagatcgtgtctgccgaagcctggggcagagccgatgatgtgattaagatccactggcaggaaaagaagtccaacaccatcctgggcagccaggaaggcaacaccatgaagaccaacgacacctacatgaagttcagctggctgaccgtgcccgagaagtccctggacaaagaacacagatgcatcgtgcggcacgaaaacaacaagaacggcgtggaccaggaaatcatcttcccacccatcaagaccgatgtgattacaatggaccccaaggacaactgctccaaggacgccaacgataccctgctgctccagctgaccaacaccagcgcctactacatgtacttgttgctgctgctgaagtccgtggtgtacttcgccatcatcacatgctgcctgctgcggagaaccgccttctgctgcaacggcgagaagtctagggccaagcgatctggatctggagcaacaaacttctcactactcaaacaagcaggtgacgtggaggagaatcccgggcctactagtatggactggatttggcgcatccttttccttgtcggcgctgctaccggcgcgcattccttcgaagaagtccaacttgtggagtctggagggggcctggtgcagcccggcggctctctcagactgtcttgtgcggcaagcggctacaccttcagctcttactggatagaatgggtgaggcaggcacctggaaagggactggagtggattggagagattctgccaggagggggagatacaaattacaatgaaatcttcaaggggcgggccaccttttcagcggataccagcaagaatacagcttacctgcagatgaatagcctccgggcagaagataccgctgtttattattgcacgagacgggtgccaataagactggactattgggggcaagggactcttgtcaccgtcagttcaacgcgtatccagaaccctgatcctgccgtgtaccagctgcgggatagcaagagcagcgacaagagcgtgtgtctgttcaccgacttcgacagccagaccaacgtgtcccagagcaaggactccgacgtgtacatcaccgataagtgcgtgctggacatgcggagcatggacttcaagagcaactccgccgtggcctggtccaacaagtccgatttcgcctgcgccaacgccttcaacaacagcattatccccgaggacacattcttcccaagccccgagagcagcgactccaccgaccacgtgaagcccaaagagacagagaacaccaagcagcccagcaagagctgccacaagcccaaggccatcgtgcacaccgagaaagtgaacatgatgagcctgaccgtgctgggcctgcggatgctgttcgccaaaaccgtggccgtgaacttcctgctgaccgccaagctgttcttcctc

SEQ ID NO: 38511 - DNA, 2181 bp, synthetic construct
  source 1..2181: mol_type = other DNA
atggccttaccagtgaccgccttgctcctgccgctggccttgctgctccacgccgccaggccggacatcgtgatgacacagagccctgatagcctggccgtgtctctgggagagagagccaccattaactgcaaggccagccagagcgtggactacgacggcgacagcttcctgaactggtatcagcagaagcccggccagcctcctaagctgctgatctacgccgccagcaatctggaaagcggcgtgccaagcagattttccggctctggcagcggcaccgatttcaccctgacaatatccagcctccagcctgaggacgtggccgtgtactactgccagcagagcaacgacgaccctctgacctttggacagggcaccaaggtggaaatcaaactcgagatccagaaccctgatcctgccgtgtaccagctgcgggatagcaagagcagcgacaagagcgtgtgtctgttcaccgacttcgacagccagaccaacgtgtcccagagcaaggactccgacgtgtacatcaccgataagtgcgtgctggacatgcggagcatggacttcaagagcaactccgccgtggcctggtccaacaagtccgatttcgcctgcgccaacgccttcaacaacagcattatccccgaggacacattcttcccaagccccgagagcagcgactccaccgaccacgtgaagcccaaagagacagagaacaccaagcagcccagcaagagctgccacaagcccaaggccatcgtgcacaccgagaaagtgaacatgatgagcctgaccgtgctgggcctgcggatgctgttcgccaaaaccgtggccgtgaacttcctgctgaccgccaagctgttcttcctccgcgccaagagaagcggatctggcgtgaagcagaccctgaatttcgacctgctgaagctggctggcgacgtggaatccaacccaggccctactagtatggactggatttggcgcatccttttccttgtcggcgctgctaccggcgcgcattccttcgaagaagtccaacttgtggagtctggagggggcctggtgcagcccggcggctctctcagactgtcttgtgcggcaagcggctacaccttcagctcttactggatagaatgggtgaggcaggcacctggaaagggactggagtggattggagagattctgccaggagggggagatacaaattacaatgaaatcttcaaggggcgggccaccttttcagcggataccagcaagaatacagcttacctgcagatgaatagcctccgggcagaagataccgctgtttattattgcacgagacgggtgccaataagactggactattgggggcaagggactcttgtcaccgtcagttcaacgcgtgaggacctgaagaacgtgttcccacctgaggtggccgtgttcgagcctagcgaggccgagatcagccacacccagaaagccaccctcgtgtgcctggctaccggcttctaccccgaccatgtggaactgtcttggtgggtcaacggcaaagaggtgcacagcggcgtgtgtaccgacccccagccactgaaagaacagcccgccctgaacgacagccggtactgcctgagcagcagactgagagtgtccgccaccttctggcagaacccccggaaccacttcagatgccaggtgcagttctacggcctgagcgagaacgacgagtggacccaggacagagccaagcccgtgacccagatcgtgtctgccgaagcctggggcagagccgatgatgtgattaagatccactggcaggaaaagaagtccaacaccatcctgggcagccaggaaggcaacaccatgaagaccaacgacacctacatgaagttcagctggctgaccgtgcccgagaagtccctggacaaagaacacagatgcatcgtgcggcacgaaaacaacaagaacggcgtggaccaggaaatcatcttcccacccatcaagaccgatgtgattacaatggaccccaaggacaactgctccaaggacgccaacgataccctgctgctccagctgaccaacaccagcgcctactacatgtacttgttgctgctgctgaagtccgtggtgtacttcgccatcatcacatgctgcctgctgcggagaaccgccttctgctgcaacggcgagaagtct

SEQ ID NO: 38512 - DNA, 2574 bp, synthetic construct
  source 1..2574: mol_type = other DNA
atggccttaccagtgaccgccttgctcctgccgctggccttgctgctccacgccgccaggccggaagtgcagctggttgaatctggcggaggactggttcagcctggcggatctctgagactgtcttgtgccgccagcggcttcagcttcagcgacttttggatgagctgggtccgacaggcccctggcaaaggacttgaatgggtcgccacaatcagccaggccggcagcgagaaggactacgtggactctgtgaagggcagattcaccatcagccgggacaacgccaagaagtccctgtacctccagatgaacagcctgagagccgaggacaccgccgtgtactattgtgcctctggcgtgtacagcttcgactacagaggccagggcaccctggtcacagtctcttctggtaccggcggaggcggatctggcggcggaggtagcggtggcggaggatctgaattcgacatcgtgatgacacagagccctgatagcctggccgtgtctctgggagagagagccaccattaactgcaaggccagccagagcgtggactacgacggcgacagcttcctgaactggtatcagcagaagcccggccagcctcctaagctgctgatctacgccgccagcaatctggaaagcggcgtgccaagcagattttccggctctggcagcggcaccgatttcaccctgacaatatccagcctccagcctgaggacgtggccgtgtactactgccagcagagcaacgacgaccctctgacctttggacagggcaccaaggtggaaatcaaactcgaggacctgaagaacgtgttcccacctgaggtggccgtgttcgagcctagcgaggccgagatcagccacacccagaaagccaccctcgtgtgcctggctaccggcttctaccccgaccatgtggaactgtcttggtgggtcaacggcaaagaggtgcacagcggcgtgtgtaccgacccccagccactgaaagaacagcccgccctgaacgacagccggtactgcctgagcagcagactgagagtgtccgccaccttctggcagaacccccggaaccacttcagatgccaggtgcagttctacggcctgagcgagaacgacgagtggacccaggacagagccaagcccgtgacccagatcgtgtctgccgaagcctggggcagagccgatgatgtgattaagatccactggcaggaaaagaagtccaacaccatcctgggcagccaggaaggcaacaccatgaagaccaacgacacctacatgaagttcagctggctgaccgtgcccgagaagtccctggacaaagaacacagatgcatcgtgcggcacgaaaacaacaagaacggcgtggaccaggaaatcatcttcccacccatcaagaccgatgtgattacaatggaccccaaggacaactgctccaaggacgccaacgataccctgctgctccagctgaccaacaccagcgcctactacatgtacttgttgctgctgctgaagtccgtggtgtacttcgccatcatcacatgctgcctgctgcggagaaccgccttctgctgcaacggcgagaagtctagggccaagcgatctggatctggagcaacaaacttctcactactcaaacaagcaggtgacgtggaggagaatcccgggcctactagtatggactggatttggcgcatccttttccttgtcggcgctgctaccggcgcgcattccttcgaagaagtccaacttgtggagtctggagggggcctggtgcagcccggcggctctctcagactgtcttgtgcggcaagcggctacaccttcagctcttactggatagaatgggtgaggcaggcacctggaaagggactggagtggattggagagattctgccaggagggggagatacaaattacaatgaaatcttcaaggggcgggccaccttttcagcggataccagcaagaatacagcttacctgcagatgaatagcctccgggcagaagataccgctgtttattattgcacgagacgggtgccaataagactggactattgggggcaagggactcttgtcaccgtcagttcaacgcgtatccagaaccctgatcctgccgtgtaccagctgcgggatagcaagagcagcgacaagagcgtgtgtctgttcaccgacttcgacagccagaccaacgtgtcccagagcaaggactccgacgtgtacatcaccgataagtgcgtgctggacatgcggagcatggacttcaagagcaactccgccgtggcctggtccaacaagtccgatttcgcctgcgccaacgccttcaacaacagcattatccccgaggacacattcttcccaagccccgagagcagcgactccaccgaccacgtgaagcccaaagagacagagaacaccaagcagcccagcaagagctgccacaagcccaaggccatcgtgcacaccgagaaagtgaacatgatgagcctgaccgtgctgggcctgcggatgctgttcgccaaaaccgtggccgtgaacttcctgctgaccgccaagctgttcttcctc

SEQ ID NO: 38513 - DNA, 2985 bp, synthetic construct
  source 1..2985: mol_type = other DNA
atggccttaccagtgaccgccttgctcctgccgctggccttgctgctccacgccgccaggccggaagtgcagctggttgaatctggcggaggactggttcagcctggcggatctctgagactgtcttgtgccgccagcggcttcagcttcagcgacttttggatgagctgggtccgacaggcccctggcaaaggacttgaatgggtcgccacaatcagccaggccggcagcgagaaggactacgtggactctgtgaagggcagattcaccatcagccgggacaacgccaagaagtccctgtacctccagatgaacagcctgagagccgaggacaccgccgtgtactattgtgcctctggcgtgtacagcttcgactacagaggccagggcaccctggtcacagtctcttctggtaccggcggaggcggatctggcggcggaggtagcggtggcggaggatctgaattcgacatcgtgatgacacagagccctgatagcctggccgtgtctctgggagagagagccaccattaactgcaaggccagccagagcgtggactacgacggcgacagcttcctgaactggtatcagcagaagcccggccagcctcctaagctgctgatctacgccgccagcaatctggaaagcggcgtgccaagcagattttccggctctggcagcggcaccgatttcaccctgacaatatccagcctccagcctgaggacgtggccgtgtactactgccagcagagcaacgacgaccctctgacctttggacagggcaccaaggtggaaatcaaactcgaggacctgaagaacgtgttcccacctgaggtggccgtgttcgagcctagcgaggccgagatcagccacacccagaaagccaccctcgtgtgcctggctaccggcttctaccccgaccatgtggaactgtcttggtgggtcaacggcaaagaggtgcacagcggcgtgtgtaccgacccccagccactgaaagaacagcccgccctgaacgacagccggtactgcctgagcagcagactgagagtgtccgccaccttctggcagaacccccggaaccacttcagatgccaggtgcagttctacggcctgagcgagaacgacgagtggacccaggacagagccaagcccgtgacccagatcgtgtctgccgaagcctggggcagagccgatgatgtgattaagatccactggcaggaaaagaagtccaacaccatcctgggcagccaggaaggcaacaccatgaagaccaacgacacctacatgaagttcagctggctgaccgtgcccgagaagtccctggacaaagaacacagatgcatcgtgcggcacgaaaacaacaagaacggcgtggaccaggaaatcatcttcccacccatcaagaccgatgtgattacaatggaccccaaggacaactgctccaaggacgccaacgataccctgctgctccagctgaccaacaccagcgcctactacatgtacttgttgctgctgctgaagtccgtggtgtacttcgccatcatcacatgctgcctgctgcggagaaccgccttctgctgcaacggcgagaagtctagggccaagcgatctggatctggagcaacaaacttctcactactcaaacaagcaggtgacgtggaggagaatcccgggcctactagtatggactggatttggcgcatccttttccttgtcggcgctgctaccggcgcgcattccgggccccagctccagctgcaagagtctggacctggcctggtcaagcctagcgagacactgagcctgacctgtaccgtgtccggcgatagcatcagcagcggcgattactactggggctggatcagacagcctcctggcaaaggactggaatggatcggccacatctactacagcggcgtgacctactacaaccccagcctgaagtccagagtgaccatcagcgtggacaccagccggaaccagttctccctgaagctgtctagcgtgacagccgccgataccgccgtgtactactgcaccagagaggacagcagcaactggcggagtagaggccagggaacactggtcacagttagctctggatccggcggaggcggaagtggaggcggaggatctggcggcggaggctctttcgaagaagtccaacttgtggagtctggagggggcctggtgcagcccggcggctctctcagactgtcttgtgcggcaagcggctacaccttcagctcttactggatagaatgggtgaggcaggcacctggaaagggactggagtggattggagagattctgccaggagggggagatacaaattacaatgaaatcttcaaggggcgggccaccttttcagcggataccagcaagaatacagcttacctgcagatgaatagcctccgggcagaagataccgctgtttattattgcacgagacgggtgccaataagactggactattgggggcaagggactcttgtcaccgtcagttcaacgcgtatccagaaccctgatcctgccgtgtaccagctgcgggatagcaagagcagcgacaagagcgtgtgtctgttcaccgacttcgacagccagaccaacgtgtcccagagcaaggactccgacgtgtacatcaccgataagtgcgtgctggacatgcggagcatggacttcaagagcaactccgccgtggcctggtccaacaagtccgatttcgcctgcgccaacgccttcaacaacagcattatccccgaggacacattcttcccaagccccgagagcagcgactccaccgaccacgtgaagcccaaagagacagagaacaccaagcagcccagcaagagctgccacaagcccaaggccatcgtgcacaccgagaaagtgaacatgatgagcctgaccgtgctgggcctgcggatgctgttcgccaaaaccgtggccgtgaacttcctgctgaccgccaagctgttcttcctc

SEQ ID NO: 38514 - DNA, 1863 bp, synthetic construct
  source 1..1863: mol_type = other DNA
atggccttaccagtgaccgccttgctcctgccgctggccttgctgctccacgccgccaggccggacatcgtgatgacacagagccctgatagcctggccgtgtctctgggagagagagccaccattaactgcaaggccagccagagcgtggactacgacggcgacagcttcctgaactggtatcagcagaagcccggccagcctcctaagctgctgatctacgccgccagcaatctggaaagcggcgtgccaagcagattttccggctctggcagcggcaccgatttcaccctgacaatatccagcctccagcctgaggacgtggccgtgtactactgccagcagagcaacgacgaccctctgacctttggacagggcaccaaggtggaaatcaaactcgaggacctgaagaacgtgttcccacctgaggtggccgtgttcgagcctagcgaggccgagatcagccacacccagaaagccaccctcgtgtgcctggctaccggcttctaccccgaccatgtggaactgtcttggtgggtcaacggcaaagaggtgcacagcggcgtgtctaccgacccccagccactgaaagaacagcccgccctgaacgacagccggtactgcctgagcagcagactgagagtgtccgccaccttctggcagaacccccggaaccacttcagatgccaggtgcagttctacggcctgagcgagaacgacgagtggacccaggacagagccaagcccgtgacccagatcgtgtctgccgaagcctggggcagagccgattgcgacgtgaagctggtggaaaagagcttcgagacagacaccaacctgaacttccagaacctgagcgtgatcggcttcagaatcctgctgctgaaagtggccggctttaacctgctgatgaccctgcggctgtggtccagcagggccaagcgatctggatctggagcaacaaacttctcactactcaaacaagcaggtgacgtggaggagaatcccgggcctactagtatggactggatttggcgcatccttttccttgtcggcgctgctaccggcgcgcattccttcgaagaagtccaacttgtggagtctggagggggcctggtgcagcccggcggctctctcagactgtcttgtgcggcaagcggctacaccttcagctcttactggatagaatgggtgaggcaggcacctggaaagggactggagtggattggagagattctgccaggagggggagatacaaattacaatgaaatcttcaaggggcgggccaccttttcagcggataccagcaagaatacagcttacctgcagatgaatagcctccgggcagaagataccgctgtttattattgcacgagacgggtgccaataagactggactattgggggcaagggactcttgtcaccgtcagttcaacgcgtatccagaaccctgatcctgccgtgtaccagctgcgggatagcaagagcagcgacaagagcgtgtgtctgttcaccgacttcgacagccagaccaacgtgtcccagagcaaggactccgacgtgtacatcaccgataagaccgtgctggacatgcggagcatggacttcaagagcaactccgccgtggcctggtccaacaagtccgatttcgcctgcgccaacgccttcaacaacagcattatccccgaggacacattcttcccaagccccgagagcagctgcggctttaccagcgagagctaccagcagggcgtgctgagcgccaccatcctgtacgagatcctgctgggcaaggccaccctgtacgccgtgctggtgtctgccctggtgctgatggctatggtcaagcggaaggacagccgggga

SEQ ID NO: 38515 - DNA, 1863 bp, synthetic construct
  source 1..1863: mol_type = other DNA
atggccttaccagtgaccgccttgctcctgccgctggccttgctgctccacgccgccaggccggacatcgtgatgacacagagccctgatagcctggccgtgtctctgggagagagagccaccattaactgcaaggccagccagagcgtggactacgacggcgacagcttcctgaactggtatcagcagaagcccggccagcctcctaagctgctgatctacgccgccagcaatctggaaagcggcgtgccaagcagattttccggctctggcagcggcaccgatttcaccctgacaatatccagcctccagcctgaggacgtggccgtgtactactgccagcagagcaacgacgaccctctgacctttggacagggcaccaaggtggaaatcaaactcgaggacctgaagaacgtgttcccacctgaggtggccgtgttcgagcctagcgaggccgagatcagccacacccagaaagccaccctcgtgtgcctggctaccggcttctaccccgaccatgtggaactgtcttggtgggtcaacggcaaagaggtgcacagcggcgtgtctaccgacccccagccactgaaagaacagcccgccctgaacgacagccggtactgcctgagcagcagactgagagtgtccgccaccttctggcagaacccccggaaccacttcagatgccaggtgcagttctacggcctgagcgagaacgacgagtggacccaggacagagccaagcccgtgacccagatcgtgtctgccgaagcctggggcagagccgattgcggctttaccagcgagagctaccagcagggcgtgctgagcgccaccaacctgagcgtgatcggcttcagaatcctgctgctgaaagtggccggctttaacctgctgatgaccctgcggctgtggtccagcagggccaagcgatctggatctggagcaacaaacttctcactactcaaacaagcaggtgacgtggaggagaatcccgggcctactagtatggactggatttggcgcatccttttccttgtcggcgctgctaccggcgcgcattccttcgaagaagtccaacttgtggagtctggagggggcctggtgcagcccggcggctctctcagactgtcttgtgcggcaagcggctacaccttcagctcttactggatagaatgggtgaggcaggcacctggaaagggactggagtggattggagagattctgccaggagggggagatacaaattacaatgaaatcttcaaggggcgggccaccttttcagcggataccagcaagaatacagcttacctgcagatgaatagcctccgggcagaagataccgctgtttattattgcacgagacgggtgccaataagactggactattgggggcaagggactcttgtcaccgtcagttcaacgcgtatccagaaccctgatcctgccgtgtaccagctgcgggatagcaagagcagcgacaagagcgtgtgtctgttcaccgacttcgacagccagaccaacgtgtcccagagcaaggactccgacgtgtacatcaccgataagaccgtgctggacatgcggagcatggacttcaagagcaactccgccgtggcctggtccaacaagtccgatttcgcctgcgccaacgccttcaacaacagcattatccccgaggacacattcttcccaagccccgagagcagctgcgacgtgaagctggtggaaaagagcttcgagacagacaccaacctgaacttccagatcctgtacgagatcctgctgggcaaggccaccctgtacgccgtgctggtgtctgccctggtgctgatggctatggtcaagcggaaggacagccgggga

SEQ ID NO: 38516 - DNA, 2175 bp, synthetic construct
  source 1..2175: mol_type = other DNA
atggccttaccagtgaccgccttgctcctgccgctggccttgctgctccacgccgccaggccggacatcgtgatgacacagagccctgatagcctggccgtgtctctgggagagagagccaccattaactgcaaggccagccagagcgtggactacgacggcgacagcttcctgaactggtatcagcagaagcccggccagcctcctaagctgctgatctacgccgccagcaatctggaaagcggcgtgccaagcagattttccggctctggcagcggcaccgatttcaccctgacaatatccagcctccagcctgaggacgtggccgtgtactactgccagcagagcaacgacgaccctctgacctttggacagggcaccaaggtggaaatcaaactcgaggacctgaagaacgtgttcccacctgaggtggccgtgttcgagcctagcgaggccgagatcagccacacccagaaagccaccctcgtgtgcctggctaccggcttctaccccgaccatgtggaactgtcttggtgggtcaacggcaaagaggtgcacagcggcgtgtctaccgacccccagccactgaaagaacagcccgccctgaacgacagccggtactgcctgagcagcagactgagagtgtccgccaccttctggcagaacccccggaaccacttcagatgccaggtgcagttctacggcctgagcgagaacgacgagtggacccaggacagagccaagcccgtgacccagatcgtgtctgccgaagcctggggcagagccgatgatgtgattaagatccactggcaggaaaagaagtccaacaccatcctgggcagccaggaaggcaacaccatgaagaccaacgacacctacatgaagttcagctggctgaccgtgcccgagaagtccctggacaaagaacacagatgcatcgtgcggcacgaaaacaacaagaacggcgtggaccaggaaatcatcttcccacccatcaagaccgatgtgattacaatggaccccaaggacaactgctccaaggacgccaacgataccctgctgctccagctgaccaacaccagcgcctactacatgtacttgttgctgctgctgaagtccgtggtgtacttcgccatcatcacatgctgcctgctgatggctatggtcaagcggaaggacagccggggaagggccaagcgatctggatctggagcaacaaacttctcactactcaaacaagcaggtgacgtggaggagaatcccgggcctactagtatggactggatttggcgcatccttttccttgtcggcgctgctaccggcgcgcattccttcgaagaagtccaacttgtggagtctggagggggcctggtgcagcccggcggctctctcagactgtcttgtgcggcaagcggctacaccttcagctcttactggatagaatgggtgaggcaggcacctggaaagggactggagtggattggagagattctgccaggagggggagatacaaattacaatgaaatcttcaaggggcgggccaccttttcagcggataccagcaagaatacagcttacctgcagatgaatagcctccgggcagaagataccgctgtttattattgcacgagacgggtgccaataagactggactattgggggcaagggactcttgtcaccgtcagttcaacgcgtatccagaaccctgatcctgccgtgtaccagctgcgggatagcaagagcagcgacaagagcgtgtgtctgttcaccgacttcgacagccagaccaacgtgtcccagagcaaggactccgacgtgtacatcaccgataagaccgtgctggacatgcggagcatggacttcaagagcaactccgccgtggcctggtccaacaagtccgatttcgcctgcgccaacgccttcaacaacagcattatccccgaggacacattcttcccaagccccgagagcagcgactccaccgaccacgtgaagcccaaagagacagagaacaccaagcagcccagcaagagctgccacaagcccaaggccatcgtgcacaccgagaaagtgaacatgatgagcctgaccgtgctgggcctgcggatgctgttcgccaaaaccgtggccgtgaacttcctgctgaccgccaagctgttcttcctcctcaccgcc

SEQ ID NO: 38517 - DNA, 2169 bp, synthetic construct
  source 1..2169: mol_type = other DNA
atggccttaccagtgaccgccttgctcctgccgctggccttgctgctccacgccgccaggccggacatcgtgatgacacagagccctgatagcctggccgtgtctctgggagagagagccaccattaactgcaaggccagccagagcgtggactacgacggcgacagcttcctgaactggtatcagcagaagcccggccagcctcctaagctgctgatctacgccgccagcaatctggaaagcggcgtgccaagcagattttccggctctggcagcggcaccgatttcaccctgacaatatccagcctccagcctgaggacgtggccgtgtactactgccagcagagcaacgacgaccctctgacctttggacagggcaccaaggtggaaatcaaactcgaggacctgaagaacgtgttcccacctgaggtggccgtgttcgagcctagcgaggccgagatcagccacacccagaaagccaccctcgtgtgcctggctaccggcttctaccccgaccatgtggaactgtcttggtgggtcaacggcaaagaggtgcacagcggcgtgtctaccgacccccagccactgaaagaacagcccgccctgaacgacagccggtactgcctgagcagcagactgagagtgtccgccaccttctggcagaacccccggaaccacttcagatgccaggtgcagttctacggcctgagcgagaacgacgagtggacccaggacagagccaagcccgtgacccagatcgtgtctgccgaagcctggggcagagccgatgatgtgattaagatccactggcaggaaaagaagtccaacaccatcctgggcagccaggaaggcaacaccatgaagaccaacgacacctacatgaagttcagctggctgaccgtgcccgagaagtccctggacaaagaacacagatgcatcgtgcggcacgaaaacaacaagaacggcgtggaccaggaaatcatcttcccacccatcaagaccgatgtgattacaatggaccccaaggacaactgctccaaggacgccaacgataccctgctgctccagctgaccaacaccagcgcctactacatgtacttgttgctgctgctgaagtccgtggtgtacttcgccatcatcacatgctgcctgctgcggagaaccgccttctgctgcaacggcgagaagtctagggccaagcgatctggatctggagcaacaaacttctcactactcaaacaagcaggtgacgtggaggagaatcccgggcctactagtatggactggatttggcgcatccttttccttgtcggcgctgctaccggcgcgcattccttcgaagaagtccaacttgtggagtctggagggggcctggtgcagcccggcggctctctcagactgtcttgtgcggcaagcggctacaccttcagctcttactggatagaatgggtgaggcaggcacctggaaagggactggagtggattggagagattctgccaggagggggagatacaaattacaatgaaatcttcaaggggcgggccaccttttcagcggataccagcaagaatacagcttacctgcagatgaatagcctccgggcagaagataccgctgtttattattgcacgagacgggtgccaataagactggactattgggggcaagggactcttgtcaccgtcagttcaacgcgtatccagaaccctgatcctgccgtgtaccagctgcgggatagcaagagcagcgacaagagcgtgtgtctgttcaccgacttcgacagccagaccaacgtgtcccagagcaaggactccgacgtgtacatcaccgataagaccgtgctggacatgcggagcatggacttcaagagcaactccgccgtggcctggtccaacaagtccgatttcgcctgcgccaacgccttcaacaacagcattatccccgaggacacattcttcccaagccccgagagcagcgactccaccgaccacgtgaagcccaaagagacagagaacaccaagcagcccagcaagagctgccacaagcccaaggccatcgtgcacaccgagaaagtgaacatgatgagcctgaccgtgctgggcctgcggatgctgttcgccaaaaccgtggccgtgaacttcctgctgaccgccaagctgttcttcctc

SEQ ID NO: 38518 - DNA, 2601 bp, synthetic construct
  source 1..2601: mol_type = other DNA
atggccttaccagtgaccgccttgctcctgccgctggccttgctgctccacgccgccaggccgctcgaggaggacctgaagaacgtgttcccacctgaggtggccgtgttcgagcctagcgaggccgagatcagccacacccagaaagccaccctcgtgtgcctggctaccggcttctaccccgaccatgtggaactgtcttggtgggtcaacggcaaagaggtgcacagcggcgtgtgtaccgacccccagccactgaaagaacagcccgccctgaacgacagccggtactgcctgagcagcagactgagagtgtccgccaccttctggcagaacccccggaaccacttcagatgccaggtgcagttctacggcctgagcgagaacgacgagtggacccaggacagagccaagcccgtgacccagatcgtgtctgccgaagcctggggcagagccgattgcggctttaccagcgagagctaccagcagggcgtgctgagcgccaccaacctgagcgtgatcggcttcagaatcctgctgctgaaagtggccggctttaacctgctgatgaccctgcggctgtggtccagcagggccaagcgatctggatctggagcaacaaacttctcactactcaaacaagcaggtgacgtggaggagaatcccgggcctactagcatggccttaccagtgaccgccttgctcctgccgctggccttgctgctccacgccgccaggccggacatcgtgatgacacagagccctgatagcctggccgtgtctctgggagagagagccaccattaactgcaaggccagccagagcgtggactacgacggcgacagcttcctgaactggtatcagcagaagcccggccagcctcctaagctgctgatctacgccgccagcaatctggaaagcggcgtgccaagcagattttccggctctggcagcggcaccgatttcaccctgacaatatccagcctccagcctgaggacgtggccgtgtactactgccagcagagcaacgacgaccctctgacctttggacagggcaccaaggtggaaatcaaaggcggaggcggaagtggaggcggaggatctggcggcggaggctctgaagtccaacttgtggagtctggagggggcctggtgcagcccggcggctctctcagactgtcttgtgcggcaagcggctacaccttcagctcttactggatagaatgggtgaggcaggcacctggaaagggactggagtggattggagagattctgccaggagggggagatacaaattacaatgaaatcttcaaggggcgggccaccttttcagcggataccagcaagaatacagcttacctgcagatgaatagcctccgggcagaagataccgctgtttattattgcacgagacgggtgccaataagactggactattgggggcaagggactcttgtcaccgtcagttcaacgcgtatccagaaccctgatcctgccgtgtaccagctgcgggatagcaagagcagcgacaagagcgtgtgtctgttcaccgacttcgacagccagaccaacgtgtcccagagcaaggactccgacgtgtacatcaccgataagtgcgtgctggacatgcggagcatggacttcaagagcaactccgccgtggcctggtccaacaagtccgatttcgcctgcgccaacgccttcaacaacagcattatccccgaggacacattcttcccaagccccgagagcagctgcgacgtgaagctggtggaaaagagcttcgagacagacaccaacctgaacttccagatcctgtacgaggtgatcggcttcagaatcctgctgctgaaagtggccggctttaacctgctgatgaccctgcggctgtggtccagccgcgccaagagaagcggatctggcgtgaagcagaccctgaatttcgacctgctgaagctggctggcgacgtggaatccaacccaggcccttctagaggccatatgaccgagtacaagcccacggtgcgcctcgccacccgcgacgacgtccccagggccgtacgcaccctcgccgccgcgttcgccgactaccccgccacgcgccacaccgtcgatccggaccgccacatcgagcgggtcaccgagctgcaagaactcttcctcacgcgcgtcgggctcgacatcggcaaggtgtgggtcgcggacgacggcgccgcggtggcggtctggaccacgccggagagcgtcgaagcgggggcggtgttcgccgagatcggcccgcgcatggccgagttgagcggttcccggctggccgcgcagcaacagatggaaggcctcctggcgccgcaccggcccaaggagcccgcgtggttcctggccaccgtcggcgtctcgcccgaccaccagggcaagggtctgggcagcgccgtcgtgctccccggagtggaggcggccgagcgcgccggggtgcccgccttcctggagacctccgcgccccgcaacctccccttctacgagcggctcggcttcaccgtcaccgccgacgtcgaggtgcccgaaggaccgcgcacctggtgcatgacccgcaagcccggtgcctga

SEQ ID NO: 38519 - DNA, 2601 bp, synthetic construct
  source 1..2601: mol_type = other DNA
atggccttaccagtgaccgccttgctcctgccgctggccttgctgctccacgccgccaggccgctcgagatccagaaccctgatcctgccgtgtaccagctgcgggatagcaagagcagcgacaagagcgtgtgtctgttcaccgacttcgacagccagaccaacgtgtcccagagcaaggactccgacgtgtacatcaccgataagtgcgtgctggacatgcggagcatggacttcaagagcaactccgccgtggcctggtccaacaagtccgatttcgcctgcgccaacgccttcaacaacagcattatccccgaggacacattcttcccaagccccgagagcagctgcgacgtgaagctggtggaaaagagcttcgagacagacaccaacctgaacttccagatcctgtacgaggtgatcggcttcagaatcctgctgctgaaagtggccggctttaacctgctgatgaccctgcggctgtggtccagcagggccaagcgatctggatctggagcaacaaacttctcactactcaaacaagcaggtgacgtggaggagaatcccgggcctactagcatggccttaccagtgaccgccttgctcctgccgctggccttgctgctccacgccgccaggccggacatcgtgatgacacagagccctgatagcctggccgtgtctctgggagagagagccaccattaactgcaaggccagccagagcgtggactacgacggcgacagcttcctgaactggtatcagcagaagcccggccagcctcctaagctgctgatctacgccgccagcaatctggaaagcggcgtgccaagcagattttccggctctggcagcggcaccgatttcaccctgacaatatccagcctccagcctgaggacgtggccgtgtactactgccagcagagcaacgacgaccctctgacctttggacagggcaccaaggtggaaatcaaaggcggaggcggaagtggaggcggaggatctggcggcggaggctctgaagtccaacttgtggagtctggagggggcctggtgcagcccggcggctctctcagactgtcttgtgcggcaagcggctacaccttcagctcttactggatagaatgggtgaggcaggcacctggaaagggactggagtggattggagagattctgccaggagggggagatacaaattacaatgaaatcttcaaggggcgggccaccttttcagcggataccagcaagaatacagcttacctgcagatgaatagcctccgggcagaagataccgctgtttattattgcacgagacgggtgccaataagactggactattgggggcaagggactcttgtcaccgtcagttcaacgcgtgaggacctgaagaacgtgttcccacctgaggtggccgtgttcgagcctagcgaggccgagatcagccacacccagaaagccaccctcgtgtgcctggctaccggcttctaccccgaccatgtggaactgtcttggtgggtcaacggcaaagaggtgcacagcggcgtgtgtaccgacccccagccactgaaagaacagcccgccctgaacgacagccggtactgcctgagcagcagactgagagtgtccgccaccttctggcagaacccccggaaccacttcagatgccaggtgcagttctacggcctgagcgagaacgacgagtggacccaggacagagccaagcccgtgacccagatcgtgtctgccgaagcctggggcagagccgattgcggctttaccagcgagagctaccagcagggcgtgctgagcgccaccaacctgagcgtgatcggcttcagaatcctgctgctgaaagtggccggctttaacctgctgatgaccctgcggctgtggtccagccgcgccaagagaagcggatctggcgtgaagcagaccctgaatttcgacctgctgaagctggctggcgacgtggaatccaacccaggcccttctagaggccatatgaccgagtacaagcccacggtgcgcctcgccacccgcgacgacgtccccagggccgtacgcaccctcgccgccgcgttcgccgactaccccgccacgcgccacaccgtcgatccggaccgccacatcgagcgggtcaccgagctgcaagaactcttcctcacgcgcgtcgggctcgacatcggcaaggtgtgggtcgcggacgacggcgccgcggtggcggtctggaccacgccggagagcgtcgaagcgggggcggtgttcgccgagatcggcccgcgcatggccgagttgagcggttcccggctggccgcgcagcaacagatggaaggcctcctggcgccgcaccggcccaaggagcccgcgtggttcctggccaccgtcggcgtctcgcccgaccaccagggcaagggtctgggcagcgccgtcgtgctccccggagtggaggcggccgagcgcgccggggtgcccgccttcctggagacctccgcgccccgcaacctccccttctacgagcggctcggcttcaccgtcaccgccgacgtcgaggtgcccgaaggaccgcgcacctggtgcatgacccgcaagcccggtgcctga

SEQ ID NO: 38520 - DNA, 2601 bp, synthetic construct; identical to SEQ ID NO: 38518
  source 1..2601: mol_type = other DNA

SEQ ID NO: 38521 - DNA, 2925 bp, synthetic construct
  source 1..2925: mol_type = other DNA
atggccttaccagtgaccgccttgctcctgccgctggccttgctgctccacgccgccaggccgctcgaggaggacctgaagaacgtgttcccacctgaggtggccgtgttcgagcctagcgaggccgagatcagccacacccagaaagccaccctcgtgtgcctggctaccggcttctaccccgaccatgtggaactgtcttggtgggtcaacggcaaagaggtgcacagcggcgtgtctaccgacccccagccactgaaagaacagcccgccctgaacgacagccggtactgcctgagcagcagactgagagtgtccgccaccttctggcagaacccccggaaccacttcagatgccaggtgcagttctacggcctgagcgagaacgacgagtggacccaggacagagccaagcccgtgacccagatcgtgtctgccgaagcctggggcagagccgatgatgtgattaagatccactggcaggaaaagaagtccaacaccatcctgggcagccaggaaggcaacaccatgaagaccaacgacacctacatgaagttcagctggctgaccgtgcccgagaagtccctggacaaagaacacagatgcatcgtgcggcacgaaaacaacaagaacggcgtggaccaggaaatcatcttcccacccatcaagaccgatgtgattacaatggaccccaaggacaactgctccaaggacgccaacgataccctgctgctccagctgaccaacaccagcgcctactacatgtacttgttgctgctgctgaagtccgtggtgtacttcgccatcatcacatgctgcctgctgatggctatggtcaagcggaaggacagccggggaagggccaagcgatctggatctggagcaacaaacttctcactactcaaacaagcaggtgacgtggaggagaatcccgggcctactagcatggccttaccagtgaccgccttgctcctgccgctggccttgctgctccacgccgccaggccggacatcgtgatgacacagagccctgatagcctggccgtgtctctgggagagagagccaccattaactgcaaggccagccagagcgtggactacgacggcgacagcttcctgaactggtatcagcagaagcccggccagcctcctaagctgctgatctacgccgccagcaatctggaaagcggcgtgccaagcagattttccggctctggcagcggcaccgatttcaccctgacaatatccagcctccagcctgaggacgtggccgtgtactactgccagcagagcaacgacgaccctctgacctttggacagggcaccaaggtggaaatcaaaggcggaggcggaagtggaggcggaggatctggcggcggaggctctgaagtccaacttgtggagtctggagggggcctggtgcagcccggcggctctctcagactgtcttgtgcggcaagcggctacaccttcagctcttactggatagaatgggtgaggcaggcacctggaaagggactggagtggattggagagattctgccaggagggggagatacaaattacaatgaaatcttcaaggggcgggccaccttttcagcggataccagcaagaatacagcttacctgcagatgaatagcctccgggcagaagataccgctgtttattattgcacgagacgggtgccaataagactggactattgggggcaagggactcttgtcaccgtcagttcaacgcgtatccagaaccctgatcctgccgtgtaccagctgcgggatagcaagagcagcgacaagagcgtgtgtctgttcaccgacttcgacagccagaccaacgtgtcccagagcaaggactccgacgtgtacatcaccgataagaccgtgctggacatgcggagcatggacttcaagagcaactccgccgtggcctggtccaacaagtccgatttcgcctgcgccaacgccttcaacaacagcattatccccgaggacacattcttcccaagccccgagagcagcgactccaccgaccacgtgaagcccaaagagacagagaacaccaagcagcccagcaagagctgccacaagcccaaggccatcgtgcacaccgagaaagtgaacatgatgagcctgaccgtgctgggcctgcggatgctgttcgccaaaaccgtggccgtgaacttcctgctgaccgccaagctgttcttcctcctcaccgcccgcgccaagagaagcggatctggcgtgaagcagaccctgaatttcgacctgctgaagctggctggcgacgtggaatccaacccaggcccttctagaggccatatgaccgagtacaagcccacggtgcgcctcgccacccgcgacgacgtccccagggccgtacgcaccctcgccgccgcgttcgccgactaccccgccacgcgccacaccgtcgatccggaccgccacatcgagcgggtcaccgagctgcaagaactcttcctcacgcgcgtcgggctcgacatcggcaaggtgtgggtcgcggacgacggcgccgcggtggcggtctggaccacgccggagagcgtcgaagcgggggcggtgttcgccgagatcggcccgcgcatggccgagttgagcggttcccggctggccgcgcagcaacagatggaaggcctcctggcgccgcaccggcccaaggagcccgcgtggttcctggccaccgtcggcgtctcgcccgaccaccagggcaagggtctgggcagcgccgtcgtgctccccggagtggaggcggccgagcgcgccggggtgcccgccttcctggagacctccgcgccccgcaacctccccttctacgagcggctcggcttcaccgtcaccgccgacgtcgaggtgcccgaaggaccgcgcacctggtgcatgacccgcaagcccggtgcctga

SEQ ID NO: 38522 - DNA, 2925 bp, synthetic construct
  source 1..2925: mol_type = other DNA
atggccttaccagtgaccgccttgctcctgccgctggccttgctgctccacgccgccaggccgctcgagatccagaaccctgatcctgccgtgtaccagctgcgggatagcaagagcagcgacaagagcgtgtgtctgttcaccgacttcgacagccagaccaacgtgtcccagagcaaggactccgacgtgtacatcaccgataagaccgtgctggacatgcggagcatggacttcaagagcaactccgccgtggcctggtccaacaagtccgatttcgcctgcgccaacgccttcaacaacagcattatccccgaggacacattcttcccaagccccgagagcagcgactccaccgaccacgtgaagcccaaagagacagagaacaccaagcagcccagcaagagctgccacaagcccaaggccatcgtgcacaccgagaaagtgaacatgatgagcctgaccgtgctgggcctgcggatgctgttcgccaaaaccgtggccgtgaacttcctgctgaccgccaagctgttcttcctcctcaccgccagggccaagcgatctggatctggagcaacaaacttctcactactcaaacaagcaggtgacgtggaggagaatcccgggcctactagcatggccttaccagtgaccgccttgctcctgccgctggccttgctgctccacgccgccaggccggacatcgtgatgacacagagccctgatagcctggccgtgtctctgggagagagagccaccattaactgcaaggccagccagagcgtggactacgacggcgacagcttcctgaactggtatcagcagaagcccggccagcctcctaagctgctgatctacgccgccagcaatctggaaagcggcgtgccaagcagattttccggctctggcagcggcaccgatttcaccctgacaatatccagcctccagcctgaggacgtggccgtgtactactgccagcagagcaacgacgaccctctgacctttggacagggcaccaaggtggaaatcaaaggcggaggcggaagtggaggcggaggatctggcggcggaggctctgaagtccaacttgtggagtctggagggggcctggtgcagcccggcggctctctcagactgtcttgtgcggcaagcggctacaccttcagctcttactggatagaatgggtgaggcaggcacctggaaagggactggagtggattggagagattctgccaggagggggagatacaaattacaatgaaatcttcaaggggcgggccaccttttcagcggataccagcaagaatacagcttacctgcagatgaatagcctccgggcagaagataccgctgtttattattgcacgagacgggtgccaataagactggactattgggggcaagggactcttgtcaccgtcagttcaacgcgtgaggacctgaagaacgtgttcccacctgaggtggccgtgttcgagcctagcgaggccgagatcagccacacccagaaagccaccctcgtgtgcctggctaccggcttctaccccgaccatgtggaactgtcttggtgggtcaacggcaaagaggtgcacagcggcgtgtctaccgacccccagccactgaaagaacagcccgccctgaacgacagccggtactgcctgagcagcagactgagagtgtccgccaccttctggcagaacccccggaaccacttcagatgccaggtgcagttctacggcctgagcgagaacgacgagtggacccaggacagagccaagcccgtgacccagatcgtgtctgccgaagcctggggcagagccgatgatgtgattaagatccactggcaggaaaagaagtccaacaccatcctgggcagccaggaaggcaacaccatgaagaccaacgacacctacatgaagttcagctggctgaccgtgcccgagaagtccctggacaaagaacacagatgcatcgtgcggcacgaaaacaacaagaacggcgtggaccaggaaatcatcttcccacccatcaagaccgatgtgattacaatggaccccaaggacaactgctccaaggacgccaacgataccctgctgctccagctgaccaacaccagcgcctactacatgtacttgttgctgctgctgaagtccgtggtgtacttcgccatcatcacatgctgcctgctgatggctatggtcaagcggaaggacagccggggacgcgccaagagaagcggatctggcgtgaagcagaccctgaatttcgacctgctgaagctggctggcgacgtggaatccaacccaggcccttctagaggccatatgaccgagtacaagcccacggtgcgcctcgccacccgcgacgacgtccccagggccgtacgcaccctcgccgccgcgttcgccgactaccccgccacgcgccacaccgtcgatccggaccgccacatcgagcgggtcaccgagctgcaagaactcttcctcacgcgcgtcgggctcgacatcggcaaggtgtgggtcgcggacgacggcgccgcggtggcggtctggaccacgccggagagcgtcgaagcgggggcggtgttcgccgagatcggcccgcgcatggccgagttgagcggttcccggctggccgcgcagcaacagatggaaggcctcctggcgccgcaccggcccaaggagcccgcgtggttcctggccaccgtcggcgtctcgcccgaccaccagggcaagggtctgggcagcgccgtcgtgctccccggagtggaggcggccgagcgcgccggggtgcccgccttcctggagacctccgcgccccgcaacctccccttctacgagcggctcggcttcaccgtcaccgccgacgtcgaggtgcccgaaggaccgcgcacctggtgcatgacccgcaagcccggtgcctga

SEQ ID NO: 38523 - DNA, 2919 bp, synthetic construct
  source 1..2919: mol_type = other DNA
atggccttaccagtgaccgccttgctcctgccgctggccttgctgctccacgccgccaggccgctcgaggaggacctgaagaacgtgttcccacctgaggtggccgtgttcgagcctagcgaggccgagatcagccacacccagaaagccaccctcgtgtgcctggctaccggcttctaccccgaccatgtggaactgtcttggtgggtcaacggcaaagaggtgcacagcggcgtgtgtaccgacccccagccactgaaagaacagcccgccctgaacgacagccggtactgcctgagcagcagactgagagtgtccgccaccttctggcagaacccccggaaccacttcagatgccaggtgcagttctacggcctgagcgagaacgacgagtggacccaggacagagccaagcccgtgacccagatcgtgtctgccgaagcctggggcagagccgatgatgtgattaagatccactggcaggaaaagaagtccaacaccatcctgggcagccaggaaggcaacaccatgaagaccaacgacacctacatgaagttcagctggctgaccgtgcccgagaagtccctggacaaagaacacagatgcatcgtgcggcacgaaaacaacaagaacggcgtggaccaggaaatcatcttcccacccatcaagaccgatgtgattacaatggaccccaaggacaactgctccaaggacgccaacgataccctgctgctccagctgaccaacaccagcgcctactacatgtacttgttgctgctgctgaagtccgtggtgtacttcgccatcatcacatgctgcctgctgcggagaaccgccttctgctgcaacggcgagaagtctagggccaagcgatctggatctggagcaacaaacttctcactactcaaacaagcaggtgacgtggaggagaatcccgggcctactagcatggccttaccagtgaccgccttgctcctgccgctggccttgctgctccacgccgccaggccggacatcgtgatgacacagagccctgatagcctggccgtgtctctgggagagagagccaccattaactgcaaggccagccagagcgtggactacgacggcgacagcttcctgaactggtatcagcagaagcccggccagcctcctaagctgctgatctacgccgccagcaatctggaaagcggcgtgccaagcagattttccggctctggcagcggcaccgatttcaccctgacaatatccagcctccagcctgaggacgtggccgtgtactactgccagcagagcaacgacgaccctctgacctttggacagggcaccaaggtggaaatcaaaggcggaggcggaagtggaggcggaggatctggcggcggaggctctgaagtccaacttgtggagtctggagggggcctggtgcagcccggcggctctctcagactgtcttgtgcggcaagcggctacaccttcagctcttactggatagaatgggtgaggcaggcacctggaaagggactggagtggattggagagattctgccaggagggggagatacaaattacaatgaaatcttcaaggggcgggccaccttttcagcggataccagcaagaatacagcttacctgcagatgaatagcctccgggcagaagataccgctgtttattattgcacgagacgggtgccaataagactggactattgggggcaagggactcttgtcaccgtcagttcaacgcgtatccagaaccctgatcctgccgtgtaccagctgcgggatagcaagagcagcgacaagagcgtgtgtctgttcaccgacttcgacagccagaccaacgtgtcccagagcaaggactccgacgtgtacatcaccgataagtgcgtgctggacatgcggagcatggacttcaagagcaactccgccgtggcctggtccaacaagtccgatttcgcctgcgccaacgccttcaacaacagcattatccccgaggacacattcttcccaagccccgagagcagcgactccaccgaccacgtgaagcccaaagagacagagaacaccaagcagcccagcaagagctgccacaagcccaaggccatcgtgcacaccgagaaagtgaacatgatgagcctgaccgtgctgggcctgcggatgctgttcgccaaaaccgtggccgtgaacttcctgctgaccgccaagctgttcttcctccgcgccaagagaagcggatctggcgtgaagcagaccctgaatttcgacctgctgaagctggctggcgacgtggaatccaacccaggcccttctagaggccatatgaccgagtacaagcccacggtgcgcctcgccacccgcgacgacgtccccagggccgtacgcaccctcgccgccgcgttcgccgactaccccgccacgcgccacaccgtcgatccggaccgccacatcgagcgggtcaccgagctgcaagaactcttcctcacgcgcgtcgggctcgacatcggcaaggtgtgggtcgcggacgacggcgccgcggtggcggtctggaccacgccggagagcgtcgaagcgggggcggtgttcgccgagatcggcccgcgcatggccgagttgagcggttcccggctggccgcgcagcaacagatggaaggcctcctggcgccgcaccggcccaaggagcccgcgtggttcctggccaccgtcggcgtctcgcccgaccaccagggcaagggtctgggcagcgccgtcgtgctccccggagtggaggcggccgagcgcgccggggtgcccgccttcctggagacctccgcgccccgcaacctccccttctacgagcggctcggcttcaccgtcaccgccgacgtcgaggtgcccgaaggaccgcgcacctggtgcatgacccgcaagcccggtgcctga

SEQ ID NO: 38524 - DNA, 2919 bp, synthetic construct
  source 1..2919: mol_type = other DNA
atggccttaccagtgaccgccttgctcctgccgctggccttgctgctccacgccgccaggccgctcgagatccagaaccctgatcctgccgtgtaccagctgcgggatagcaagagcagcgacaagagcgtgtgtctgttcaccgacttcgacagccagaccaacgtgtcccagagcaaggactccgacgtgtacatcaccgataagtgcgtgctggacatgcggagcatggacttcaagagcaactccgccgtggcctggtccaacaagtccgatttcgcctgcgccaacgccttcaacaacagcattatccccgaggacacattcttcccaagccccgagagcagcgactccaccgaccacgtgaagcccaaagagacagagaacaccaagcagcccagcaagagctgccacaagcccaaggccatcgtgcacaccgagaaagtgaacatgatgagcctgaccgtgctgggcctgcggatgctgttcgccaaaaccgtggccgtgaacttcctgctgaccgccaagctgttcttcctcagggccaagcgatctggatctggagcaacaaacttctcactactcaaacaagcaggtgacgtggaggagaatcccgggcctactagcatggccttaccagtgaccgccttgctcctgccgctggccttgctgctccacgccgccaggccggacatcgtgatgacacagagccctgatagcctggccgtgtctctgggagagagagccaccattaactgcaaggccagccagagcgtggactacgacggcgacagcttcctgaactggtatcagcagaagcccggccagcctcctaagctgctgatctacgccgccagcaatctggaaagcggcgtgccaagcagattttccggctctggcagcggcaccgatttcaccctgacaatatccagcctccagcctgaggacgtggccgtgtactactgccagcagagcaacgacgaccctctgacctttggacagggcaccaaggtggaaatcaaaggcggaggcggaagtggaggcggaggatctggcggcggaggctctgaagtccaacttgtggagtctggagggggcctggtgcagcccggcggctctctcagactgtcttgtgcggcaagcggctacaccttcagctcttactggatagaatgggtgaggcaggcacctggaaagggactggagtggattggagagattctgccaggagggggagatacaaattacaatgaaatcttcaaggggcgggccaccttttcagcggataccagcaagaatacagcttacctgcagatgaatagcctccgggcagaagataccgctgtttattattgcacgagacgggtgccaataagactggactattgggggcaagggactcttgtcaccgtcagttcaacgcgtgaggacctgaagaacgtgttcccacctgaggtggccgtgttcgagcctagcgaggccgagatcagccacacccagaaagccaccctcgtgtgcctggctaccggcttctaccccgaccatgtggaactgtcttggtgggtcaacggcaaagaggtgcacagcggcgtgtgtaccgacccccagccactgaaagaacagcccgccctgaacgacagccggtactgcctgagcagcagactgagagtgtccgccaccttctggcagaacccccggaaccacttcagatgccaggtgcagttctacggcctgagcgagaacgacgagtggacccaggacagagccaagcccgtgacccagatcgtgtctgccgaagcctggggcagagccgatgatgtgattaagatccactggcaggaaaagaagtccaacaccatcctgggcagccaggaaggcaacaccatgaagaccaacgacacctacatgaagttcagctggctgaccgtgcccgagaagtccctggacaaagaacacagatgcatcgtgcggcacgaaaacaacaagaacggcgtggaccaggaaatcatcttcccacccatcaagaccgatgtgattacaatggaccccaaggacaactgctccaaggacgccaacgataccctgctgctccagctgaccaacaccagcgcctactacatgtacttgttgctgctgctgaagtccgtggtgtacttcgccatcatcacatgctgcctgctgcggagaaccgccttctgctgcaacggcgagaagtctcgcgccaagagaagcggatctggcgtgaagcagaccctgaatttcgacctgctgaagctggctggcgacgtggaatccaacccaggcccttctagaggccatatgaccgagtacaagcccacggtgcgcctcgccacccgcgacgacgtccccagggccgtacgcaccctcgccgccgcgttcgccgactaccccgccacgcgccacaccgtcgatccggaccgccacatcgagcgggtcaccgagctgcaagaactcttcctcacgcgcgtcgggctcgacatcggcaaggtgtgggtcgcggacgacggcgccgcggtggcggtctggaccacgccggagagcgtcgaagcgggggcggtgttcgccgagatcggcccgcgcatggccgagttgagcggttcccggctggccgcgcagcaacagatggaaggcctcctggcgccgcaccggcccaaggagcccgcgtggttcctggccaccgtcggcgtctcgcccgaccaccagggcaagggtctgggcagcgccgtcgtgctccccggagtggaggcggccgagcgcgccggggtgcccgccttcctggagacctccgcgccccgcaacctccccttctacgagcggctcggcttcaccgtcaccgccgacgtcgaggtgcccgaaggaccgcgcacctggtgcatgacccgcaagcccggtgcctga

SEQ ID NO: 38525 - DNA, 2919 bp, synthetic construct
  source 1..2919: mol_type = other DNA
atggccttaccagtgaccgccttgctcctgccgctggccttgctgctccacgccgccaggccgctcgaggaggacctgaagaacgtgttcccacctgaggtggccgtgttcgagcctagcgaggccgagatcagccacacccagaaagccaccctcgtgtgcctggctaccggcttctaccccgaccatgtggaactgtcttggtgggtcaacggcaaagaggtgcacagcggcgtgtctaccgacccccagccactgaaagaacagcccgccctgaacgacagccggtactgcctgagcagcagactgagagtgtccgccaccttctggcagaacccccggaaccacttcagatgccaggtgcagttctacggcctgagcgagaacgacgagtggacccaggacagagccaagcccgtgacccagatcgtgtctgccgaagcctggggcagagccgatgatgtgattaagatccactggcaggaaaagaagtccaacaccatcctgggcagccaggaaggcaacaccatgaagaccaacgacacctacatgaagttcagctggctgaccgtgcccgagaagtccctggacaaagaacacagatgcatcgtgcggcacgaaaacaacaagaacggcgtggaccaggaaatcatcttcccacccatcaagaccgatgtgattacaatggaccccaaggacaactgctccaaggacgccaacgataccctgctgctccagctgaccaacaccagcgcctactacatgtacttgttgctgctgctgaagtccgtggtgtacttcgccatcatcacatgctgcctgctgcggagaaccgccttctgctgcaacggcgagaagtctagggccaagcgatctggatctggagcaacaaacttctcactactcaaacaagcaggtgacgtggaggagaatcccgggcctactagcatggccttaccagtgaccgccttgctcctgccgctggccttgctgctccacgccgccaggccggacatcgtgatgacacagagccctgatagcctggccgtgtctctgggagagagagccaccattaactgcaaggccagccagagcgtggactacgacggcgacagcttcctgaactggtatcagcagaagcccggccagcctcctaagctgctgatctacgccgccagcaatctggaaagcggcgtgccaagcagattttccggctctggcagcggcaccgatttcaccctgacaatatccagcctccagcctgaggacgtggccgtgtactactgccagcagagcaacgacgaccctctgacctttggacagggcaccaaggtggaaatcaaaggcggaggcggaagtggaggcggaggatctggcggcggaggctctgaagtccaacttgtggagtctggagggggcctggtgcagcccggcggctctctcagactgtcttgtgcggcaagcggctacaccttcagctcttactggatagaatgggtgaggcaggcacctggaaagggactggagtggattggagagattctgccaggagggggagatacaaattacaatgaaatcttcaaggggcgggccaccttttcagcggataccagcaagaatacagcttacctgcagatgaatagcctccgggcagaagataccgctgtttattattgcacgagacgggtgccaataagactggactattgggggcaagggactcttgtcaccgtcagttcaacgcgtatccagaaccctgatcctgccgtgtaccagctgcgggatagcaagagcagcgacaagagcgtgtgtctgttcaccgacttcgacagccagaccaacgtgtcccagagcaaggactccgacgtgtacatcaccgataagaccgtgctggacatgcggagcatggacttcaagagcaactccgccgtggcctggtccaacaagtccgatttcgcctgcgccaacgccttcaacaacagcattatccccgaggacacattcttcccaagccccgagagcagcgactccaccgaccacgtgaagcccaaagagacagagaacaccaagcagcccagcaagagctgccacaagcccaaggccatcgtgcacaccgagaaagtgaacatgatgagcctgaccgtgctgggcctgcggatgctgttcgccaaaaccgtggccgtgaacttcctgctgaccgccaagctgttcttcctccgcgccaagagaagcggatctggcgtgaagcagaccctgaatttcgacctgctgaagctggctggcgacgtggaatccaacccaggcccttctagaggccatatgaccgagtacaagcccacggtgcgcctcgccacccgcgacgacgtccccagggccgtacgcaccctcgccgccgcgttcgccgactaccccgccacgcgccacaccgtcgatccggaccgccacatcgagcgggtcaccgagctgcaagaactcttcctcacgcgcgtcgggctcgacatcggcaaggtgtgggtcgcggacgacggcgccgcggtggcggtctggaccacgccggagagcgtcgaagcgggggcggtgttcgccgagatcggcccgcgcatggccgagttgagcggttcccggctggccgcgcagcaacagatggaaggcctcctggcgccgcaccggcccaaggagcccgcgtggttcctggccaccgtcggcgtctcgcccgaccaccagggcaagggtctgggcagcgccgtcgtgctccccggagtggaggcggccgagcgcgccggggtgcccgccttcctggagacctccgcgccccgcaacctccccttctacgagcggctcggcttcaccgtcaccgccgacgtcgaggtgcccgaaggaccgcgcacctggtgcatgacccgcaagcccggtgcctga

SEQ ID NO: 38526 - DNA, 2919 bp, synthetic construct
  source 1..2919: mol_type = other DNA
atggccttaccagtgaccgccttgctcctgccgctggccttgctgctccacgccgccaggccgctcgagatccagaaccctgatcctgccgtgtaccagctgcgggatagcaagagcagcgacaagagcgtgtgtctgttcaccgacttcgacagccagaccaacgtgtcccagagcaaggactccgacgtgtacatcaccgataagaccgtgctggacatgcggagcatggacttcaagagcaactccgccgtggcctggtccaacaagtccgatttcgcctgcgccaacgccttcaacaacagcattatccccgaggacacattcttcccaagccccgagagcagcgactccaccgaccacgtgaagcccaaagagacagagaacaccaagcagcccagcaagagctgccacaagcccaaggccatcgtgcacaccgagaaagtgaacatgatgagcctgaccgtgctgggcctgcggatgctgttcgccaaaaccgtggccgtgaacttcctgctgaccgccaagctgttcttcctcagggccaagcgatctggatctggagcaacaaacttctcactactcaaacaagcaggtgacgtggaggagaatcccgggcctactagcatggccttaccagtgaccgccttgctcctgccgctggccttgctgctccacgccgccaggccggacatcgtgatgacacagagccctgatagcctggccgtgtctctgggagagagagccaccattaactgcaaggccagccagagcgtggactacgacggcgacagcttcctgaactggtatcagcagaagcccggccagcctcctaagctgctgatctacgccgccagcaatctggaaagcggcgtgccaagcagattttccggctctggcagcggcaccgatttcaccctgacaatatccagcctccagcctgaggacgtggccgtgtactactgccagcagagcaacgacgaccctctgacctttggacagggcaccaaggtggaaatcaaaggcggaggcggaagtggaggcggaggatctggcggcggaggctctgaagtccaacttgtggagtctggagggggcctggtgcagcccggcggctctctcagactgtcttgtgcggcaagcggctacaccttcagctcttactggatagaatgggtgaggcaggcacctggaaagggactggagtggattggagagattctgccaggagggggagatacaaattacaatgaaatcttcaaggggcgggccaccttttcagcggataccagcaagaatacagcttacctgcagatgaatagcctccgggcagaagataccgctgtttattattgcacgagacgggtgccaataagactggactattgggggcaagggactcttgtcaccgtcagttcaacgcgtgaggacctgaagaacgtgttcccacctgaggtggccgtgttcgagcctagcgaggccgagatcagccacacccagaaagccaccctcgtgtgcctggctaccggcttctaccccgaccatgtggaactgtcttggtgggtcaacggcaaagaggtgcacagcggcgtgtctaccgacccccagccactgaaagaacagcccgccctgaacgacagccggtactgcctgagcagcagactgagagtgtccgccaccttctggcagaacccccggaaccacttcagatgccaggtgcagttctacggcctgagcgagaacgacgagtggacccaggacagagccaagcccgtgacccagatcgtgtctgccgaagcctggggcagagccgatgatgtgattaagatccactggcaggaaaagaagtccaacaccatcctgggcagccaggaaggcaacaccatgaagaccaacgacacctacatgaagttcagctggctgaccgtgcccgagaagtccctggacaaagaacacagatgcatcgtgcggcacgaaaacaacaagaacggcgtggaccaggaaatcatcttcccacccatcaagaccgatgtgattacaatggaccccaaggacaactgctccaaggacgccaacgataccctgctgctccagctgaccaacaccagcgcctactacatgtacttgttgctgctgctgaagtccgtggtgtacttcgccatcatcacatgctgcctgctgcggagaaccgccttctgctgcaacggcgagaagtctcgcgccaagagaagcggatctggcgtgaagcagaccctgaatttcgacctgctgaagctggctggcgacgtggaatccaacccaggcccttctagaggccatatgaccgagtacaagcccacggtgcgcctcgccacccgcgacgacgtccccagggccgtacgcaccctcgccgccgcgttcgccgactaccccgccacgcgccacaccgtcgatccggaccgccacatcgagcgggtcaccgagctgcaagaactcttcctcacgcgcgtcgggctcgacatcggcaaggtgtgggtcgcggacgacggcgccgcggtggcggtctggaccacgccggagagcgtcgaagcgggggcggtgttcgccgagatcggcccgcgcatggccgagttgagcggttcccggctggccgcgcagcaacagatggaaggcctcctggcgccgcaccggcccaaggagcccgcgtggttcctggccaccgtcggcgtctcgcccgaccaccagggcaagggtctgggcagcgccgtcgtgctccccggagtggaggcggccgagcgcgccggggtgcccgccttcctggagacctccgcgccccgcaacctccccttctacgagcggctcggcttcaccgtcaccgccgacgtcgaggtgcccgaaggaccgcgcacctggtgcatgacccgcaagcccggtgcctga

SEQ ID NO: 38527 - DNA, 2613 bp, synthetic construct
  source 1..2613: mol_type = other DNA
atggccttaccagtgaccgccttgctcctgccgctggccttgctgctccacgccgccaggccgctcgaggaggacctgaagaacgtgttcccacctgaggtggccgtgttcgagcctagcaaggccgagatcgcccacacccagaaagccaccctcgtgtgcctggctaccggcttctaccccgaccatgtggaactgtcttggtgggtcaacggcaaagaggtgcacagcggcgtgtgtaccgacccccagccactgaaagaacagcccgccctgaacgacagccggtactgcctgagcagcagactgagagtgtccgccaccttctggcagaacccccggaaccacttcagatgccaggtgcagttctacggcctgagcgagaacgacgagtggacccaggacagagccaagcccgtgacccagatcgtgtctgccgaagcctggggcagagccgattgcggcatcaccagcgccagctaccaccagggcgtgctgagcgccaccatcctgtacgagatcctgctgggcaaggccaccctgtacgccgtgctggtgtctgccctggtgctgatggctatggtcaagcggaaggacagccggggaagggccaagcgatctggatctggagcaacaaacttctcactactcaaacaagcaggtgacgtggaggagaatcccgggcctactagcatggccttaccagtgaccgccttgctcctgccgctggccttgctgctccacgccgccaggccggacatcgtgatgacacagagccctgatagcctggccgtgtctctgggagagagagccaccattaactgcaaggccagccagagcgtggactacgacggcgacagcttcctgaactggtatcagcagaagcccggccagcctcctaagctgctgatctacgccgccagcaatctggaaagcggcgtgccaagcagattttccggctctggcagcggcaccgatttcaccctgacaatatccagcctccagcctgaggacgtggccgtgtactactgccagcagagcaacgacgaccctctgacctttggacagggcaccaaggtggaaatcaaaggcggaggcggaagtggaggcggaggatctggcggcggaggctctgaagtccaacttgtggagtctggagggggcctggtgcagcccggcggctctctcagactgtcttgtgcggcaagcggctacaccttcagctcttactggatagaatgggtgaggcaggcacctggaaagggactggagtggattggagagattctgccaggagggggagatacaaattacaatgaaatcttcaaggggcgggccaccttttcagcggataccagcaagaatacagcttacctgcagatgaatagcctccgggcagaagataccgctgtttattattgcacgagacgggtgccaataagactggactattgggggcaagggactcttgtcaccgtcagttcaacgcgtatccagaaccctgatcctgccgtgtaccagctgcgggatagcaagagcagcgacaagagcgtgtgtctgttcaccgacttcgacagccagaccaacgtgtcccagagcaaggactccgacgtgtacatcaccgataagtgcgtgctggacatgcggagcatggacttcaagagcaactccgccgtggcctggtccaacaagtccgatttcgcctgcgccaacgccttcaacaacagcattatccccgaggacacattcttcccaagcagcgacgtgccctgcgacgtgaagctggtggaaaagagcttcgagacagacaccaacctgaacttccagaacctgagcgtgatcggcttcagaatcctgctgctgaaagtggccggctttaacctgctgatgaccctgcggctgtggtccagccgcgccaagagaagcggatctggcgtgaagcagaccctgaatttcgacctgctgaagctggctggcgacgtggaatccaacccaggcccttctagaggccatatgaccgagtacaagcccacggtgcgcctcgccacccgcgacgacgtccccagggccgtacgcaccctcgccgccgcgttcgccgactaccccgccacgcgccacaccgtcgatccggaccgccacatcgagcgggtcaccgagctgcaagaactcttcctcacgcgcgtcgggctcgacatcggcaaggtgtgggtcgcggacgacggcgccgcggtggcggtctggaccacgccggagagcgtcgaagcgggggcggtgttcgccgagatcggcccgcgcatggccgagttgagcggttcccggctggccgcgcagcaacagatggaaggcctcctggcgccgcaccggcccaaggagcccgcgtggttcctggccaccgtcggcgtctcgcccgaccaccagggcaagggtctgggcagcgccgtcgtgctccccggagtggaggcggccgagcgcgccggggtgcccgccttcctggagacctccgcgccccgcaacctccccttctacgagcggctcggcttcaccgtcaccgccgacgtcgaggtgcccgaaggaccgcgcacctggtgcatgacccgcaagcccggtgcctga

SEQ ID NO: 38528 - DNA, 2613 bp, synthetic construct
  source 1..2613: mol_type = other DNA
atggccttaccagtgaccgccttgctcctgccgctggccttgctgctccacgccgccaggccgctcgagatccagaaccctgatcctgccgtgtaccagctgcgggatagcaagagcagcgacaagagcgtgtgtctgttcaccgacttcgacagccagaccaacgtgtcccagagcaaggactccgacgtgtacatcaccgataagtgcgtgctggacatgcggagcatggacttcaagagcaactccgccgtggcctggtccaacaagtccgatttcgcctgcgccaacgccttcaacaacagcattatccccgaggacacattcttcccaagcagcgacgtgccctgcgacgtgaagctggtggaaaagagcttcgagacagacaccaacctgaacttccagaacctgagcgtgatcggcttcagaatcctgctgctgaaagtggccggctttaacctgctgatgaccctgcggctgtggtccagcagggccaagcgatctggatctggagcaacaaacttctcactactcaaacaagcaggtgacgtggaggagaatcccgggcctactagcatggccttaccagtgaccgccttgctcctgccgctggccttgctgctccacgccgccaggccggacatcgtgatgacacagagccctgatagcctggccgtgtctctgggagagagagccaccattaactgcaaggccagccagagcgtggactacgacggcgacagcttcctgaactggtatcagcagaagcccggccagcctcctaagctgctgatctacgccgccagcaatctggaaagcggcgtgccaagcagattttccggctctggcagcggcaccgatttcaccctgacaatatccagcctccagcctgaggacgtggccgtgtactactgccagcagagcaacgacgaccctctgacctttggacagggcaccaaggtggaaatcaaaggcggaggcggaagtggaggcggaggatctggcggcggaggctctgaagtccaacttgtggagtctggagggggcctggtgcagcccggcggctctctcagactgtcttgtgcggcaagcggctacaccttcagctcttactggatagaatgggtgaggcaggcacctggaaagggactggagtggattggagagattctgccaggagggggagatacaaattacaatgaaatcttcaaggggcgggccaccttttcagcggataccagcaagaatacagcttacctgcagatgaatagcctccgggcagaagataccgctgtttattattgcacgagacgggtgccaataagactggactattgggggcaagggactcttgtcaccgtcagttcaacgcgtgaggacctgaagaacgtgttcccacctgaggtggccgtgttcgagcctagcaaggccgagatcgcccacacccagaaagccaccctcgtgtgcctggctaccggcttctaccccgaccatgtggaactgtcttggtgggtcaacggcaaagaggtgcacagcggcgtgtgtaccgacccccagccactgaaagaacagcccgccctgaacgacagccggtactgcctgagcagcagactgagagtgtccgccaccttctggcagaacccccggaaccacttcagatgccaggtgcagttctacggcctgagcgagaacgacgagtggacccaggacagagccaagcccgtgacccagatcgtgtctgccgaagcctggggcagagccgattgcggcatcaccagcgccagctaccaccagggcgtgctgagcgccaccatcctgtacgagatcctgctgggcaaggccaccctgtacgccgtgctggtgtctgccctggtgctgatggctatggtcaagcggaaggacagccggggacgcgccaagagaagcggatctggcgtgaagcagaccctgaatttcgacctgctgaagctggctggcgacgtggaatccaacccaggcccttctagaggccatatgaccgagtacaagcccacggtgcgcctcgccacccgcgacgacgtccccagggccgtacgcaccctcgccgccgcgttcgccgactaccccgccacgcgccacaccgtcgatccggaccgccacatcgagcgggtcaccgagctgcaagaactcttcctcacgcgcgtcgggctcgacatcggcaaggtgtgggtcgcggacgacggcgccgcggtggcggtctggaccacgccggagagcgtcgaagcgggggcggtgttcgccgagatcggcccgcgcatggccgagttgagcggttcccggctggccgcgcagcaacagatggaaggcctcctggcgccgcaccggcccaaggagcccgcgtggttcctggccaccgtcggcgtctcgcccgaccaccagggcaagggtctgggcagcgccgtcgtgctccccggagtggaggcggccgagcgcgccggggtgcccgccttcctggagacctccgcgccccgcaacctccccttctacgagcggctcggcttcaccgtcaccgccgacgtcgaggtgcccgaaggaccgcgcacctggtgcatgacccgcaagcccggtgcctga

SEQ ID NO: 38529 - DNA, 2292 bp, synthetic construct
  source 1..2292: mol_type = other DNA
atggccttaccagtgaccgccttgctcctgccgctggccttgctgctccacgccgccaggccgctcgagcagagttttgggttgttggaccctaaattgtgctatctgttggacggaatcctgttcatttacggagtgatcctgaccgcattgttcctgcgggttaagttttccagatccgcagacgcacccgcttaccaacaagggcagaaccaactctacaatgaacttaatttggggcggagggaagagtacgacgttctggacaaaaggaggggacgagatcccgagatgggcggaaagcctcagcgaaggaagaatccgcaagaggggctttataacgaactccagaaagataaaatggcagaagcctatagtgagattgggatgaagggagaaaggaggaggggtaaaggtcacgatgggttgtaccaaggattgagcacagccactaaagatacctatgatgcgctccacatgcaggccctgccgccaagaagggccaagcgatctggatctggagcaacaaacttctcactactcaaacaagcaggtgacgtggaggagaatcccgggcctactagcatggccttaccagtgaccgccttgctcctgccgctggccttgctgctccacgccgccaggccggacatcgtgatgacacagagccctgatagcctggccgtgtctctgggagagagagccaccattaactgcaaggccagccagagcgtggactacgacggcgacagcttcctgaactggtatcagcagaagcccggccagcctcctaagctgctgatctacgccgccagcaatctggaaagcggcgtgccaagcagattttccggctctggcagcggcaccgatttcaccctgacaatatccagcctccagcctgaggacgtggccgtgtactactgccagcagagcaacgacgaccctctgacctttggacagggcaccaaggtggaaatcaaaggcggaggcggaagtggaggcggaggatctggcggcggaggctctgaagtccaacttgtggagtctggagggggcctggtgcagcccggcggctctctcagactgtcttgtgcggcaagcggctacaccttcagctcttactggatagaatgggtgaggcaggcacctggaaagggactggagtggattggagagattctgccaggagggggagatacaaattacaatgaaatcttcaaggggcgggccaccttttcagcggataccagcaagaatacagcttacctgcagatgaatagcctccgggcagaagataccgctgtttattattgcacgagacgggtgccaataagactggactattgggggcaagggactcttgtcaccgtcagttcaacgcgtgagctgggagagcctcagctgtgctatatcctggacgccatcctgtttctgtacggcatcgtgctgaccctgctgtactgccggctgaagatccaagtgcggaaggccgccatcaccagctacgagaaatccgacggcgtgtacaccggcctgagcaccagaaatcaagagacatacgagacactgaagcacgaaaagcctccacaacgcgccaagagaagcggatctggcgtgaagcagaccctgaatttcgacctgctgaagctggctggcgacgtggaatccaacccaggcccttctagaggccatatgaccgagtacaagcccacggtgcgcctcgccacccgcgacgacgtccccagggccgtacgcaccctcgccgccgcgttcgccgactaccccgccacgcgccacaccgtcgatccggaccgccacatcgagcgggtcaccgagctgcaagaactcttcctcacgcgcgtcgggctcgacatcggcaaggtgtgggtcgcggacgacggcgccgcggtggcggtctggaccacgccggagagcgtcgaagcgggggcggtgttcgccgagatcggcccgcgcatggccgagttgagcggttcccggctggccgcgcagcaacagatggaaggcctcctggcgccgcaccggcccaaggagcccgcgtggttcctggccaccgtcggcgtctcgcccgaccaccagggcaagggtctgggcagcgccgtcgtgctccccggagtggaggcggccgagcgcgccggggtgcccgccttcctggagacctccgcgccccgcaacctccccttctacgagcggctcggcttcaccgtcaccgccgacgtcgaggtgcccgaaggaccgcgcacctggtgcatgacccgcaagcccggtgcctga

SEQ ID NO: 38530 - DNA, 2925 bp, synthetic construct; identical to SEQ ID NO: 38521
  source 1..2925: mol_type = other DNA

SEQ ID NO: 38531 - DNA, 2925 bp, synthetic construct; identical to SEQ ID NO: 38522
  source 1..2925: mol_type = other DNA

SEQ ID NO: 38532 - DNA, 2922 bp, synthetic construct
  source 1..2922: mol_type = other DNA
atggccttaccagtgaccgccttgctcctgccgctggccttgctgctccacgccgccaggccgctcgaggaggaggacctgaagaacgtgttcccacctgaggtggccgtgttcgagcctagcgaggccgagatcagccacacccagaaagccaccctcgtgtgcctggctaccggcttctaccccgaccatgtggaactgtcttggtgggtcaacggcaaagaggtgcacagcggcgtgtgtaccgacccccagccactgaaagaacagcccgccctgaacgacagccggtactgcctgagcagcagactgagagtgtccgccaccttctggcagaacccccggaaccacttcagatgccaggtgcagttctacggcctgagcgagaacgacgagtggacccaggacagagccaagcccgtgacccagatcgtgtctgccgaagcctggggcagagccgatgatgtgattaagatccactggcaggaaaagaagtccaacaccatcctgggcagccaggaaggcaacaccatgaagaccaacgacacctacatgaagttcagctggctgaccgtgcccgagaagtccctggacaaagaacacagatgcatcgtgcggcacgaaaacaacaagaacggcgtggaccaggaaatcatcttcccacccatcaagaccgatgtgattacaatggaccccaaggacaactgctccaaggacgccaacgataccctgctgctccagctgaccaacaccagcgcctactacatgtacttgttgctgctgctgaagtccgtggtgtacttcgccatcatcacatgctgcctgctgcggagaaccgccttctgctgcaacggcgagaagtctagggccaagcgatctggatctggagcaacaaacttctcactactcaaacaagcaggtgacgtggaggagaatcccgggcctactagcatggccttaccagtgaccgccttgctcctgccgctggccttgctgctccacgccgccaggccggacatcgtgatgacacagagccctgatagcctggccgtgtctctgggagagagagccaccattaactgcaaggccagccagagcgtggactacgacggcgacagcttcctgaactggtatcagcagaagcccggccagcctcctaagctgctgatctacgccgccagcaatctggaaagcggcgtgccaagcagattttccggctctggcagcggcaccgatttcaccctgacaatatccagcctccagcctgaggacgtggccgtgtactactgccagcagagcaacgacgaccctctgacctttggacagggcaccaaggtggaaatcaaaggcggaggcggaagtggaggcggaggatctggcggcggaggctctgaagtccaacttgtggagtctggagggggcctggtgcagcccggcggctctctcagactgtcttgtgcggcaagcggctacaccttcagctcttactggatagaatgggtgaggcaggcacctggaaagggactggagtggattggagagattctgccaggagggggagatacaaattacaatgaaatcttcaaggggcgggccaccttttcagcggataccagcaagaatacagcttacctgcagatgaatagcctccgggcagaagataccgctgtttattattgcacgagacgggtgccaataagactggactattgggggcaagggactcttgtcaccgtcagttcaacgcgtatccagaaccctgatcctgccgtgtaccagctgcgggatagcaagagcagcgacaagagcgtgtgtctgttcaccgacttcgacagccagaccaacgtgtcccagagcaaggactccgacgtgtacatcaccgataagtgcgtgctggacatgcggagcatggacttcaagagcaactccgccgtggcctggtccaacaagtccgatttcgcctgcgccaacgccttcaacaacagcattatccccgaggacacattcttcccaagccccgagagcagcgactccaccgaccacgtgaagcccaaagagacagagaacaccaagcagcccagcaagagctgccacaagcccaaggccatcgtgcacaccgagaaagtgaacatgatgagcctgaccgtgctgggcctgcggatgctgttcgccaaaaccgtggccgtgaacttcctgctgaccgccaagctgttcttcctccgcgccaagagaagcggatctggcgtgaagcagaccctgaatttcgacctgctgaagctggctggcgacgtggaatccaacccaggcccttctagaggccatatgaccgagtacaagcccacggtgcgcctcgccacccgcgacgacgtccccagggccgtacgcaccctcgccgccgcgttcgccgactaccccgccacgcgccacaccgtcgatccggaccgccacatcgagcgggtcaccgagctgcaagaactcttcctcacgcgcgtcgggctcgacatcggcaaggtgtgggtcgcggacgacggcgccgcggtggcggtctggaccacgccggagagcgtcgaagcgggggcggtgttcgccgagatcggcccgcgcatggccgagttgagcggttcccggctggccgcgcagcaacagatggaaggcctcctggcgccgcaccggcccaaggagcccgcgtggttcctggccaccgtcggcgtctcgcccgaccaccagggcaagggtctgggcagcgccgtcgtgctccccggagtggaggcggccgagcgcgccggggtgcccgccttcctggagacctccgcgccccgcaacctccccttctacgagcggctcggcttcaccgtcaccgccgacgtcgaggtgcccgaaggaccgcgcacctggtgcatgacccgcaagcccggtgcctga

SEQ ID NO: 38533 - DNA, 2922 bp, synthetic construct
  source 1..2922: mol_type = other DNA
atggccttaccagtgaccgccttgctcctgccgctggccttgctgctccacgccgccaggccgctcgagatccagaaccctgatcctgccgtgtaccagctgcgggatagcaagagcagcgacaagagcgtgtgtctgttcaccgacttcgacagccagaccaacgtgtcccagagcaaggactccgacgtgtacatcaccgataagtgcgtgctggacatgcggagcatggacttcaagagcaactccgccgtggcctggtccaacaagtccgatttcgcctgcgccaacgccttcaacaacagcattatccccgaggacacattcttcccaagccccgagagcagcgactccaccgaccacgtgaagcccaaagagacagagaacaccaagcagcccagcaagagctgccacaagcccaaggccatcgtgcacaccgagaaagtgaacatgatgagcctgaccgtgctgggcctgcggatgctgttcgccaaaaccgtggccgtgaacttcctgctgaccgccaagctgttcttcctcagggccaagcgatctggatctggagcaacaaacttctcactactcaaacaagcaggtgacgtggaggagaatcccgggcctactagcatggccttaccagtgaccgccttgctcctgccgctggccttgctgctccacgccgccaggccggacatcgtgatgacacagagccctgatagcctggccgtgtctctgggagagagagccaccattaactgcaaggccagccagagcgtggactacgacggcgacagcttcctgaactggtatcagcagaagcccggccagcctcctaagctgctgatctacgccgccagcaatctggaaagcggcgtgccaagcagattttccggctctggcagcggcaccgatttcaccctgacaatatccagcctccagcctgaggacgtggccgtgtactactgccagcagagcaacgacgaccctctgacctttggacagggcaccaaggtggaaatcaaaggcggaggcggaagtggaggcggaggatctggcggcggaggctctgaagtccaacttgtggagtctggagggggcctggtgcagcccggcggctctctcagactgtcttgtgcggcaagcggctacaccttcagctcttactggatagaatgggtgaggcaggcacctggaaagggactggagtggattggagagattctgccaggagggggagatacaaattacaatgaaatcttcaaggggcgggccaccttttcagcggataccagcaagaatacagcttacctgcagatgaatagcctccgggcagaagataccgctgtttattattgcacgagacgggtgccaataagactggactattgggggcaagggactcttgtcaccgtcagttcaacgcgtgaggaggacctgaagaacgtgttcccacctgaggtggccgtgttcgagcctagcgaggccgagatcagccacacccagaaagccaccctcgtgtgcctggctaccggcttctaccccgaccatgtggaactgtcttggtgggtcaacggcaaagaggtgcacagcggcgtgtgtaccgacccccagccactgaaagaacagcccgccctgaacgacagccggtactgcctgagcagcagactgagagtgtccgccaccttctggcagaacccccggaaccacttcagatgccaggtgcagttctacggcctgagcgagaacgacgagtggacccaggacagagccaagcccgtgacccagatcgtgtctgccgaagcctggggcagagccgatgatgtgattaagatccactggcaggaaaagaagtccaacaccatcctgggcagccaggaaggcaacaccatgaagaccaacgacacctacatgaagttcagctggctgaccgtgcccgagaagtccctggacaaagaacacagatgcatcgtgcggcacgaaaacaacaagaacggcgtggaccaggaaatcatcttcccacccatcaagaccgatgtgattacaatggaccccaaggacaactgctccaaggacgccaacgataccctgctgctccagctgaccaacaccagcgcctactacatgtacttgttgctgctgctgaagtccgtggtgtacttcgccatcatcacatgctgcctgctgcggagaaccgccttctgctgcaacggcgagaagtctcgcgccaagagaagcggatctggcgtgaagcagaccctgaatttcgacctgctgaagctggctggcgacgtggaatccaacccaggcccttctagaggccatatgaccgagtacaagcccacggtgcgcctcgccacccgcgacgacgtccccagggccgtacgcaccctcgccgccgcgttcgccgactaccccgccacgcgccacaccgtcgatccggaccgccacatcgagcgggtcaccgagctgcaagaactcttcctcacgcgcgtcgggctcgacatcggcaaggtgtgggtcgcggacgacggcgccgcggtggcggtctggaccacgccggagagcgtcgaagcgggggcggtgttcgccgagatcggcccgcgcatggccgagttgagcggttcccggctggccgcgcagcaacagatggaaggcctcctggcgccgcaccggcccaaggagcccgcgtggttcctggccaccgtcggcgtctcgcccgaccaccagggcaagggtctgggcagcgccgtcgtgctccccggagtggaggcggccgagcgcgccggggtgcccgccttcctggagacctccgcgccccgcaacctccccttctacgagcggctcggcttcaccgtcaccgccgacgtcgaggtgcccgaaggaccgcgcacctggtgcatgacccgcaagcccggtgcctga

SEQ ID NO: 38534 - DNA, 2613 bp, synthetic construct
  source 1..2613: mol_type = other DNA
atggccttaccagtgaccgccttgctcctgccgctggccttgctgctccacgccgccaggccgctcgaggaggacctgaagaacgtgttcccacctgaggtggccgtgttcgagcctagcgaggccgagatcagccacacccagaaagccaccctcgtgtgcctggctaccggcttctaccccgaccatgtggaactgtcttggtgggtcaacggcaaagaggtgcacagcggcgtgtctaccgacccccagccactgaaagaacagcccgccctgaacgacagccggtactgcctgagcagcagactgagagtgtccgccaccttctggcagaacccccggaaccacttcagatgccaggtgcagttctacggcctgagcgagaacgacgagtggacccaggacagagccaagcccgtgacccagatcgtgtctgccgaagcctggggcagagccgattgcggctttaccagcgagagctaccagcagggcgtgctgagcgccaccaacctgagcgtgatcggcttcagaatcctgctgctgaaagtggccggctttaacctgctgatgaccctgcggctgtggtccagcagggccaagcgatctggatctggagcaacaaacttctcactactcaaacaagcaggtgacgtggaggagaatcccgggcctactagcatggccttaccagtgaccgccttgctcctgccgctggccttgctgctccacgccgccaggccggacatcgtgatgacacagagccctgatagcctggccgtgtctctgggagagagagccaccattaactgcaaggccagccagagcgtggactacgacggcgacagcttcctgaactggtatcagcagaagcccggccagcctcctaagctgctgatctacgccgccagcaatctggaaagcggcgtgccaagcagattttccggctctggcagcggcaccgatttcaccctgacaatatccagcctccagcctgaggacgtggccgtgtactactgccagcagagcaacgacgaccctctgacctttggacagggcaccaaggtggaaatcaaaggcggaggcggaagtggaggcggaggatctggcggcggaggctctgaagtccaacttgtggagtctggagggggcctggtgcagcccggcggctctctcagactgtcttgtgcggcaagcggctacaccttcagctcttactggatagaatgggtgaggcaggcacctggaaagggactggagtggattggagagattctgccaggagggggagatacaaattacaatgaaatcttcaaggggcgggccaccttttcagcggataccagcaagaatacagcttacctgcagatgaatagcctccgggcagaagataccgctgtttattattgcacgagacgggtgccaataagactggactattgggggcaagggactcttgtcaccgtcagttcaacgcgtatccagaaccctgatcctgccgtgtaccagctgcgggatagcaagagcagcgacaagagcgtgtgtctgttcaccgacttcgacagccagaccaacgtgtcccagagcaaggactccgacgtgtacatcaccgataagaccgtgctggacatgcggagcatggacttcaagagcaactccgccgtggcctggtccaacaagtccgatttcgcctgcgccaacgccttcaacaacagcattatccccgaggacacattcttcccaagccccgagagcagctgcgacgtgaagctggtggaaaagagcttcgagacagacaccaacctgaacttccagatcctgtacgagatcctgctgggcaaggccaccctgtacgccgtgctggtgtctgccctggtgctgatggctatggtcaagcggaaggacagccggggacgcgccaagagaagcggatctggcgtgaagcagaccctgaatttcgacctgctgaagctggctggcgacgtggaatccaacccaggcccttctagaggccatatgaccgagtacaagcccacggtgcgcctcgccacccgcgacgacgtccccagggccgtacgcaccctcgccgccgcgttcgccgactaccccgccacgcgccacaccgtcgatccggaccgccacatcgagcgggtcaccgagctgcaagaactcttcctcacgcgcgtcgggctcgacatcggcaaggtgtgggtcgcggacgacggcgccgcggtggcggtctggaccacgccggagagcgtcgaagcgggggcggtgttcgccgagatcggcccgcgcatggccgagttgagcggttcccggctggccgcgcagcaacagatggaaggcctcctggcgccgcaccggcccaaggagcccgcgtggttcctggccaccgtcggcgtctcgcccgaccaccagggcaagggtctgggcagcgccgtcgtgctccccggagtggaggcggccgagcgcgccggggtgcccgccttcctggagacctccgcgccccgcaacctccccttctacgagcggctcggcttcaccgtcaccgccgacgtcgaggtgcccgaaggaccgcgcacctggtgcatgacccgcaagcccggtgcctga

SEQ ID NO: 38535 - DNA, 2613 bp, synthetic construct
  source 1..2613: mol_type = other DNA
atggccttaccagtgaccgccttgctcctgccgctggccttgctgctccacgccgccaggccgctcgagatccagaaccctgatcctgccgtgtaccagctgcgggatagcaagagcagcgacaagagcgtgtgtctgttcaccgacttcgacagccagaccaacgtgtcccagagcaaggactccgacgtgtacatcaccgataagaccgtgctggacatgcggagcatggacttcaagagcaactccgccgtggcctggtccaacaagtccgatttcgcctgcgccaacgccttcaacaacagcattatccccgaggacacattcttcccaagccccgagagcagctgcgacgtgaagctggtggaaaagagcttcgagacagacaccaacctgaacttccagatcctgtacgagatcctgctgggcaaggccaccctgtacgccgtgctggtgtctgccctggtgctgatggctatggtcaagcggaaggacagccggggaagggccaagcgatctggatctggagcaacaaacttctcactactcaaacaagcaggtgacgtggaggagaatcccgggcctactagcatggccttaccagtgaccgccttgctcctgccgctggccttgctgctccacgccgccaggccggacatcgtgatgacacagagccctgatagcctggccgtgtctctgggagagagagccaccattaactgcaaggccagccagagcgtggactacgacggcgacagcttcctgaactggtatcagcagaagcccggccagcctcctaagctgctgatctacgccgccagcaatctggaaagcggcgtgccaagcagattttccggctctggcagcggcaccgatttcaccctgacaatatccagcctccagcctgaggacgtggccgtgtactactgccagcagagcaacgacgaccctctgacctttggacagggcaccaaggtggaaatcaaaggcggaggcggaagtggaggcggaggatctggcggcggaggctctgaagtccaacttgtggagtctggagggggcctggtgcagcccggcggctctctcagactgtcttgtgcggcaagcggctacaccttcagctcttactggatagaatgggtgaggcaggcacctggaaagggactggagtggattggagagattctgccaggagggggagatacaaattacaatgaaatcttcaaggggcgggccaccttttcagcggataccagcaagaatacagcttacctgcagatgaatagcctccgggcagaagataccgctgtttattattgcacgagacgggtgccaataagactggactattgggggcaagggactcttgtcaccgtcagttcaacgcgtgaggacctgaagaacgtgttcccacctgaggtggccgtgttcgagcctagcgaggccgagatcagccacacccagaaagccaccctcgtgtgcctggctaccggcttctaccccgaccatgtggaactgtcttggtgggtcaacggcaaagaggtgcacagcggcgtgtctaccgacccccagccactgaaagaacagcccgccctgaacgacagccggtactgcctgagcagcagactgagagtgtccgccaccttctggcagaacccccggaaccacttcagatgccaggtgcagttctacggcctgagcgagaacgacgagtggacccaggacagagccaagcccgtgacccagatcgtgtctgccgaagcctggggcagagccgattgcggctttaccagcgagagctaccagcagggcgtgctgagcgccaccaacctgagcgtgatcggcttcagaatcctgctgctgaaagtggccggctttaacctgctgatgaccctgcggctgtggtccagccgcgccaagagaagcggatctggcgtgaagcagaccctgaatttcgacctgctgaagctggctggcgacgtggaatccaacccaggcccttctagaggccatatgaccgagtacaagcccacggtgcgcctcgccacccgcgacgacgtccccagggccgtacgcaccctcgccgccgcgttcgccgactaccccgccacgcgccacaccgtcgatccggaccgccacatcgagcgggtcaccgagctgcaagaactcttcctcacgcgcgtcgggctcgacatcggcaaggtgtgggtcgcggacgacggcgccgcggtggcggtctggaccacgccggagagcgtcgaagcgggggcggtgttcgccgagatcggcccgcgcatggccgagttgagcggttcccggctggccgcgcagcaacagatggaaggcctcctggcgccgcaccggcccaaggagcccgcgtggttcctggccaccgtcggcgtctcgcccgaccaccagggcaagggtctgggcagcgccgtcgtgctccccggagtggaggcggccgagcgcgccggggtgcccgccttcctggagacctccgcgccccgcaacctccccttctacgagcggctcggcttcaccgtcaccgccgacgtcgaggtgcccgaaggaccgcgcacctggtgcatgacccgcaagcccggtgcctga

SEQ ID NO: 38536 - DNA, 2613 bp, synthetic construct
  source 1..2613: mol_type = other DNA
atggccttaccagtgaccgccttgctcctgccgctggccttgctgctccacgccgccaggccgctcgaggaggacctgaagaacgtgttcccacctgaggtggccgtgttcgagcctagcgaggccgagatcagccacacccagaaagccaccctcgtgtgcctggctaccggcttctaccccgaccatgtggaactgtcttggtgggtcaacggcaaagaggtgcacagcggcgtgtgtaccgacccccagccactgaaagaacagcccgccctgaacgacagccggtactgcctgagcagcagactgagagtgtccgccaccttctggcagaacccccggaaccacttcagatgccaggtgcagttctacggcctgagcgagaacgacgagtggacccaggacagagccaagcccgtgacccagatcgtgtctgccgaagcctggggcagagccgattgcgacgtgaagctggtggaaaagagcttcgagacagacaccaacctgaacttccagaacctgagcgtgatcggcttcagaatcctgctgctgaaagtggccggctttaacctgctgatgaccctgcggctgtggtccagcagggccaagcgatctggatctggagcaacaaacttctcactactcaaacaagcaggtgacgtggaggagaatcccgggcctactagcatggccttaccagtgaccgccttgctcctgccgctggccttgctgctccacgccgccaggccggacatcgtgatgacacagagccctgatagcctggccgtgtctctgggagagagagccaccattaactgcaaggccagccagagcgtggactacgacggcgacagcttcctgaactggtatcagcagaagcccggccagcctcctaagctgctgatctacgccgccagcaatctggaaagcggcgtgccaagcagattttccggctctggcagcggcaccgatttcaccctgacaatatccagcctccagcctgaggacgtggccgtgtactactgccagcagagcaacgacgaccctctgacctttggacagggcaccaaggtggaaatcaaaggcggaggcggaagtggaggcggaggatctggcggcggaggctctgaagtccaacttgtggagtctggagggggcctggtgcagcccggcggctctctcagactgtcttgtgcggcaagcggctacaccttcagctcttactggatagaatgggtgaggcaggcacctggaaagggactggagtggattggagagattctgccaggagggggagatacaaattacaatgaaatcttcaaggggcgggccaccttttcagcggataccagcaagaatacagcttacctgcagatgaatagcctccgggcagaagataccgctgtttattattgcacgagacgggtgccaataagactggactattgggggcaagggactcttgtcaccgtcagttcaacgcgtatccagaaccctgatcctgccgtgtaccagctgcgggatagcaagagcagcgacaagagcgtgtgtctgttcaccgacttcgacagccagaccaacgtgtcccagagcaaggactccgacgtgtacatcaccgataagtgcgtgctggacatgcggagcatggacttcaagagcaactccgccgtggcctggtccaacaagtccgatttcgcctgcgccaacgccttcaacaacagcattatccccgaggacacattcttcccaagccccgagagcagctgcggctttaccagcgagagctaccagcagggcgtgctgagcgccaccatcctgtacgagatcctgctgggcaaggccaccctgtacgccgtgctggtgtctgccctggtgctgatggctatggtcaagcggaaggacagccggggacgcgccaagagaagcggatctggcgtgaagcagaccctgaatttcgacctgctgaagctggctggcgacgtggaatccaacccaggcccttctagaggccatatgaccgagtacaagcccacggtgcgcctcgccacccgcgacgacgtccccagggccgtacgcaccctcgccgccgcgttcgccgactaccccgccacgcgccacaccgtcgatccggaccgccacatcgagcgggtcaccgagctgcaagaactcttcctcacgcgcgtcgggctcgacatcggcaaggtgtgggtcgcggacgacggcgccgcggtggcggtctggaccacgccggagagcgtcgaagcgggggcggtgttcgccgagatcggcccgcgcatggccgagttgagcggttcccggctggccgcgcagcaacagatggaaggcctcctggcgccgcaccggcccaaggagcccgcgtggttcctggccaccgtcggcgtctcgcccgaccaccagggcaagggtctgggcagcgccgtcgtgctccccggagtggaggcggccgagcgcgccggggtgcccgccttcctggagacctccgcgccccgcaacctccccttctacgagcggctcggcttcaccgtcaccgccgacgtcgaggtgcccgaaggaccgcgcacctggtgcatgacccgcaagcccggtgcctga

SEQ ID NO: 38537 - DNA, 2613 bp, synthetic construct
  source 1..2613: mol_type = other DNA
atggccttaccagtgaccgccttgctcctgccgctggccttgctgctccacgccgccaggccgctcgaggaggacctgaagaacgtgttcccacctgaggtggccgtgttcgagcctagcgaggccgagatcagccacacccagaaagccaccctcgtgtgcctggctaccggcttctaccccgaccatgtggaactgtcttggtgggtcaacggcaaagaggtgcacagcggcgtgtctaccgacccccagccactgaaagaacagcccgccctgaacgacagccggtactgcctgagcagcagactgagagtgtccgccaccttctggcagaacccccggaaccacttcagatgccaggtgcagttctacggcctgagcgagaacgacgagtggacccaggacagagccaagcccgtgacccagatcgtgtctgccgaagcctggggcagagccgattgcgacgtgaagctggtggaaaagagcttcgagacagacaccaacctgaacttccagaacctgagcgtgatcggcttcagaatcctgctgctgaaagtggccggctttaacctgctgatgaccctgcggctgtggtccagcagggccaagcgatctggatctggagcaacaaacttctcactactcaaacaagcaggtgacgtggaggagaatcccgggcctactagcatggccttaccagtgaccgccttgctcctgccgctggccttgctgctccacgccgccaggccggacatcgtgatgacacagagccctgatagcctggccgtgtctctgggagagagagccaccattaactgcaaggccagccagagcgtggactacgacggcgacagcttcctgaactggtatcagcagaagcccggccagcctcctaagctgctgatctacgccgccagcaatctggaaagcggcgtgccaagcagattttccggctctggcagcggcaccgatttcaccctgacaatatccagcctccagcctgaggacgtggccgtgtactactgccagcagagcaacgacgaccctctgacctttggacagggcaccaaggtggaaatcaaaggcggaggcggaagtggaggcggaggatctggcggcggaggctctgaagtccaacttgtggagtctggagggggcctggtgcagcccggcggctctctcagactgtcttgtgcggcaagcggctacaccttcagctcttactggatagaatgggtgaggcaggcacctggaaagggactggagtggattggagagattctgccaggagggggagatacaaattacaatgaaatcttcaaggggcgggccaccttttcagcggataccagcaagaatacagcttacctgcagatgaatagcctccgggcagaagataccgctgtttattattgcacgagacgggtgccaataagactggactattgggggcaagggactcttgtcaccgtcagttcaacgcgtatccagaaccctgatcctgccgtgtaccagctgcgggatagcaagagcagcgacaagagcgtgtgtctgttcaccgacttcgacagccagaccaacgtgtcccagagcaaggactccgacgtgtacatcaccgataagaccgtgctggacatgcggagcatggacttcaagagcaactccgccgtggcctggtccaacaagtccgatttcgcctgcgccaacgccttcaacaacagcattatccccgaggacacattcttcccaagccccgagagcagctgcggctttaccagcgagagctaccagcagggcgtgctgagcgccaccatcctgtacgagatcctgctgggcaaggccaccctgtacgccgtgctggtgtctgccctggtgctgatggctatggtcaagcggaaggacagccggggacgcgccaagagaagcggatctggcgtgaagcagaccctgaatttcgacctgctgaagctggctggcgacgtggaatccaacccaggcccttctagaggccatatgaccgagtacaagcccacggtgcgcctcgccacccgcgacgacgtccccagggccgtacgcaccctcgccgccgcgttcgccgactaccccgccacgcgccacaccgtcgatccggaccgccacatcgagcgggtcaccgagctgcaagaactcttcctcacgcgcgtcgggctcgacatcggcaaggtgtgggtcgcggacgacggcgccgcggtggcggtctggaccacgccggagagcgtcgaagcgggggcggtgttcgccgagatcggcccgcgcatggccgagttgagcggttcccggctggccgcgcagcaacagatggaaggcctcctggcgccgcaccggcccaaggagcccgcgtggttcctggccaccgtcggcgtctcgcccgaccaccagggcaagggtctgggcagcgccgtcgtgctccccggagtggaggcggccgagcgcgccggggtgcccgccttcctggagacctccgcgccccgcaacctccccttctacgagcggctcggcttcaccgtcaccgccgacgtcgaggtgcccgaaggaccgcgcacctggtgcatgacccgcaagcccggtgcctga

SEQ ID NO: 38538 - DNA, 2922 bp, synthetic construct
  source 1..2922: mol_type = other DNA
atggccttaccagtgaccgccttgctcctgccgctggccttgctgctccacgccgccaggccgctcgaggaggaggacctgaagaacgtgttcccacctgaggtggccgtgttcgagcctagcgaggccgagatcagccacacccagaaagccaccctcgtgtgcctggctaccggcttctaccccgaccatgtggaactgtcttggtgggtcaacggcaaagaggtgcacagcggcgtgtctaccgacccccagccactgaaagaacagcccgccctgaacgacagccggtactgcctgagcagcagactgagagtgtccgccaccttctggcagaacccccggaaccacttcagatgccaggtgcagttctacggcctgagcgagaacgacgagtggacccaggacagagccaagcccgtgacccagatcgtgtctgccgaagcctggggcagagccgatgatgtgattaagatccactggcaggaaaagaagtccaacaccatcctgggcagccaggaaggcaacaccatgaagaccaacgacacctacatgaagttcagctggctgaccgtgcccgagaagtccctggacaaagaacacagatgcatcgtgcggcacgaaaacaacaagaacggcgtggaccaggaaatcatcttcccacccatcaagaccgatgtgattacaatggaccccaaggacaactgctccaaggacgccaacgataccctgctgctccagctgaccaacaccagcgcctactacatgtacttgttgctgctgctgaagtccgtggtgtacttcgccatcatcacatgctgcctgctgcggagaaccgccttctgctgcaacggcgagaagtctagggccaagcgatctggatctggagcaacaaacttctcactactcaaacaagcaggtgacgtggaggagaatcccgggcctactagcatggccttaccagtgaccgccttgctcctgccgctggccttgctgctccacgccgccaggccggacatcgtgatgacacagagccctgatagcctggccgtgtctctgggagagagagccaccattaactgcaaggccagccagagcgtggactacgacggcgacagcttcctgaactggtatcagcagaagcccggccagcctcctaagctgctgatctacgccgccagcaatctggaaagcggcgtgccaagcagattttccggctctggcagcggcaccgatttcaccctgacaatatccagcctccagcctgaggacgtggccgtgtactactgccagcagagcaacgacgaccctctgacctttggacagggcaccaaggtggaaatcaaaggcggaggcggaagtggaggcggaggatctggcggcggaggctctgaagtccaacttgtggagtctggagggggcctggtgcagcccggcggctctctcagactgtcttgtgcggcaagcggctacaccttcagctcttactggatagaatgggtgaggcaggcacctggaaagggactggagtggattggagagattctgccaggagggggagatacaaattacaatgaaatcttcaaggggcgggccaccttttcagcggataccagcaagaatacagcttacctgcagatgaatagcctccgggcagaagataccgctgtttattattgcacgagacgggtgccaataagactggactattgggggcaagggactcttgtcaccgtcagttcaacgcgtatccagaaccctgatcctgccgtgtaccagctgcgggatagcaagagcagcgacaagagcgtgtgtctgttcaccgacttcgacagccagaccaacgtgtcccagagcaaggactccgacgtgtacatcaccgataagaccgtgctggacatgcggagcatggacttcaagagcaactccgccgtggcctggtccaacaagtccgatttcgcctgcgccaacgccttcaacaacagcattatccccgaggacacattcttcccaagccccgagagcagcgactccaccgaccacgtgaagcccaaagagacagagaacaccaagcagcccagcaagagctgccacaagcccaaggccatcgtgcacaccgagaaagtgaacatgatgagcctgaccgtgctgggcctgcggatgctgttcgccaaaaccgtggccgtgaacttcctgctgaccgccaagctgttcttcctccgcgccaagagaagcggatctggcgtgaagcagaccctgaatttcgacctgctgaagctggctggcgacgtggaatccaacccaggcccttctagaggccatatgaccgagtacaagcccacggtgcgcctcgccacccgcgacgacgtccccagggccgtacgcaccctcgccgccgcgttcgccgactaccccgccacgcgccacaccgtcgatccggaccgccacatcgagcgggtcaccgagctgcaagaactcttcctcacgcgcgtcgggctcgacatcggcaaggtgtgggtcgcggacgacggcgccgcggtggcggtctggaccacgccggagagcgtcgaagcgggggcggtgttcgccgagatcggcccgcgcatggccgagttgagcggttcccggctggccgcgcagcaacagatggaaggcctcctggcgccgcaccggcccaaggagcccgcgtggttcctggccaccgtcggcgtctcgcccgaccaccagggcaagggtctgggcagcgccgtcgtgctccccggagtggaggcggccgagcgcgccggggtgcccgccttcctggagacctccgcgccccgcaacctccccttctacgagcggctcggcttcaccgtcaccgccgacgtcgaggtgcccgaaggaccgcgcacctggtgcatgacccgcaagcccggtgcctga

SEQ ID NO: 38539 - DNA, 2613 bp, synthetic construct
  source 1..2613: mol_type = other DNA
atggccttaccagtgaccgccttgctcctgccgctggccttgctgctccacgccgccaggccgctcgaggaggacctgaagaacgtgttcccacctgaggtggccgtgttcgagcctagcgaggccgagatcagccacacccagaaagccaccctcgtgtgcctggctaccggcttctaccccgaccatgtggaactgtcttggtgggtcaacggcaaagaggtgcacagcggcgtgtgtaccgacccccagccactgaaagaacagcccgccctgaacgacagccggtactgcctgagcagcagactgagagtgtccgccaccttctggcagaacccccggaaccacttcagatgccaggtgcagttctacggcctgagcgagaacgacgagtggacccaggacagagccaagcccgtgacccagatcgtgtctgccgaagcctggggcagagccgattgcggctttaccagcgagagctaccagcagggcgtgctgagcgccaccaacctgagcgtgatcggcttcagaatcctgctgctgaaagtggccggctttaacctgctgatgaccctgcggctgtggtccagcagggccaagcgatctggatctggagcaacaaacttctcactactcaaacaagcaggtgacgtggaggagaatcccgggcctactagcatggccttaccagtgaccgccttgctcctgccgctggccttgctgctccacgccgccaggccggacatcgtgatgacacagagccctgatagcctggccgtgtctctgggagagagagccaccattaactgcaaggccagccagagcgtggactacgacggcgacagcttcctgaactggtatcagcagaagcccggccagcctcctaagctgctgatctacgccgccagcaatctggaaagcggcgtgccaagcagattttccggctctggcagcggcaccgatttcaccctgacaatatccagcctccagcctgaggacgtggccgtgtactactgccagcagagcaacgacgaccctctgacctttggacagggcaccaaggtggaaatcaaaggcggaggcggaagtggaggcggaggatctggcggcggaggctctgaagtccaacttgtggagtctggagggggcctggtgcagcccggcggctctctcagactgtcttgtgcggcaagcggctacaccttcagctcttactggatagaatgggtgaggcaggcacctggaaagggactggagtggattggagagattctgccaggagggggagatacaaattacaatgaaatcttcaaggggcgggccaccttttcagcggataccagcaagaatacagcttacctgcagatgaatagcctccgggcagaagataccgctgtttattattgcacgagacgggtgccaataagactggactattgggggcaagggactcttgtcaccgtcagttcaacgcgtatccagaaccctgatcctgccgtgtaccagctgcgggatagcaagagcagcgacaagagcgtgtgtctgttcaccgacttcgacagccagaccaacgtgtcccagagcaaggactccgacgtgtacatcaccgataagtgcgtgctggacatgcggagcatggacttcaagagcaactccgccgtggcctggtccaacaagtccgatttcgcctgcgccaacgccttcaacaacagcattatccccgaggacacattcttcccaagccccgagagcagctgcgacgtgaagctggtggaaaagagcttcgagacagacaccaacctgaacttccagatcctgtacgagatcctgctgggcaaggccaccctgtacgccgtgctggtgtctgccctggtgctgatggctatggtcaagcggaaggacagccggggacgcgccaagagaagcggatctggcgtgaagcagaccctgaatttcgacctgctgaagctggctggcgacgtggaatccaacccaggcccttctagaggccatatgaccgagtacaagcccacggtgcgcctcgccacccgcgacgacgtccccagggccgtacgcaccctcgccgccgcgttcgccgactaccccgccacgcgccacaccgtcgatccggaccgccacatcgagcgggtcaccgagctgcaagaactcttcctcacgcgcgtcgggctcgacatcggcaaggtgtgggtcgcggacgacggcgccgcggtggcggtctggaccacgccggagagcgtcgaagcgggggcggtgttcgccgagatcggcccgcgcatggccgagttgagcggttcccggctggccgcgcagcaacagatggaaggcctcctggcgccgcaccggcccaaggagcccgcgtggttcctggccaccgtcggcgtctcgcccgaccaccagggcaagggtctgggcagcgccgtcgtgctccccggagtggaggcggccgagcgcgccggggtgcccgccttcctggagacctccgcgccccgcaacctccccttctacgagcggctcggcttcaccgtcaccgccgacgtcgaggtgcccgaaggaccgcgcacctggtgcatgacccgcaagcccggtgcctga

SEQ ID NO: 38540 - DNA, 2700 bp, synthetic construct
  source 1..2700: mol_type = other DNA
atggccttaccagtgaccgccttgctcctgccgctggccttgctgctccacgccgccaggccgctcgaggaggaggacctgaagaacgtgttcccacctgaggtggccgtgttcgagcctagcgaggccgagatcagccacacccagaaagccaccctcgtgtgcctggctaccggcttctaccccgaccatgtggaactgtcttggtgggtcaacggcaaagaggtgcacagcggcgtgtgtaccgacccccagccactgaaagaacagcccgccctgaacgacagccggtactgcctgagcagcagactgagagtgtccgccaccttctggcagaacccccggaaccacttcagatgccaggtgcagttctacggcctgagcgagaacgacgagtggacccaggacagagccaagcccgtgacccagatcgtgtctgccgaagcctggggcagagccgattgcggctttaccagcgagagctaccagcagggcgtgctgagcgccaccaacctgagcgtgatcggcttcagaatcctgctgctgaaagtggccggctttaacctgctgatgaccctgcggctgtggtccagcagggccaagcgatctggatctggagcaacaaacttctcactactcaaacaagcaggtgacgtggaggagaatcccgggcctactagcatggccttaccagtgaccgccttgctcctgccgctggccttgctgctccacgccgccaggccggacatcgtgatgacacagagccctgatagcctggccgtgtctctgggagagagagccaccattaactgcaaggccagccagagcgtggactacgacggcgacagcttcctgaactggtatcagcagaagcccggccagcctcctaagctgctgatctacgccgccagcaatctggaaagcggcgtgccaagcagattttccggctctggcagcggcaccgatttcaccctgacaatatccagcctccagcctgaggacgtggccgtgtactactgccagcagagcaacgacgaccctctgacctttggacagggcaccaaggtggaaatcaaaggcggaggcggaagtggaggcggaggatctggcggcggaggctctgaagtccaacttgtggagtctggagggggcctggtgcagcccggcggctctctcagactgtcttgtgcggcaagcggctacaccttcagctcttactggatagaatgggtgaggcaggcacctggaaagggactggagtggattggagagattctgccaggagggggagatacaaattacaatgaaatcttcaaggggcgggccaccttttcagcggataccagcaagaatacagcttacctgcagatgaatagcctccgggcagaagataccgctgtttattattgcacgagacgggtgccaataagactggactattgggggcaagggactcttgtcaccgtcagttcaacgcgtggacagcctaaggccaatcctaccgtgacactgttccctccaagcagcgaagaactccaggccaacaaggccacacttgtgtgcctgatctccgacttctaccctggggctgtgacagtggcttggaaggccgatggatctcctgtgaaagccggcgtggaaaccaccaagccatccaagcagagcaacaacaaatacgccgccagctcctacctgagcctgacacctgagcagtggaagtcccacagatcctacagctgccaagtgacccacgaaggcagcaccgtggaaaagacagtggcccctacagagtgcagccccatcaagaccgatgtgattacaatggaccccaaggacaactgctccaaggacgccaacgataccctgctgctccagctgaccaacaccagcgcctactacatgtacttgttgctgctgctgaagtccgtggtgtacttcgccatcatcacatgctgcctgctgcggagaaccgccttctgctgcaacggcgagaagtctcgcgccaagagaagcggatctggcgtgaagcagaccctgaatttcgacctgctgaagctggctggcgacgtggaatccaacccaggcccttctagaggccatatgaccgagtacaagcccacggtgcgcctcgccacccgcgacgacgtccccagggccgtacgcaccctcgccgccgcgttcgccgactaccccgccacgcgccacaccgtcgatccggaccgccacatcgagcgggtcaccgagctgcaagaactcttcctcacgcgcgtcgggctcgacatcggcaaggtgtgggtcgcggacgacggcgccgcggtggcggtctggaccacgccggagagcgtcgaagcgggggcggtgttcgccgagatcggcccgcgcatggccgagttgagcggttcccggctggccgcgcagcaacagatggaaggcctcctggcgccgcaccggcccaaggagcccgcgtggttcctggccaccgtcggcgtctcgcccgaccaccagggcaagggtctgggcagcgccgtcgtgctccccggagtggaggcggccgagcgcgccggggtgcccgccttcctggagacctccgcgccccgcaacctccccttctacgagcggctcggcttcaccgtcaccgccgacgtcgaggtgcccgaaggaccgcgcacctggtgcatgacccgcaagcccggtgcctga

SEQ ID NO: 38541 - DNA, 2700 bp, synthetic construct
  source 1..2700: mol_type = other DNA
atggccttaccagtgaccgccttgctcctgccgctggccttgctgctccacgccgccaggccgctcgagggacagcctaaggccaatcctaccgtgacactgttccctccaagcagcgaagaactccaggccaacaaggccacacttgtgtgcctgatctccgacttctaccctggggctgtgacagtggcttggaaggccgatggatctcctgtgaaagccggcgtggaaaccaccaagccatccaagcagagcaacaacaaatacgccgccagctcctacctgagcctgacacctgagcagtggaagtcccacagatcctacagctgccaagtgacccacgaaggcagcaccgtggaaaagacagtggcccctacagagtgcagccccatcaagaccgatgtgattacaatggaccccaaggacaactgctccaaggacgccaacgataccctgctgctccagctgaccaacaccagcgcctactacatgtacttgttgctgctgctgaagtccgtggtgtacttcgccatcatcacatgctgcctgctgcggagaaccgccttctgctgcaacggcgagaagtctagggccaagcgatctggatctggagcaacaaacttctcactactcaaacaagcaggtgacgtggaggagaatcccgggcctactagcatggccttaccagtgaccgccttgctcctgccgctggccttgctgctccacgccgccaggccggacatcgtgatgacacagagccctgatagcctggccgtgtctctgggagagagagccaccattaactgcaaggccagccagagcgtggactacgacggcgacagcttcctgaactggtatcagcagaagcccggccagcctcctaagctgctgatctacgccgccagcaatctggaaagcggcgtgccaagcagattttccggctctggcagcggcaccgatttcaccctgacaatatccagcctccagcctgaggacgtggccgtgtactactgccagcagagcaacgacgaccctctgacctttggacagggcaccaaggtggaaatcaaaggcggaggcggaagtggaggcggaggatctggcggcggaggctctgaagtccaacttgtggagtctggagggggcctggtgcagcccggcggctctctcagactgtcttgtgcggcaagcggctacaccttcagctcttactggatagaatgggtgaggcaggcacctggaaagggactggagtggattggagagattctgccaggagggggagatacaaattacaatgaaatcttcaaggggcgggccaccttttcagcggataccagcaagaatacagcttacctgcagatgaatagcctccgggcagaagataccgctgtttattattgcacgagacgggtgccaataagactggactattgggggcaagggactcttgtcaccgtcagttcaacgcgtgaggaggacctgaagaacgtgttcccacctgaggtggccgtgttcgagcctagcgaggccgagatcagccacacccagaaagccaccctcgtgtgcctggctaccggcttctaccccgaccatgtggaactgtcttggtgggtcaacggcaaagaggtgcacagcggcgtgtgtaccgacccccagccactgaaagaacagcccgccctgaacgacagccggtactgcctgagcagcagactgagagtgtccgccaccttctggcagaacccccggaaccacttcagatgccaggtgcagttctacggcctgagcgagaacgacgagtggacccaggacagagccaagcccgtgacccagatcgtgtctgccgaagcctggggcagagccgattgcggctttaccagcgagagctaccagcagggcgtgctgagcgccaccaacctgagcgtgatcggcttcagaatcctgctgctgaaagtggccggctttaacctgctgatgaccctgcggctgtggtccagccgcgccaagagaagcggatctggcgtgaagcagaccctgaatttcgacctgctgaagctggctggcgacgtggaatccaacccaggcccttctagaggccatatgaccgagtacaagcccacggtgcgcctcgccacccgcgacgacgtccccagggccgtacgcaccctcgccgccgcgttcgccgactaccccgccacgcgccacaccgtcgatccggaccgccacatcgagcgggtcaccgagctgcaagaactcttcctcacgcgcgtcgggctcgacatcggcaaggtgtgggtcgcggacgacggcgccgcggtggcggtctggaccacgccggagagcgtcgaagcgggggcggtgttcgccgagatcggcccgcgcatggccgagttgagcggttcccggctggccgcgcagcaacagatggaaggcctcctggcgccgcaccggcccaaggagcccgcgtggttcctggccaccgtcggcgtctcgcccgaccaccagggcaagggtctgggcagcgccgtcgtgctccccggagtggaggcggccgagcgcgccggggtgcccgccttcctggagacctccgcgccccgcaacctccccttctacgagcggctcggcttcaccgtcaccgccgacgtcgaggtgcccgaaggaccgcgcacctggtgcatgacccgcaagcccggtgcctga

SEQ ID NO: 38542 - DNA, 2691 bp, synthetic construct
  source 1..2691: mol_type = other DNA
atggccttaccagtgaccgccttgctcctgccgctggccttgctgctccacgccgccaggccgctcgaggaggcctctacaaagggaccctccgtgtttcctctggctcccagcagcaagtctacaagcggaggaacagccgctctgggctgcctggtcaaggattactttcccgagcctgtgaccgtgtcctggaatagcggagcactgacaagcggcgtgcacacctttccagccgtgctgcaaagcagcggcctgtactctctgagcagcgtggtcacagtgcctagctctagcctgggcacccagacctacatctgcaatgtgaaccacaagcctagcaacaccaaggtggacaagagagtggaacccaagagctgtcccatcaagaccgatgtgattacaatggaccccaaggacaactgctccaaggacgccaacgataccctgctgctccagctgaccaacaccagcgcctactacatgtacttgttgctgctgctgaagtccgtggtgtacttcgccatcatcacatgctgcctgctgcggagaaccgccttctgctgcaacggcgagaagtctagggccaagcgatctggatctggagcaacaaacttctcactactcaaacaagcaggtgacgtggaggagaatcccgggcctactagcatggccttaccagtgaccgccttgctcctgccgctggccttgctgctccacgccgccaggccggacatcgtgatgacacagagccctgatagcctggccgtgtctctgggagagagagccaccattaactgcaaggccagccagagcgtggactacgacggcgacagcttcctgaactggtatcagcagaagcccggccagcctcctaagctgctgatctacgccgccagcaatctggaaagcggcgtgccaagcagattttccggctctggcagcggcaccgatttcaccctgacaatatccagcctccagcctgaggacgtggccgtgtactactgccagcagagcaacgacgaccctctgacctttggacagggcaccaaggtggaaatcaaaggcggaggcggaagtggaggcggaggatctggcggcggaggctctgaagtccaacttgtggagtctggagggggcctggtgcagcccggcggctctctcagactgtcttgtgcggcaagcggctacaccttcagctcttactggatagaatgggtgaggcaggcacctggaaagggactggagtggattggagagattctgccaggagggggagatacaaattacaatgaaatcttcaaggggcgggccaccttttcagcggataccagcaagaatacagcttacctgcagatgaatagcctccgggcagaagataccgctgtttattattgcacgagacgggtgccaataagactggactattgggggcaagggactcttgtcaccgtcagttcaacgcgtggacagcctaaggccaatcctaccgtgacactgttccctccaagcagcgaagaactccaggccaacaaggccacacttgtgtgcctgatctccgacttctaccctggggctgtgacagtggcttggaaggccgatggatctcctgtgaaagccggcgtggaaaccaccaagccatccaagcagagcaacaacaaatacgccgccagctcctacctgagcctgacacctgagcagtggaagtcccacagatcctacagctgccaagtgacccacgaaggcagcaccgtggaaaagacagtggcccctacagagtgcagcgaagtgaaaaccgactccaccgaccacgtgaagcccaaagagacagagaacaccaagcagcccagcaagagctgccacaagcccaaggccatcgtgcacaccgagaaagtgaacatgatgagcctgaccgtgctgggcctgcggatgctgttcgccaaaaccgtggccgtgaacttcctgctgaccgccaagctgttcttcctccgcgccaagagaagcggatctggcgtgaagcagaccctgaatttcgacctgctgaagctggctggcgacgtggaatccaacccaggcccttctagaggccatatgaccgagtacaagcccacggtgcgcctcgccacccgcgacgacgtccccagggccgtacgcaccctcgccgccgcgttcgccgactaccccgccacgcgccacaccgtcgatccggaccgccacatcgagcgggtcaccgagctgcaagaactcttcctcacgcgcgtcgggctcgacatcggcaaggtgtgggtcgcggacgacggcgccgcggtggcggtctggaccacgccggagagcgtcgaagcgggggcggtgttcgccgagatcggcccgcgcatggccgagttgagcggttcccggctggccgcgcagcaacagatggaaggcctcctggcgccgcaccggcccaaggagcccgcgtggttcctggccaccgtcggcgtctcgcccgaccaccagggcaagggtctgggcagcgccgtcgtgctccccggagtggaggcggccgagcgcgccggggtgcccgccttcctggagacctccgcgccccgcaacctccccttctacgagcggctcggcttcaccgtcaccgccgacgtcgaggtgcccgaaggaccgcgcacctggtgcatgacccgcaagcccggtgcctga

SEQ ID NO: 38543 - DNA, 2625 bp, synthetic construct
  source 1..2625: mol_type = other DNA
atggccttaccagtgaccgccttgctcctgccgctggccttgctgctccacgccgccaggccgctcgaggaggcctctacaaagggaccctccgtgtttcctctggctcccagcagcaagtctacaagcggaggaacagccgctctgggctgcctggtcaaggattactttcccgagcctgtgaccgtgtcctggaatagcggagcactgacaagcggcgtgcacacctttccagccgtgctgcaaagcagcggcctgtactctctgagcagcgtggtcacagtgcctagctctagcctgggcacccagacctacatctgcaatgtgaaccacaagcctagcaacaccaaggtggacaagagagtggaacccaagagctgtggcagagccgattgcggctttaccagcgagagctaccagcagggcgtgctgagcgccaccatcctgtacgagatcctgctgggcaaggccaccctgtacgccgtgctggtgtctgccctggtgctgatggctatggtcaagcggaaggacagccggggaagggccaagcgatctggatctggagcaacaaacttctcactactcaaacaagcaggtgacgtggaggagaatcccgggcctactagcatggccttaccagtgaccgccttgctcctgccgctggccttgctgctccacgccgccaggccggacatcgtgatgacacagagccctgatagcctggccgtgtctctgggagagagagccaccattaactgcaaggccagccagagcgtggactacgacggcgacagcttcctgaactggtatcagcagaagcccggccagcctcctaagctgctgatctacgccgccagcaatctggaaagcggcgtgccaagcagattttccggctctggcagcggcaccgatttcaccctgacaatatccagcctccagcctgaggacgtggccgtgtactactgccagcagagcaacgacgaccctctgacctttggacagggcaccaaggtggaaatcaaaggcggaggcggaagtggaggcggaggatctggcggcggaggctctgaagtccaacttgtggagtctggagggggcctggtgcagcccggcggctctctcagactgtcttgtgcggcaagcggctacaccttcagctcttactggatagaatgggtgaggcaggcacctggaaagggactggagtggattggagagattctgccaggagggggagatacaaattacaatgaaatcttcaaggggcgggccaccttttcagcggataccagcaagaatacagcttacctgcagatgaatagcctccgggcagaagataccgctgtttattattgcacgagacgggtgccaataagactggactattgggggcaagggactcttgtcaccgtcagttcaacgcgtggacagcctaaggccaatcctaccgtgacactgttccctccaagcagcgaagaactccaggccaacaaggccacacttgtgtgcctgatctccgacttctaccctggggctgtgacagtggcttggaaggccgatggatctcctgtgaaagccggcgtggaaaccaccaagccatccaagcagagcaacaacaaatacgccgccagctcctacctgagcctgacacctgagcagtggaagtcccacagatcctacagctgccaagtgacccacgaaggcagcaccgtggaaaagacagtggcccctacagagtgcagcatccccgaggacacattcttcccaagccccgagagcagctgcgacgtgaagctggtggaaaagagcttcgagacagacaccaacctgaacttccagaacctgagcgtgatcggcttcagaatcctgctgctgaaagtggccggctttaacctgctgatgaccctgcggctgtggtccagccgcgccaagagaagcggatctggcgtgaagcagaccctgaatttcgacctgctgaagctggctggcgacgtggaatccaacccaggcccttctagaggccatatgaccgagtacaagcccacggtgcgcctcgccacccgcgacgacgtccccagggccgtacgcaccctcgccgccgcgttcgccgactaccccgccacgcgccacaccgtcgatccggaccgccacatcgagcgggtcaccgagctgcaagaactcttcctcacgcgcgtcgggctcgacatcggcaaggtgtgggtcgcggacgacggcgccgcggtggcggtctggaccacgccggagagcgtcgaagcgggggcggtgttcgccgagatcggcccgcgcatggccgagttgagcggttcccggctggccgcgcagcaacagatggaaggcctcctggcgccgcaccggcccaaggagcccgcgtggttcctggccaccgtcggcgtctcgcccgaccaccagggcaagggtctgggcagcgccgtcgtgctccccggagtggaggcggccgagcgcgccggggtgcccgccttcctggagacctccgcgccccgcaacctccccttctacgagcggctcggcttcaccgtcaccgccgacgtcgaggtgcccgaaggaccgcgcacctggtgcatgacccgcaagcccggtgcctga

SEQ ID NO: 38544 - DNA, 2625 bp, synthetic construct
  source 1..2625: mol_type = other DNA
atggccttaccagtgaccgccttgctcctgccgctggccttgctgctccacgccgccaggccgctcgaggaggcctctacaaagggaccctccgtgtttcctctggctcccagcagcaagtctacaagcggaggaacagccgctctgggctgcctggtcaaggattactttcccgagcctgtgaccgtgtcctggaatagcggagcactgacaagcggcgtgcacacctttccagccgtgctgcaaagcagcggcctgtactctctgagcagcgtggtcacagtgcctagctctagcctgggcacccagacctacatctgcaatgtgaaccacaagcctagcaacaccaaggtggacaagagagtggaacccaagagctgtatccccgaggacacattcttcccaagccccgagagcagctgcgacgtgaagctggtggaaaagagcttcgagacagacaccaacctgaacttccagaacctgagcgtgatcggcttcagaatcctgctgctgaaagtggccggctttaacctgctgatgaccctgcggctgtggtccagcagggccaagcgatctggatctggagcaacaaacttctcactactcaaacaagcaggtgacgtggaggagaatcccgggcctactagcatggccttaccagtgaccgccttgctcctgccgctggccttgctgctccacgccgccaggccggacatcgtgatgacacagagccctgatagcctggccgtgtctctgggagagagagccaccattaactgcaaggccagccagagcgtggactacgacggcgacagcttcctgaactggtatcagcagaagcccggccagcctcctaagctgctgatctacgccgccagcaatctggaaagcggcgtgccaagcagattttccggctctggcagcggcaccgatttcaccctgacaatatccagcctccagcctgaggacgtggccgtgtactactgccagcagagcaacgacgaccctctgacctttggacagggcaccaaggtggaaatcaaaggcggaggcggaagtggaggcggaggatctggcggcggaggctctgaagtccaacttgtggagtctggagggggcctggtgcagcccggcggctctctcagactgtcttgtgcggcaagcggctacaccttcagctcttactggatagaatgggtgaggcaggcacctggaaagggactggagtggattggagagattctgccaggagggggagatacaaattacaatgaaatcttcaaggggcgggccaccttttcagcggataccagcaagaatacagcttacctgcagatgaatagcctccgggcagaagataccgctgtttattattgcacgagacgggtgccaataagactggactattgggggcaagggactcttgtcaccgtcagttcaacgcgtggacagcctaaggccaatcctaccgtgacactgttccctccaagcagcgaagaactccaggccaacaaggccacacttgtgtgcctgatctccgacttctaccctggggctgtgacagtggcttggaaggccgatggatctcctgtgaaagccggcgtggaaaccaccaagccatccaagcagagcaacaacaaatacgccgccagctcctacctgagcctgacacctgagcagtggaagtcccacagatcctacagctgccaagtgacccacgaaggcagcaccgtggaaaagacagtggcccctacagagtgcagcggcagagccgattgcggctttaccagcgagagctaccagcagggcgtgctgagcgccaccatcctgtacgagatcctgctgggcaaggccaccctgtacgccgtgctggtgtctgccctggtgctgatggctatggtcaagcggaaggacagccggggacgcgccaagagaagcggatctggcgtgaagcagaccctgaatttcgacctgctgaagctggctggcgacgtggaatccaacccaggcccttctagaggccatatgaccgagtacaagcccacggtgcgcctcgccacccgcgacgacgtccccagggccgtacgcaccctcgccgccgcgttcgccgactaccccgccacgcgccacaccgtcgatccggaccgccacatcgagcgggtcaccgagctgcaagaactcttcctcacgcgcgtcgggctcgacatcggcaaggtgtgggtcgcggacgacggcgccgcggtggcggtctggaccacgccggagagcgtcgaagcgggggcggtgttcgccgagatcggcccgcgcatggccgagttgagcggttcccggctggccgcgcagcaacagatggaaggcctcctggcgccgcaccggcccaaggagcccgcgtggttcctggccaccgtcggcgtctcgcccgaccaccagggcaagggtctgggcagcgccgtcgtgctccccggagtggaggcggccgagcgcgccggggtgcccgccttcctggagacctccgcgccccgcaacctccccttctacgagcggctcggcttcaccgtcaccgccgacgtcgaggtgcccgaaggaccgcgcacctggtgcatgacccgcaagcccggtgcctga

SEQ ID NO: 38545 - DNA, 1863 bp, synthetic construct
  source 1..1863: mol_type = other DNA
atggccttaccagtgaccgccttgctcctgccgctggccttgctgctccacgccgccaggccggacatcgtgatgacacagagccctgatagcctggccgtgtctctgggagagagagccaccattaactgcaaggccagccagagcgtggactacgacggcgacagcttcctgaactggtatcagcagaagcccggccagcctcctaagctgctgatctacgccgccagcaatctggaaagcggcgtgccaagcagattttccggctctggcagcggcaccgatttcaccctgacaatatccagcctccagcctgaggacgtggccgtgtactactgccagcagagcaacgacgaccctctgacctttggacagggcaccaaggtggaaatcaaactcgaggacctgaagaacgtgttcccacctgaggtggccgtgttcgagcctagcgaggccgagatcagccacacccagaaagccaccctcgtgtgcctggctaccggcttctaccccgaccatgtggaactgtcttggtgggtcaacggcaaagaggtgcacagcggcgtgtgtaccgacccccagccactgaaagaacagcccgccctgaacgacagccggtactgcctgagcagcagactgagagtgtccgccaccttctggcagaacccccggaaccacttcagatgccaggtgcagttctacggcctgagcgagaacgacgagtggacccaggacagagccaagcccgtgacccagatcgtgtctgccgaagcctggggcagagccgatagcggctttaccagcgagagctaccagcagggcgtgctgagcgccaccatcctgtacgagatcctgctgggcaaggccaccctgtacgccgtgctggtgtctgccctggtgctgatggctatggtcaagcggaaggacagccggggaagggccaagcgatctggatctggagcaacaaacttctcactactcaaacaagcaggtgacgtggaggagaatcccgggcctactagtatggactggatttggcgcatccttttccttgtcggcgctgctaccggcgcgcattccttcgaagaagtccaacttgtggagtctggagggggcctggtgcagcccggcggctctctcagactgtcttgtgcggcaagcggctacaccttcagctcttactggatagaatgggtgaggcaggcacctggaaagggactggagtggattggagagattctgccaggagggggagatacaaattacaatgaaatcttcaaggggcgggccaccttttcagcggataccagcaagaatacagcttacctgcagatgaatagcctccgggcagaagataccgctgtttattattgcacgagacgggtgccaataagactggactattgggggcaagggactcttgtcaccgtcagttcaacgcgtatccagaaccctgatcctgccgtgtaccagctgcgggatagcaagagcagcgacaagagcgtgtgtctgttcaccgacttcgacagccagaccaacgtgtcccagagcaaggactccgacgtgtacatcaccgataagtgcgtgctggacatgcggagcatggacttcaagagcaactccgccgtggcctggtccaacaagtccgatttcgcctgcgccaacgccttcaacaacagcattatccccgaggacacattcttcccaagccccgagagcagcagcgacgtgaagctggtggaaaagagcttcgagacagacaccaacctgaacttccagaacctgagcgtgatcggcttcagaatcctgctgctgaaagtggccggctttaacctgctgatgaccctgcggctgtggtccagc

SEQ ID NO: 38546 - DNA, 2703 bp, synthetic construct
  source 1..2703: mol_type = other DNA
atggccttaccagtgaccgccttgctcctgccgctggccttgctgctccacgccgccaggccggaggttcagctgcttgagtctggcggaggactggttcaacctggcggaagcctgagactgtcttgtgccgcctctggcagaaccttcagcatgggctggtatagacaggcccctggcaagggcctcgaatttgtgtctgccatcacatacagcggcggcagcccttactacgccgattctgtgaagggcagattcaccatcagccgggacaacagcaagaacaccgtgtacctccagatgaacagcctgagagccgaggacaccgccgtgtactactgtgccgccaatccaacctacggcagcgactggaatgccgagaattggggccagggcacactggtcacagtgtctagtggtaccggcggaggcggatctggcggcggaggtagcggtggcggaggatctgaattcgacatcgtgatgacacagagccctgatagcctggccgtgtctctgggagagagagccaccattaactgcaaggccagccagagcgtggactacgacggcgacagcttcctgaactggtatcagcagaagcccggccagcctcctaagctgctgatctacgccgccagcaatctggaaagcggcgtgccaagcagattttccggctctggcagcggcaccgatttcaccctgacaatatccagcctccagcctgaggacgtggccgtgtactactgccagcagagcaacgacgaccctctgacctttggacagggcaccaaggtggaaatcaaactcgagatccagaaccctgatcctgccgtgtaccagctgcgggatagcaagagcagcgacaagagcgtgtgtctgttcaccgacttcgacagccagaccaacgtgtcccagagcaaggactccgacgtgtacatcaccgataagtgcgtgctggacatgcggagcatggacttcaagagcaactccgccgtggcctggtccaacaagtccgatttcgcctgcgccaacgccttcaacaacagcattatccccgaggacacattcttcccaagcagcgacgtgccctgcgacgtgaagctggtggaaaagagcttcgagacagacaccaacctgaacttccagaacctgagcgtgatcggcttcagaatcctgctgctgaaagtggccggctttaacctgctgatgaccctgcggctgtggtccagccgcgccaagagaagcggatctggcgtgaagcagaccctgaatttcgacctgctgaagctggctggcgacgtggaatccaacccaggccctactagtaccatggactggatttggcgcatccttttccttgtcggcgctgctaccggcacccattccgggcccgaagtgcaactggttgaatccggtggcggcctggtgcaacccggcggatctctcagacttagctgtgccgcctccggcagaaccttcacaatgggatggtacaggcaggctccagggaaagagagagagttcgtcgccgccatctctctgtctcccacactggcctactacgccgactctgtgaaaggccggttcaccatctccagagataatagcaagaacaccgtggtgctgcaaatgaactctctgagagccgaggatacagccctgtactattgtgccgctgaccggaagtccgtgatgagcatcagacccgattactggggacagggcacactggtcacagtgtctagtggatccggcggcggaggatctggcggaggcggatctgggggcggaggctctttcgaagaagtccaacttgtggagtctggagggggcctggtgcagcccggcggctctctcagactgtcttgtgcggcaagcggctacaccttcagctcttactggatagaatgggtgaggcaggcacctggaaagggactggagtggattggagagattctgccaggagggggagatacaaattacaatgaaatcttcaaggggcgggccaccttttcagcggataccagcaagaatacagcttacctgcagatgaatagcctccgggcagaagataccgctgtttattattgcacgagacgggtgccaataagactggactattgggggcaagggactcttgtcaccgtcagttcaacgcgtgaggacctgaagaacgtgttcccacctgaggtggccgtgttcgagcctagcaaggccgagatcgcccacacccagaaagccaccctcgtgtgcctggctaccggcttctaccccgaccatgtggaactgtcttggtgggtcaacggcaaagaggtgcacagcggcgtgtgtaccgacccccagccactgaaagaacagcccgccctgaacgacagccggtactgcctgagcagcagactgagagtgtccgccaccttctggcagaacccccggaaccacttcagatgccaggtgcagttctacggcctgagcgagaacgacgagtggacccaggacagagccaagcccgtgacccagatcgtgtctgccgaagcctggggcagagccgattgcggcatcaccagcgccagctaccaccagggcgtgctgagcgccaccatcctgtacgagatcctgctgggcaaggccaccctgtacgccgtgctggtgtctgccctggtgctgatggctatggtcaagcggaaggacagccggggataa

SEQ ID NO: 38547 - DNA, 2703 bp, synthetic construct
  source 1..2703: mol_type = other DNA
atggccttaccagtgaccgccttgctcctgccgctggccttgctgctccacgccgccaggccggaagtgcagctggttgaatctggcggaggactggttcaggctggcggatctctgagactgtcttgtgccgccagcggcagaacctttagcatgggctggtttagacaggcccctggcaaagagagagagttcgtcgccgccatcacatactctggcggcagcccttactacgccgactctgtgaagggcagattcaccatcagccgggacaacgccaagaacaccgtgtacctccagatgaacagcctgaagcctgaggacaccgccgtgtactactgcgccgccaatccaacatacggcagcgactggaacgccgagaattggggccagggaacccaagtgacagtgtctagcggtaccggcggaggcggatctggcggcggaggtagcggtggcggaggatctgaattcgacatcgtgatgacacagagccctgatagcctggccgtgtctctgggagagagagccaccattaactgcaaggccagccagagcgtggactacgacggcgacagcttcctgaactggtatcagcagaagcccggccagcctcctaagctgctgatctacgccgccagcaatctggaaagcggcgtgccaagcagattttccggctctggcagcggcaccgatttcaccctgacaatatccagcctccagcctgaggacgtggccgtgtactactgccagcagagcaacgacgaccctctgacctttggacagggcaccaaggtggaaatcaaactcgagatccagaaccctgatcctgccgtgtaccagctgcgggatagcaagagcagcgacaagagcgtgtgtctgttcaccgacttcgacagccagaccaacgtgtcccagagcaaggactccgacgtgtacatcaccgataagtgcgtgctggacatgcggagcatggacttcaagagcaactccgccgtggcctggtccaacaagtccgatttcgcctgcgccaacgccttcaacaacagcattatccccgaggacacattcttcccaagcagcgacgtgccctgcgacgtgaagctggtggaaaagagcttcgagacagacaccaacctgaacttccagaacctgagcgtgatcggcttcagaatcctgctgctgaaagtggccggctttaacctgctgatgaccctgcggctgtggtccagccgcgccaagagaagcggatctggcgtgaagcagaccctgaatttcgacctgctgaagctggctggcgacgtggaatccaacccaggccctactagtaccatggactggatttggcgcatccttttccttgtcggcgctgctaccggcgcccattccgggcccgaagtgcaactggttgaatccggtggcggcctggtgcaacccggcggatctctcagacttagctgtgccgcctccggcagaaccttcacaatgggatggtacaggcaggctccagggaaagagagagagttcgtcgccgccatctctctgtctcccacactggcctactacgccgactctgtgaaaggccggttcaccatctccagagataatagcaagaacaccgtggtgctgcaaatgaactctctgagagccgaggatacagccctgtactattgtgccgctgaccggaagtccgtgatgagcatcagacccgattactggggacagggcacactggtcacagtgtctagtggatccggcggcggaggatctggcggaggcggatctgggggcggaggctctttcgaagaagtccaacttgtggagtctggagggggcctggtgcagcccggcggctctctcagactgtcttgtgcggcaagcggctacaccttcagctcttactggatagaatgggtgaggcaggcacctggaaagggactggagtggattggagagattctgccaggagggggagatacaaattacaatgaaatcttcaaggggcgggccaccttttcagcggataccagcaagaatacagcttacctgcagatgaatagcctccgggcagaagataccgctgtttattattgcacgagacgggtgccaataagactggactattgggggcaagggactcttgtcaccgtcagttcaacgcgtgaggacctgaagaacgtgttcccacctgaggtggccgtgttcgagcctagcaaggccgagatcgcccacacccagaaagccaccctcgtgtgcctggctaccggcttctaccccgaccatgtggaactgtcttggtgggtcaacggcaaagaggtgcacagcggcgtgtgtaccgacccccagccactgaaagaacagcccgccctgaacgacagccggtactgcctgagcagcagactgagagtgtccgccaccttctggcagaacccccggaaccacttcagatgccaggtgcagttctacggcctgagcgagaacgacgagtggacccaggacagagccaagcccgtgacccagatcgtgtctgccgaagcctggggcagagccgattgcggcatcaccagcgccagctaccaccagggcgtgctgagcgccaccatcctgtacgagatcctgctgggcaaggccaccctgtacgccgtgctggtgtctgccctggtgctgatggctatggtcaagcggaaggacagccggggataa

SEQ ID NO: 38548 - DNA, 2694 bp, synthetic construct
  source 1..2694: mol_type = other DNA
atggccttaccagtgaccgccttgctcctgccgctggccttgctgctccacgccgccaggccggaagtgcagctggttgaatctggcggaggactggttcaggctggcggatctctgagactgtcttgtgccgccagcggcagaacctttagcatgggctggtttagacaggcccctggcaaagagagagagttcgtcgccgccatcacatactctggcggcagcccttactacgccgactctgtgaagggcagattcaccatcagccgggacaacgccaagaacaccgtgtacctccagatgaacagcctgaagcctgaggacaccgccgtgtactactgcgccgccaatccaacatacggcagcgactggaacgccgagaattggggccagggaacccaagtgacagtgtctagcggtaccggcggaggcggatctggcggcggaggtagcggtggcggaggatctgaattcgacatcgtgatgacacagagccctgatagcctggccgtgtctctgggagagagagccaccattaactgcaaggccagccagagcgtggactacgacggcgacagcttcctgaactggtatcagcagaagcccggccagcctcctaagctgctgatctacgccgccagcaatctggaaagcggcgtgccaagcagattttccggctctggcagcggcaccgatttcaccctgacaatatccagcctccagcctgaggacgtggccgtgtactactgccagcagagcaacgacgaccctctgacctttggacagggcaccaaggtggaaatcaaactcgaggacctgaagaacgtgttcccacctgaggtggccgtgttcgagcctagcgaggccgagatcagccacacccagaaagccaccctcgtgtgcctggctaccggcttctaccccgaccatgtggaactgtcttggtgggtcaacggcaaagaggtgcacagcggcgtgtgtaccgacccccagccactgaaagaacagcccgccctgaacgacagccggtactgcctgagcagcagactgagagtgtccgccaccttctggcagaacccccggaaccacttcagatgccaggtgcagttctacggcctgagcgagaacgacgagtggacccaggacagagccaagcccgtgacccagatcgtgtctgccgaagcctggggcagagccgattgcggctttaccagcgagagctaccagcagggcgtgctgagcgccaccatcctgtacgagatcctgctgggcaaggccaccctgtacgccgtgctggtgtctgccctggtgctgatggctatggtcaagcggaaggacagccggggaagggccaagcgatctggatctggagcaacaaacttctcactactcaaacaagcaggtgacgtggaggagaatcccgggcctactagtgccaccatggactggatttggcgcatccttttccttgtcggcgctgctaccggcgcccattccgggcccgaagtgcaactggttgaatccggtggcggcctggtgcaagcaggcggatctctcagacttagctgtgccgcctccggcagaaccttcacaatgggatggtttaggcaggctccagggaaagagagagagttcgtcgccgccatctctctgtctcccacactggcctactacgccgactctgtgaaaggccggttcaccatctccagagataatgccaagaacaccgtggtgctgcaaatgaactctctgaaacccgaggatacagccctgtactattgtgccgctgaccggaagtccgtgatgagcatcagacccgattactggggacagggcacacaagtcacagtgtcctctggatccggcggcggaggatctggcggaggcggatctgggggcggaggctctttcgaagaagtccaacttgtggagtctggagggggcctggtgcagcccggcggctctctcagactgtcttgtgcggcaagcggctacaccttcagctcttactggatagaatgggtgaggcaggcacctggaaagggactggagtggattggagagattctgccaggagggggagatacaaattacaatgaaatcttcaaggggcgggccaccttttcagcggataccagcaagaatacagcttacctgcagatgaatagcctccgggcagaagataccgctgtttattattgcacgagacgggtgccaataagactggactattgggggcaagggactcttgtcaccgtcagttcaacgcgtatccagaaccctgatcctgccgtgtaccagctgcgggatagcaagagcagcgacaagagcgtgtgtctgttcaccgacttcgacagccagaccaacgtgtcccagagcaaggactccgacgtgtacatcaccgataagtgcgtgctggacatgcggagcatggacttcaagagcaactccgccgtggcctggtccaacaagtccgatttcgcctgcgccaacgccttcaacaacagcattatccccgaggacacattcttcccaagccccgagagcagctgcgacgtgaagctggtggaaaagagcttcgagacagacaccaacctgaacttccagaacctgagcgtgatcggcttcagaatcctgctgctgaaagtggccggctttaacctgctgatgaccctgcggctgtggtccagctaa

SEQ ID NO: 38549 - DNA, 2307 bp, synthetic construct
  source 1..2307: mol_type = other DNA
atggccttaccagtgaccgccttgctcctgccgctggccttgctgctccacgccgccaggccggaagtgcagctggttgaatctggcggaggactggttcagcctggcggatctctgagactgagctgtgaagccagcggcttcgccagcgacgattacatcatcggctggttcagacaggcccctggcaaagagagagagggcgtcagctgcatcagctctaagtacgccaacaccgtgtacaccgacagcgtgaagggcagattcagactgagcagaggcaccgccaagaataccgtgtacctccagatgagcgccctgaagcctgaggataccgccgtgtactactgcgctatggacagccgcagagtgacatgccctgagatcagcaccatgcaccggaacttcgattcttggggccagggcacactggtcacagtgtcatctggtaccggcggaggcggatctggcggcggaggtagcggtggcggaggatctgaattcgacatcgtgatgacacagagccctgatagcctggccgtgtctctgggagagagagccaccattaactgcaaggccagccagagcgtggactacgacggcgacagcttcctgaactggtatcagcagaagcccggccagcctcctaagctgctgatctacgccgccagcaatctggaaagcggcgtgccaagcagattttccggctctggcagcggcaccgatttcaccctgacaatatccagcctccagcctgaggacgtggccgtgtactactgccagcagagcaacgacgaccctctgacctttggacagggcaccaaggtggaaatcaaactcgaggacctgaagaacgtgttcccacctgaggtggccgtgttcgagcctagcaaggccgagatcgcccacacccagaaagccaccctcgtgtgcctggctaccggcttctaccccgaccatgtggaactgtcttggtgggtcaacggcaaagaggtgcacagcggcgtgtgtaccgacccccagccactgaaagaacagcccgccctgaacgacagccggtactgcctgagcagcagactgagagtgtccgccaccttctggcagaacccccggaaccacttcagatgccaggtgcagttctacggcctgagcgagaacgacgagtggacccaggacagagccaagcccgtgacccagatcgtgtctgccgaagcctggggcagagccgattgcggcatcaccagcgccagctaccaccagggcgtgctgagcgccaccatcctgtacgagatcctgctgggcaaggccaccctgtacgccgtgctggtgtctgccctggtgctgatggctatggtcaagcggaaggacagccggggaagggccaagcgatctggatctggagcaacaaacttctcactactcaaacaagcaggtgacgtggaggagaatcccgggcctactagtatggactggatttggcgcatccttttccttgtcggcgctgctaccggcgcgcattccttcgaagaagtccaacttgtggagtctggagggggcctggtgcagcccggcggctctctcagactgtcttgtgcggcaagcggctacaccttcagctcttactggatagaatgggtgaggcaggcacctggaaagggactggagtggattggagagattctgccaggagggggagatacaaattacaatgaaatcttcaaggggcgggccaccttttcagcggataccagcaagaatacagcttacctgcagatgaatagcctccgggcagaagataccgctgtttattattgcacgagacgggtgccaataagactggactattgggggcaagggactcttgtcaccgtcagttcaacgcgtatccagaaccctgatcctgccgtgtaccagctgcgggatagcaagagcagcgacaagagcgtgtgtctgttcaccgacttcgacagccagaccaacgtgtcccagagcaaggactccgacgtgtacatcaccgataagtgcgtgctggacatgcggagcatggacttcaagagcaactccgccgtggcctggtccaacaagtccgatttcgcctgcgccaacgccttcaacaacagcattatccccgaggacacattcttcccaagcagcgacgtgccctgcgacgtgaagctggtggaaaagagcttcgagacagacaccaacctgaacttccagaacctgagcgtgatcggcttcagaatcctgctgctgaaagtggccggctttaacctgctgatgaccctgcggctgtggtccagctaa

SEQ ID NO: 38550 - DNA, 2280 bp, synthetic construct
  source 1..2280: mol_type = other DNA
atggccttaccagtgaccgccttgctcctgccgctggccttgctgctccacgccgccaggccggacatcgtgatgacacagagccctgatagcctggccgtgtctctgggagagagagccaccattaactgcaaggccagccagagcgtggactacgacggcgacagcttcctgaactggtatcagcagaagcccggccagcctcctaagctgctgatctacgccgccagcaatctggaaagcggcgtgccaagcagattttccggctctggcagcggcaccgatttcaccctgacaatatccagcctccagcctgaggacgtggccgtgtactactgccagcagagcaacgacgaccctctgacctttggacagggcaccaaggtggaaatcaaactcgaggacctgaagaacgtgttcccacctgaggtggccgtgttcgagcctagcgaggccgagatcagccacacccagaaagccaccctcgtgtgcctggctaccggcttctaccccgaccatgtggaactgtcttggtgggtcaacggcaaagaggtgcacagcggcgtgtgtaccgacccccagccactgaaagaacagcccgccctgaacgacagccggtactgcctgagcagcagactgagagtgtccgccaccttctggcagaacccccggaaccacttcagatgccaggtgcagttctacggcctgagcgagaacgacgagtggacccaggacagagccaagcccgtgacccagatcgtgtctgccgaagcctggggcagagccgattgcggctttaccagcgagagctaccagcagggcgtgctgagcgccaccatcctgtacgagatcctgctgggcaaggccaccctgtacgccgtgctggtgtctgccctggtgctgatggctatggtcaagcggaaggacagccggggaagggccaagcgatctggatctggagcaacaaacttctcactactcaaacaagcaggtgacgtggaggagaatcccgggcctactagtaccatggactggatttggcgcatccttttccttgtcggcgctgctaccggcgcccattccgggcccgaagtgcaactggttgaatccggtggcggcctggtgcaacccggcggatctctcagacttagctgtgccgcctccggcagaaccttcacaatgggatggtacaggcaggctccagggaaagagagagagttcgtcgccgccatctctctgtctcccacactggcctactacgccgactctgtgaaaggccggttcaccatctccagagataatagcaagaacaccgtggtgctgcaaatgaactctctgagagccgaggatacagccctgtactattgtgccgctgaccggaagtccgtgatgagcatcagacccgattactggggacagggcacactggtcacagtgtctagtggatccggcggcggaggatctggcggaggcggatctgggggcggaggctctttcgaagaagtccaacttgtggagtctggagggggcctggtgcagcccggcggctctctcagactgtcttgtgcggcaagcggctacaccttcagctcttactggatagaatgggtgaggcaggcacctggaaagggactggagtggattggagagattctgccaggagggggagatacaaattacaatgaaatcttcaaggggcgggccaccttttcagcggataccagcaagaatacagcttacctgcagatgaatagcctccgggcagaagataccgctgtttattattgcacgagacgggtgccaataagactggactattgggggcaagggactcttgtcaccgtcagttcaacgcgtatccagaaccctgatcctgccgtgtaccagctgcgggatagcaagagcagcgacaagagcgtgtgtctgttcaccgacttcgacagccagaccaacgtgtcccagagcaaggactccgacgtgtacatcaccgataagtgcgtgctggacatgcggagcatggacttcaagagcaactccgccgtggcctggtccaacaagtccgatttcgcctgcgccaacgccttcaacaacagcattatccccgaggacacattcttcccaagccccgagagcagctgcgacgtgaagctggtggaaaagagcttcgagacagacaccaacctgaacttccagaacctgagcgtgatcggcttcagaatcctgctgctgaaagtggccggctttaacctgctgatgaccctgcggctgtggtccagctaa

SEQ ID NO: 38551 - DNA, 2298 bp, synthetic construct
  source 1..2298: mol_type = other DNA
atggccttaccagtgaccgccttgctcctgccgctggccttgctgctccacgccgccaggccggacatcgtgatgacacagagccctgatagcctggccgtgtctctgggagagagagccaccattaactgcaaggccagccagagcgtggactacgacggcgacagcttcctgaactggtatcagcagaagcccggccagcctcctaagctgctgatctacgccgccagcaatctggaaagcggcgtgccaagcagattttccggctctggcagcggcaccgatttcaccctgacaatatccagcctccagcctgaggacgtggccgtgtactactgccagcagagcaacgacgaccctctgacctttggacagggcaccaaggtggaaatcaaactcgaggacctgaagaacgtgttcccacctgaggtggccgtgttcgagcctagcgaggccgagatcagccacacccagaaagccaccctcgtgtgcctggctaccggcttctaccccgaccatgtggaactgtcttggtgggtcaacggcaaagaggtgcacagcggcgtgtgtaccgacccccagccactgaaagaacagcccgccctgaacgacagccggtactgcctgagcagcagactgagagtgtccgccaccttctggcagaacccccggaaccacttcagatgccaggtgcagttctacggcctgagcgagaacgacgagtggacccaggacagagccaagcccgtgacccagatcgtgtctgccgaagcctggggcagagccgattgcggctttaccagcgagagctaccagcagggcgtgctgagcgccaccatcctgtacgagatcctgctgggcaaggccaccctgtacgccgtgctggtgtctgccctggtgctgatggctatggtcaagcggaaggacagccggggaagggccaagcgatctggatctggagcaacaaacttctcactactcaaacaagcaggtgacgtggaggagaatcccgggcctactagtaccatggactggatttggcgcatccttttccttgtcggcgctgctaccggcgcccattccgggccccaggtgcagctggttgaatctggcggaggactggttcagcctggcggatctctgagactgtcttgtgccgccagcggcaacatcaacagcagaaactgcatgggctggttcagacaggcccctggcaagggaagagaaggcgtggcagctatcggccaagtgaccggcagaacctactacgtggacagcgtgaagggcagattcaccatcagcctggacaacagcaagaacaccctgtacctccagatgaacagcctgagagccgaggacaccgccgtgtactattgtgctgctgcccctggctgtctgctgtctgcacttagaagcgccgactacagaaactggggccagggcacactggtcaccgtttcttctggatccggcggcggaggatctggcggaggcggatctgggggcggaggctctttcgaagaagtccaacttgtggagtctggagggggcctggtgcagcccggcggctctctcagactgtcttgtgcggcaagcggctacaccttcagctcttactggatagaatgggtgaggcaggcacctggaaagggactggagtggattggagagattctgccaggagggggagatacaaattacaatgaaatcttcaaggggcgggccaccttttcagcggataccagcaagaatacagcttacctgcagatgaatagcctccgggcagaagataccgctgtttattattgcacgagacgggtgccaataagactggactattgggggcaagggactcttgtcaccgtcagttcaacgcgtatccagaaccctgatcctgccgtgtaccagctgcgggatagcaagagcagcgacaagagcgtgtgtctgttcaccgacttcgacagccagaccaacgtgtcccagagcaaggactccgacgtgtacatcaccgataagtgcgtgctggacatgcggagcatggacttcaagagcaactccgccgtggcctggtccaacaagtccgatttcgcctgcgccaacgccttcaacaacagcattatccccgaggacacattcttcccaagccccgagagcagctgcgacgtgaagctggtggaaaagagcttcgagacagacaccaacctgaacttccagaacctgagcgtgatcggcttcagaatcctgctgctgaaagtggccggctttaacctgctgatgaccctgcggctgtggtccagc

SEQ ID NO: 38552 - DNA, 2301 bp, synthetic construct
  source 1..2301: mol_type = other DNA
atggccttaccagtgaccgccttgctcctgccgctggccttgctgctccacgccgccaggccggacatcgtgatgacacagagccctgatagcctggccgtgtctctgggagagagagccaccattaactgcaaggccagccagagcgtggactacgacggcgacagcttcctgaactggtatcagcagaagcccggccagcctcctaagctgctgatctacgccgccagcaatctggaaagcggcgtgccaagcagattttccggctctggcagcggcaccgatttcaccctgacaatatccagcctccagcctgaggacgtggccgtgtactactgccagcagagcaacgacgaccctctgacctttggacagggcaccaaggtggaaatcaaactcgaggacctgaagaacgtgttcccacctgaggtggccgtgttcgagcctagcgaggccgagatcagccacacccagaaagccaccctcgtgtgcctggctaccggcttctaccccgaccatgtggaactgtcttggtgggtcaacggcaaagaggtgcacagcggcgtgtgtaccgacccccagccactgaaagaacagcccgccctgaacgacagccggtactgcctgagcagcagactgagagtgtccgccaccttctggcagaacccccggaaccacttcagatgccaggtgcagttctacggcctgagcgagaacgacgagtggacccaggacagagccaagcccgtgacccagatcgtgtctgccgaagcctggggcagagccgattgcggctttaccagcgagagctaccagcagggcgtgctgagcgccaccatcctgtacgagatcctgctgggcaaggccaccctgtacgccgtgctggtgtctgccctggtgctgatggctatggtcaagcggaaggacagccggggaagggccaagcgatctggatctggagcaacaaacttctcactactcaaacaagcaggtgacgtggaggagaatcccgggcctactagtaccatggactggatttggcgcatccttttccttgtcggcgctgctaccggcgcccattccgggccccaggtgcagctggttgaatctggcggaggatctgttcaggctggcggctctctgagactgtcttgtggcgcttccggcaacatcagcagcagaaactgcatgggctggttcagacaggcccctggcaaagagagagaaggcgttgccgccatcggacaagtgaccggcagatcctactacgtggacagcgtgaagggcagattcaccatcagcctggacaacgccaagaacaccctgtacctccagatgaacacactgaagcccgaggacaccgccatgtactactgtgctgctgcccctggctgtctgctgtctgcacttagaagcgccgactacagaaactggggccagggaacccaagtgacagtgtctagtggatccggcggcggaggatctggcggaggcggatctgggggcggaggctctttcgaagaagtccaacttgtggagtctggagggggcctggtgcagcccggcggctctctcagactgtcttgtgcggcaagcggctacaccttcagctcttactggatagaatgggtgaggcaggcacctggaaagggactggagtggattggagagattctgccaggagggggagatacaaattacaatgaaatcttcaaggggcgggccaccttttcagcggataccagcaagaatacagcttacctgcagatgaatagcctccgggcagaagataccgctgtttattattgcacgagacgggtgccaataagactggactattgggggcaagggactcttgtcaccgtcagttcaacgcgtatccagaaccctgatcctgccgtgtaccagctgcgggatagcaagagcagcgacaagagcgtgtgtctgttcaccgacttcgacagccagaccaacgtgtcccagagcaaggactccgacgtgtacatcaccgataagtgcgtgctggacatgcggagcatggacttcaagagcaactccgccgtggcctggtccaacaagtccgatttcgcctgcgccaacgccttcaacaacagcattatccccgaggacacattcttcccaagccccgagagcagctgcgacgtgaagctggtggaaaagagcttcgagacagacaccaacctgaacttccagaacctgagcgtgatcggcttcagaatcctgctgctgaaagtggccggctttaacctgctgatgaccctgcggctgtggtccagctaa

SEQ ID NO: 38553 - DNA, 2724 bp, synthetic construct
  source 1..2724: mol_type = other DNA
atggccttaccagtgaccgccttgctcctgccgctggccttgctgctccacgccgccaggccggaagtgcagctggttgaatctggcggaggactggttcaggctggcggatctctgagactgtcttgtgccgccagcggcagaacctttagcatgggctggtttagacaggcccctggcaaagagagagagttcgtcgccgccatcacatactctggcggcagcccttactacgccgactctgtgaagggcagattcaccatcagccgggacaacgccaagaacaccgtgtacctccagatgaacagcctgaagcctgaggacaccgccgtgtactactgcgccgccaatccaacatacggcagcgactggaacgccgagaattggggccagggaacccaagtgacagtgtctagcggtaccggcggaggcggatctggcggcggaggtagcggtggcggaggatctgaattcgacatcgtgatgacacagagccctgatagcctggccgtgtctctgggagagagagccaccattaactgcaaggccagccagagcgtggactacgacggcgacagcttcctgaactggtatcagcagaagcccggccagcctcctaagctgctgatctacgccgccagcaatctggaaagcggcgtgccaagcagattttccggctctggcagcggcaccgatttcaccctgacaatatccagcctccagcctgaggacgtggccgtgtactactgccagcagagcaacgacgaccctctgacctttggacagggcaccaaggtggaaatcaaactcgagatccagaaccctgatcctgccgtgtaccagctgcgggatagcaagagcagcgacaagagcgtgtgtctgttcaccgacttcgacagccagaccaacgtgtcccagagcaaggactccgacgtgtacatcaccgataagtgcgtgctggacatgcggagcatggacttcaagagcaactccgccgtggcctggtccaacaagtccgatttcgcctgcgccaacgccttcaacaacagcattatccccgaggacacattcttcccaagcagcgacgtgccctgcgacgtgaagctggtggaaaagagcttcgagacagacaccaacctgaacttccagaacctgagcgtgatcggcttcagaatcctgctgctgaaagtggccggctttaacctgctgatgaccctgcggctgtggtccagccgcgccaagagaagcggatctggcgtgaagcagaccctgaatttcgacctgctgaagctggctggcgacgtggaatccaacccaggccctactagtaccatggactggatttggcgcatccttttccttgtcggcgctgctaccggcgcccattccgggccccaggtgcagctggttgaatctggcggaggatctgttcaggctggcggctctctgagactgtcttgtggcgcttccggcaacatcagcagcagaaactgcatgggctggttcagacaggcccctggcaaagagagagaaggcgttgccgccatcggacaagtgaccggcagatcctactacgtggacagcgtgaagggcagattcaccatcagcctggacaacgccaagaacaccctgtacctccagatgaacacactgaagcccgaggacaccgccatgtactactgtgctgctgcccctggctgtctgctgtctgcacttagaagcgccgactacagaaactggggccagggaacccaagtgacagtgtctagtggatccggcggcggaggatctggcggaggcggatctgggggcggaggctctttcgaagaagtccaacttgtggagtctggagggggcctggtgcagcccggcggctctctcagactgtcttgtgcggcaagcggctacaccttcagctcttactggatagaatgggtgaggcaggcacctggaaagggactggagtggattggagagattctgccaggagggggagatacaaattacaatgaaatcttcaaggggcgggccaccttttcagcggataccagcaagaatacagcttacctgcagatgaatagcctccgggcagaagataccgctgtttattattgcacgagacgggtgccaataagactggactattgggggcaagggactcttgtcaccgtcagttcaacgcgtgaggacctgaagaacgtgttcccacctgaggtggccgtgttcgagcctagcaaggccgagatcgcccacacccagaaagccaccctcgtgtgcctggctaccggcttctaccccgaccatgtggaactgtcttggtgggtcaacggcaaagaggtgcacagcggcgtgtgtaccgacccccagccactgaaagaacagcccgccctgaacgacagccggtactgcctgagcagcagactgagagtgtccgccaccttctggcagaacccccggaaccacttcagatgccaggtgcagttctacggcctgagcgagaacgacgagtggacccaggacagagccaagcccgtgacccagatcgtgtctgccgaagcctggggcagagccgattgcggcatcaccagcgccagctaccaccagggcgtgctgagcgccaccatcctgtacgagatcctgctgggcaaggccaccctgtacgccgtgctggtgtctgccctggtgctgatggctatggtcaagcggaaggacagccggggataa

SEQ ID NO: 38554 - DNA, 2715 bp, synthetic construct
  source 1..2715: mol_type = other DNA
atggccttaccagtgaccgccttgctcctgccgctggccttgctgctccacgccgccaggccgcaggtgcagctggttgaatctggcggaggatctgttcaggctggcggctctctgagactgtcttgtggcgcttccggcaacatcagcagcagaaactgcatgggctggttcagacaggcccctggcaaagagagagaaggcgttgccgccatcggacaagtgaccggcagatcctactacgtggacagcgtgaagggcagattcaccatcagcctggacaacgccaagaacaccctgtacctccagatgaacacactgaagcccgaggacaccgccatgtactactgtgctgctgcccctggctgtctgctgtctgcacttagaagcgccgactacagaaactggggccagggaacccaagtgacagtgtctagtggtaccggcggaggcggatctggcggcggaggtagcggtggcggaggatctgaattcgacatcgtgatgacacagagccctgatagcctggccgtgtctctgggagagagagccaccattaactgcaaggccagccagagcgtggactacgacggcgacagcttcctgaactggtatcagcagaagcccggccagcctcctaagctgctgatctacgccgccagcaatctggaaagcggcgtgccaagcagattttccggctctggcagcggcaccgatttcaccctgacaatatccagcctccagcctgaggacgtggccgtgtactactgccagcagagcaacgacgaccctctgacctttggacagggcaccaaggtggaaatcaaactcgaggacctgaagaacgtgttcccacctgaggtggccgtgttcgagcctagcgaggccgagatcagccacacccagaaagccaccctcgtgtgcctggctaccggcttctaccccgaccatgtggaactgtcttggtgggtcaacggcaaagaggtgcacagcggcgtgtgtaccgacccccagccactgaaagaacagcccgccctgaacgacagccggtactgcctgagcagcagactgagagtgtccgccaccttctggcagaacccccggaaccacttcagatgccaggtgcagttctacggcctgagcgagaacgacgagtggacccaggacagagccaagcccgtgacccagatcgtgtctgccgaagcctggggcagagccgattgcggctttaccagcgagagctaccagcagggcgtgctgagcgccaccatcctgtacgagatcctgctgggcaaggccaccctgtacgccgtgctggtgtctgccctggtgctgatggctatggtcaagcggaaggacagccggggaagggccaagcgatctggatctggagcaacaaacttctcactactcaaacaagcaggtgacgtggaggagaatcccgggcctactagtgccaccatggactggatttggcgcatccttttccttgtcggcgctgctaccggcgcccattccgggcccgaagtgcaactggttgaatccggtggcggcctggtgcaagcaggcggatctctcagacttagctgtgccgcctccggcagaaccttcacaatgggatggtttaggcaggctccagggaaagagagagagttcgtcgccgccatctctctgtctcccacactggcctactacgccgactctgtgaaaggccggttcaccatctccagagataatgccaagaacaccgtggtgctgcaaatgaactctctgaaacccgaggatacagccctgtactattgtgccgctgaccggaagtccgtgatgagcatcagacccgattactggggacagggcacacaagtcacagtgtcctctggatccggcggcggaggatctggcggaggcggatctgggggcggaggctctttcgaagaagtccaacttgtggagtctggagggggcctggtgcagcccggcggctctctcagactgtcttgtgcggcaagcggctacaccttcagctcttactggatagaatgggtgaggcaggcacctggaaagggactggagtggattggagagattctgccaggagggggagatacaaattacaatgaaatcttcaaggggcgggccaccttttcagcggataccagcaagaatacagcttacctgcagatgaatagcctccgggcagaagataccgctgtttattattgcacgagacgggtgccaataagactggactattgggggcaagggactcttgtcaccgtcagttcaacgcgtatccagaaccctgatcctgccgtgtaccagctgcgggatagcaagagcagcgacaagagcgtgtgtctgttcaccgacttcgacagccagaccaacgtgtcccagagcaaggactccgacgtgtacatcaccgataagtgcgtgctggacatgcggagcatggacttcaagagcaactccgccgtggcctggtccaacaagtccgatttcgcctgcgccaacgccttcaacaacagcattatccccgaggacacattcttcccaagccccgagagcagctgcgacgtgaagctggtggaaaagagcttcgagacagacaccaacctgaacttccagaacctgagcgtgatcggcttcagaatcctgctgctgaaagtggccggctttaacctgctgatgaccctgcggctgtggtccagctaa

SEQ ID NO: 38555 - DNA, 2304 bp, synthetic construct
  source 1..2304: mol_type = other DNA
atggccttaccagtgaccgccttgctcctgccgctggccttgctgctccacgccgccaggccgcaggtgcagctggttgaatctggcggaggatctgttcaggctggcggctctctgagactgtcttgtggcgcttccggcaacatcagcagcagaaactgcatgggctggttcagacaggcccctggcaaagagagagaaggcgttgccgccatcggacaagtgaccggcagatcctactacgtggacagcgtgaagggcagattcaccatcagcctggacaacgccaagaacaccctgtacctccagatgaacacactgaagcccgaggacaccgccatgtactactgtgctgctgcccctggctgtctgctgtctgcacttagaagcgccgactacagaaactggggccagggaacccaagtgacagtgtctagtggtaccggcggaggcggatctggcggcggaggtagcggtggcggaggatctgaattcgacatcgtgatgacacagagccctgatagcctggccgtgtctctgggagagagagccaccattaactgcaaggccagccagagcgtggactacgacggcgacagcttcctgaactggtatcagcagaagcccggccagcctcctaagctgctgatctacgccgccagcaatctggaaagcggcgtgccaagcagattttccggctctggcagcggcaccgatttcaccctgacaatatccagcctccagcctgaggacgtggccgtgtactactgccagcagagcaacgacgaccctctgacctttggacagggcaccaaggtggaaatcaaactcgaggacctgaagaacgtgttcccacctgaggtggccgtgttcgagcctagcgaggccgagatcagccacacccagaaagccaccctcgtgtgcctggctaccggcttctaccccgaccatgtggaactgtcttggtgggtcaacggcaaagaggtgcacagcggcgtgtgtaccgacccccagccactgaaagaacagcccgccctgaacgacagccggtactgcctgagcagcagactgagagtgtccgccaccttctggcagaacccccggaaccacttcagatgccaggtgcagttctacggcctgagcgagaacgacgagtggacccaggacagagccaagcccgtgacccagatcgtgtctgccgaagcctggggcagagccgattgcggctttaccagcgagagctaccagcagggcgtgctgagcgccaccatcctgtacgagatcctgctgggcaaggccaccctgtacgccgtgctggtgtctgccctggtgctgatggctatggtcaagcggaaggacagccggggaagggccaagcgatctggatctggagcaacaaacttctcactactcaaacaagcaggtgacgtggaggagaatcccgggcctactagtgccaccatggactggatttggcgcatccttttccttgtcggcgctgctaccggcgcccattccttcgaagaagtccaacttgtggagtctggagggggcctggtgcagcccggcggctctctcagactgtcttgtgcggcaagcggctacaccttcagctcttactggatagaatgggtgaggcaggcacctggaaagggactggagtggattggagagattctgccaggagggggagatacaaattacaatgaaatcttcaaggggcgggccaccttttcagcggataccagcaagaatacagcttacctgcagatgaatagcctccgggcagaagataccgctgtttattattgcacgagacgggtgccaataagactggactattgggggcaagggactcttgtcaccgtcagttcaacgcgtatccagaaccctgatcctgccgtgtaccagctgcgggatagcaagagcagcgacaagagcgtgtgtctgttcaccgacttcgacagccagaccaacgtgtcccagagcaaggactccgacgtgtacatcaccgataagtgcgtgctggacatgcggagcatggacttcaagagcaactccgccgtggcctggtccaacaagtccgatttcgcctgcgccaacgccttcaacaacagcattatccccgaggacacattcttcccaagccccgagagcagctgcgacgtgaagctggtggaaaagagcttcgagacagacaccaacctgaacttccagaacctgagcgtgatcggcttcagaatcctgctgctgaaagtggccggctttaacctgctgatgaccctgcggctgtggtccagctaa

SEQ ID NO: 38556 - DNA, 2304 bp, synthetic construct
  source 1..2304: mol_type = other DNA
atggccttaccagtgaccgccttgctcctgccgctggccttgctgctccacgccgccaggccgcaagttcagctggtggaaagcggtggtggcgttgtgcaacctggtggaagtctgaggctgagctgtgccgcttctggcctgagctttagcacctacactgtggcctggttcaggcaggctcccggaaagggtcttgaaggcgtggccgccattccttacaccagccagcacatggtgtacacagacagcgtcagaggccggttcaccatcagcagagacaactccaagaatacgctctatctccagatgaactctctgcgcgccgaagatacagccgtgtattactgcgccaccgacagacggcctggcacctctatgctggctatcaacggctacaacagatggggacagggaaccaccgtgaccgtgtcatctggtaccggcggaggcggatctggcggcggaggtagcggtggcggaggatctgaattcgacatcgtgatgacacagagccctgatagcctggccgtgtctctgggagagagagccaccattaactgcaaggccagccagagcgtggactacgacggcgacagcttcctgaactggtatcagcagaagcccggccagcctcctaagctgctgatctacgccgccagcaatctggaaagcggcgtgccaagcagattttccggctctggcagcggcaccgatttcaccctgacaatatccagcctccagcctgaggacgtggccgtgtactactgccagcagagcaacgacgaccctctgacctttggacagggcaccaaggtggaaatcaaactcgaggacctgaagaacgtgttcccacctgaggtggccgtgttcgagcctagcgaggccgagatcagccacacccagaaagccaccctcgtgtgcctggctaccggcttctaccccgaccatgtggaactgtcttggtgggtcaacggcaaagaggtgcacagcggcgtgtgtaccgacccccagccactgaaagaacagcccgccctgaacgacagccggtactgcctgagcagcagactgagagtgtccgccaccttctggcagaacccccggaaccacttcagatgccaggtgcagttctacggcctgagcgagaacgacgagtggacccaggacagagccaagcccgtgacccagatcgtgtctgccgaagcctggggcagagccgattgcggctttaccagcgagagctaccagcagggcgtgctgagcgccaccatcctgtacgagatcctgctgggcaaggccaccctgtacgccgtgctggtgtctgccctggtgctgatggctatggtcaagcggaaggacagccggggaagggccaagcgatctggatctggagcaacaaacttctcactactcaaacaagcaggtgacgtggaggagaatcccgggcctactagtgccaccatggactggatttggcgcatccttttccttgtcggcgctgctaccggcgcccattccttcgaagaagtccaacttgtggagtctggagggggcctggtgcagcccggcggctctctcagactgtcttgtgcggcaagcggctacaccttcagctcttactggatagaatgggtgaggcaggcacctggaaagggactggagtggattggagagattctgccaggagggggagatacaaattacaatgaaatcttcaaggggcgggccaccttttcagcggataccagcaagaatacagcttacctgcagatgaatagcctccgggcagaagataccgctgtttattattgcacgagacgggtgccaataagactggactattgggggcaagggactcttgtcaccgtcagttcaacgcgtatccagaaccctgatcctgccgtgtaccagctgcgggatagcaagagcagcgacaagagcgtgtgtctgttcaccgacttcgacagccagaccaacgtgtcccagagcaaggactccgacgtgtacatcaccgataagtgcgtgctggacatgcggagcatggacttcaagagcaactccgccgtggcctggtccaacaagtccgatttcgcctgcgccaacgccttcaacaacagcattatccccgaggacacattcttcccaagccccgagagcagctgcgacgtgaagctggtggaaaagagcttcgagacagacaccaacctgaacttccagaacctgagcgtgatcggcttcagaatcctgctgctgaaagtggccggctttaacctgctgatgaccctgcggctgtggtccagctaa

SEQ ID NO: 38557 - DNA, 2301 bp, synthetic construct
  source 1..2301: mol_type = other DNA
atggccttaccagtgaccgccttgctcctgccgctggccttgctgctccacgccgccaggccggacatcgtgatgacacagagccctgatagcctggccgtgtctctgggagagagagccaccattaactgcaaggccagccagagcgtggactacgacggcgacagcttcctgaactggtatcagcagaagcccggccagcctcctaagctgctgatctacgccgccagcaatctggaaagcggcgtgccaagcagattttccggctctggcagcggcaccgatttcaccctgacaatatccagcctccagcctgaggacgtggccgtgtactactgccagcagagcaacgacgaccctctgacctttggacagggcaccaaggtggaaatcaaactcgaggacctgaagaacgtgttcccacctgaggtggccgtgttcgagcctagcgaggccgagatcagccacacccagaaagccaccctcgtgtgcctggctaccggcttctaccccgaccatgtggaactgtcttggtgggtcaacggcaaagaggtgcacagcggcgtgtgtaccgacccccagccactgaaagaacagcccgccctgaacgacagccggtactgcctgagcagcagactgagagtgtccgccaccttctggcagaacccccggaaccacttcagatgccaggtgcagttctacggcctgagcgagaacgacgagtggacccaggacagagccaagcccgtgacccagatcgtgtctgccgaagcctggggcagagccgattgcggctttaccagcgagagctaccagcagggcgtgctgagcgccaccatcctgtacgagatcctgctgggcaaggccaccctgtacgccgtgctggtgtctgccctggtgctgatggctatggtcaagcggaaggacagccggggaagggccaagcgatctggatctggagcaacaaacttctcactactcaaacaagcaggtgacgtggaggagaatcccgggcctactagtaccatggactggatttggcgcatccttttccttgtcggcgctgctaccggcgcccattccgggccccaagttcagctggtggaaagcggtggtggcgttgtgcaacctggtggaagtctgaggctgagctgtgccgcttctggcctgagctttagcacctacactgtggcctggttcaggcaggctcccggaaagggtcttgaaggcgtggccgccattccttacaccagccagcacatggtgtacacagacagcgtcagaggccggttcaccatcagcagagacaactccaagaatacgctctatctccagatgaactctctgcgcgccgaagatacagccgtgtattactgcgccaccgacagacggcctggcacctctatgctggctatcaacggctacaacagatggggacagggaaccaccgtgaccgtgtcatctggatccggcggcggaggatctggcggaggcggatctgggggcggaggctctttcgaagaagtccaacttgtggagtctggagggggcctggtgcagcccggcggctctctcagactgtcttgtgcggcaagcggctacaccttcagctcttactggatagaatgggtgaggcaggcacctggaaagggactggagtggattggagagattctgccaggagggggagatacaaattacaatgaaatcttcaaggggcgggccaccttttcagcggataccagcaagaatacagcttacctgcagatgaatagcctccgggcagaagataccgctgtttattattgcacgagacgggtgccaataagactggactattgggggcaagggactcttgtcaccgtcagttcaacgcgtatccagaaccctgatcctgccgtgtaccagctgcgggatagcaagagcagcgacaagagcgtgtgtctgttcaccgacttcgacagccagaccaacgtgtcccagagcaaggactccgacgtgtacatcaccgataagtgcgtgctggacatgcggagcatggacttcaagagcaactccgccgtggcctggtccaacaagtccgatttcgcctgcgccaacgccttcaacaacagcattatccccgaggacacattcttcccaagccccgagagcagctgcgacgtgaagctggtggaaaagagcttcgagacagacaccaacctgaacttccagaacctgagcgtgatcggcttcagaatcctgctgctgaaagtggccggctttaacctgctgatgaccctgcggctgtggtccagctaa

SEQ ID NO: 38558 - DNA, 2307 bp, synthetic construct
  source 1..2307: mol_type = other DNA
atggccttaccagtgaccgccttgctcctgccgctggccttgctgctccacgccgccaggccggacatcgtgatgacacagagccctgatagcctggccgtgtctctgggagagagagccaccattaactgcaaggccagccagagcgtggactacgacggcgacagcttcctgaactggtatcagcagaagcccggccagcctcctaagctgctgatctacgccgccagcaatctggaaagcggcgtgccaagcagattttccggctctggcagcggcaccgatttcaccctgacaatatccagcctccagcctgaggacgtggccgtgtactactgccagcagagcaacgacgaccctctgacctttggacagggcaccaaggtggaaatcaaactcgaggacctgaagaacgtgttcccacctgaggtggccgtgttcgagcctagcgaggccgagatcagccacacccagaaagccaccctcgtgtgcctggctaccggcttctaccccgaccatgtggaactgtcttggtgggtcaacggcaaagaggtgcacagcggcgtgtgtaccgacccccagccactgaaagaacagcccgccctgaacgacagccggtactgcctgagcagcagactgagagtgtccgccaccttctggcagaacccccggaaccacttcagatgccaggtgcagttctacggcctgagcgagaacgacgagtggacccaggacagagccaagcccgtgacccagatcgtgtctgccgaagcctggggcagagccgattgcggctttaccagcgagagctaccagcagggcgtgctgagcgccaccatcctgtacgagatcctgctgggcaaggccaccctgtacgccgtgctggtgtctgccctggtgctgatggctatggtcaagcggaaggacagccggggaagggccaagcgatctggatctggagcaacaaacttctcactactcaaacaagcaggtgacgtggaggagaatcccgggcctactagtaccatggactggatttggcgcatccttttccttgtcggcgctgctaccggcgcccattccgggcccgaggtgcagctggttgaatctggcggaggatctgttcaggctggcggctctctgagactgtcttgtgccgccagcggctacacctacagcatcaactgcatgggctggttcagacaggcccctggcaaagagagagaaggcgttgccgccatctctaccggcggaggcagaaccgattaccgggattctgtgaagggcagattcaccatcagccaggacaacgccaagaacaccgtgtacctccagatgaacagcctgaagcctgaggacaccgccatgtactactgtgccggcaagaccacctatcctggctacggatgtggcctgggcagaagcgcctacaattattggggccagggcacccaagtgaccgtgtcatctggatccggcggcggaggatctggcggaggcggatctgggggcggaggctctttcgaagaagtccaacttgtggagtctggagggggcctggtgcagcccggcggctctctcagactgtcttgtgcggcaagcggctacaccttcagctcttactggatagaatgggtgaggcaggcacctggaaagggactggagtggattggagagattctgccaggagggggagatacaaattacaatgaaatcttcaaggggcgggccaccttttcagcggataccagcaagaatacagcttacctgcagatgaatagcctccgggcagaagataccgctgtttattattgcacgagacgggtgccaataagactggactattgggggcaagggactcttgtcaccgtcagttcaacgcgtatccagaaccctgatcctgccgtgtaccagctgcgggatagcaagagcagcgacaagagcgtgtgtctgttcaccgacttcgacagccagaccaacgtgtcccagagcaaggactccgacgtgtacatcaccgataagtgcgtgctggacatgcggagcatggacttcaagagcaactccgccgtggcctggtccaacaagtccgatttcgcctgcgccaacgccttcaacaacagcattatccccgaggacacattcttcccaagccccgagagcagctgcgacgtgaagctggtggaaaagagcttcgagacagacaccaacctgaacttccagaacctgagcgtgatcggcttcagaatcctgctgctgaaagtggccggctttaacctgctgatgaccctgcggctgtggtccagctaa

SEQ ID NO: 38559 - DNA, 1863 bp, synthetic construct
  source 1..1863: mol_type = other DNA
atggccttaccagtgaccgccttgctcctgccgctggccttgctgctccacgccgccaggccggacatcgtgatgacacagagccctgatagcctggccgtgtctctgggagagagagccaccattaactgcaaggccagccagagcgtggactacgacggcgacagcttcctgaactggtatcagcagaagcccggccagcctcctaagctgctgatctacgccgccagcaatctggaaagcggcgtgccaagcagattttccggctctggcagcggcaccgatttcaccctgacaatatccagcctccagcctgaggacgtggccgtgtactactgccagcagagcaacgacgaccctctgacctttggacagggcaccaaggtggaaatcaaactcgaggacctgaagcacgtgttcccacctgaggtggccgtgttcgagcctagcgacgccgagatctggcacacccagaaagccaccctcgtgtgcctggctaccggcttctaccccgaccatgtggaactgtcttggtgggtcaacggcaaagaggtgcacagcggcgtgtctaccgacccccagccactgaaagaacagcccgccctgaacgacagccggtactgcctgagcagcagactgagagtgtccgccaccttctggcagaacccccggaaccacttcagatgccaggtgcagttctacggcctgagcgagaacgacgagtggacccaggacagagccaagcccgtgacccagatcgtgtctgccgaagcctggggcagagccgattgcggctttaccagcgagagctaccagcagggcgtgctgagcgccaccatcctgtacgagatcctgctgggcaaggccaccctgtacgccgtgctggtgtctgccctggtgctgatggctatggtcaagcggaaggacagccggggaagggccaagcgatctggatctggagcaacaaacttctcactactcaaacaagcaggtgacgtggaggagaatcccgggcctactagtatggactggatttggcgcatccttttccttgtcggcgctgctaccggcgcgcattccttcgaagaagtccaacttgtggagtctggagggggcctggtgcagcccggcggctctctcagactgtcttgtgcggcaagcggctacaccttcagctcttactggatagaatgggtgaggcaggcacctggaaagggactggagtggattggagagattctgccaggagggggagatacaaattacaatgaaatcttcaaggggcgggccaccttttcagcggataccagcaagaatacagcttacctgcagatgaatagcctccgggcagaagataccgctgtttattattgcacgagacgggtgccaataagactggactattgggggcaagggactcttgtcaccgtcagttcaacgcgtatccagaaccctgatcctgccgtgtaccagctgcgggatagcaagagcagcgacaagagcgtgtgtctgttcaccgacttcgacagccagaccaacgtgtcccagagcaaggactccgacgtgtacatcaccgataagaccgtgctggacatgcggagcatggacttcaagagcaactccgccgtggcctggtccagcaagtccgatttcgcctgcgccaacgccttcaacaacagcattatccccgaggacacattcttcccaagccccgagatggcctgcgacgtgaagctggtggaaaagagcttcgagacagacaccaacctgaacttccagaacctgctcgtgatctggctgagaatcctgctgctgaaagtggccggctttaacctgctgatgaccctgcggctgtggtccagc

SEQ ID NO: 38560 - DNA, 1863 bp, synthetic construct
  source 1..1863: mol_type = other DNA
atggccttaccagtgaccgccttgctcctgccgctggccttgctgctccacgccgccaggccggacatcgtgatgacacagagccctgatagcctggccgtgtctctgggagagagagccaccattaactgcaaggccagccagagcgtggactacgacggcgacagcttcctgaactggtatcagcagaagcccggccagcctcctaagctgctgatctacgccgccagcaatctggaaagcggcgtgccaagcagattttccggctctggcagcggcaccgatttcaccctgacaatatccagcctccagcctgaggacgtggccgtgtactactgccagcagagcaacgacgaccctctgacctttggacagggcaccaaggtggaaatcaaactcgaggacctgaagcacgtgttcccacctgaggtggccgtgttcgagcctagcgacgccgagatctggcacacccagaaagccaccctcgtgtgcctggctaccggcttctaccccgaccatgtggaactgtcttggtgggtcaacggcaaagaggtgcacagcggcgtgtctaccgacccccagccactgaaagaacagcccgccctgaacgacagccggtactgcctgagcagcagactgagagtgtccgccaccttctggcagaacccccggaaccacttcagatgccaggtgcagttctacggcctgagcgagaacgacgagtggacccaggacagagccaagcccgtgacccagatcgtgtctgccgaagcctggggcagagccgattgcggctttaccagcgagagctaccagcagggcgtgctgagcgccaccatcctgtacgagatcctgctgggcaaggccaccctgtacgccgtgctggtgtctgccctggtgctgatggctatggtcaagcggaaggacagccggggaagggccaagcgatctggatctggagcaacaaacttctcactactcaaacaagcaggtgacgtggaggagaatcccgggcctactagtatggactggatttggcgcatccttttccttgtcggcgctgctaccggcgcgcattccttcgaagaagtccaacttgtggagtctggagggggcctggtgcagcccggcggctctctcagactgtcttgtgcggcaagcggctacaccttcagctcttactggatagaatgggtgaggcaggcacctggaaagggactggagtggattggagagattctgccaggagggggagatacaaattacaatgaaatcttcaaggggcgggccaccttttcagcggataccagcaagaatacagcttacctgcagatgaatagcctccgggcagaagataccgctgtttattattgcacgagacgggtgccaataagactggactattgggggcaagggactcttgtcaccgtcagttcaacgcgtatccagaaccctgatcctgccgtgtaccagctgcgggatagcaagagcagcgacaagagcgtgtgtctgttcaccgacttcgacagccagaccaacgtgtcccagagcaaggactccgacgtgtacatcaccgataagaccgtgctggacatgcggagcatggacttcaagagcaactccgccgtggcctggtccaccaagtccgatttcgcctgcgccaacgccttcaacaacagcattatccccgaggacacattcttcccaagccccgaggtggtgtgcgacgtgaagctggtggaaaagagcttcgagacagacaccaacctgaacttccagaacctggtggtgatcggcgccagaatcctgctgctgaaagtggccggctttaacctgctgatgaccctgcggctgtggtccagc

SEQ ID NO: 38561 - DNA, 1863 bp, synthetic construct
  source 1..1863: mol_type = other DNA
atggccttaccagtgaccgccttgctcctgccgctggccttgctgctccacgccgccaggccggacatcgtgatgacacagagccctgatagcctggccgtgtctctgggagagagagccaccattaactgcaaggccagccagagcgtggactacgacggcgacagcttcctgaactggtatcagcagaagcccggccagcctcctaagctgctgatctacgccgccagcaatctggaaagcggcgtgccaagcagattttccggctctggcagcggcaccgatttcaccctgacaatatccagcctccagcctgaggacgtggccgtgtactactgccagcagagcaacgacgaccctctgacctttggacagggcaccaaggtggaaatcaaactcgaggacctgaagaacgtgttcccacctgaggtggccgtgttcgagcctagcaaggccgagatcagcagaacccagaaagccaccctcgtgtgcctggctaccggcttctaccctcctcatgtggaactgtcttggtgggtcaacggcaaagaggtgcacgacggcgtgtgtaccgacccccagccactgaaagaacagcccgccctgaacgacagccggtactgcctgagcagcagactgagagtgtccgccaccttctggcagaacccccggaaccacttcagatgccaggtgcagttctacggcctgagcgagaacgacgagtggacccaggacagagccaagcccgtgacccagatcgtgtctgccgaagcctggggcagagccgattgcggctttaccagcgagagctaccagcagggcgtgctgagcgccaccatcctgtacgagatcctgctgggcaaggccaccctgtacgccgtgctggtgtctgccctggtgctgatggctatggtcaagcggaaggacagccggggaagggccaagcgatctggatctggagcaacaaacttctcactactcaaacaagcaggtgacgtggaggagaatcccgggcctactagtatggactggatttggcgcatccttttccttgtcggcgctgctaccggcgcgcattccttcgaagaagtccaacttgtggagtctggagggggcctggtgcagcccggcggctctctcagactgtcttgtgcggcaagcggctacaccttcagctcttactggatagaatgggtgaggcaggcacctggaaagggactggagtggattggagagattctgccaggagggggagatacaaattacaatgaaatcttcaaggggcgggccaccttttcagcggataccagcaagaatacagcttacctgcagatgaatagcctccgggcagaagataccgctgtttattattgcacgagacgggtgccaataagactggactattgggggcaagggactcttgtcaccgtcagttcaacgcgtatccagaaccctgatcctgccgtgtaccagctgcgggatagcaagagcagcgacaagttcgtgtgtctgttcaccgacttcgacagccagatcaacgtgtcccagagcaaggactccgacgtgtacatcaccgataagtgcgtgctggacatgcggagcatggacttcaagagcaactccgccgtggcctggtccaacaagtccgatttcacctgcgccaacgccttcaacaacagcattatccccgaggacacattcttcccaagccccgagagcagctgcgacgtgaagctggtggaaaagagcttcgagacagacaccaacctgaacttccagaacctgagcgtgatcggcttcagaatcctgctgctgaaagtggccggctttaacctgctgatgaccctgcggctgtggtccagc

SEQ ID NO: 38562 - DNA, 2289 bp, synthetic construct
  source 1..2289: mol_type = other DNA
atggccttaccagtgaccgccttgctcctgccgctggccttgctgctccacgccgccaggccggacatcgtgatgacacagagccctgatagcctggccgtgtctctgggagagagagccaccattaactgcaaggccagccagagcgtggactacgacggcgacagcttcctgaactggtatcagcagaagcccggccagcctcctaagctgctgatctacgccgccagcaatctggaaagcggcgtgccaagcagattttccggctctggcagcggcaccgatttcaccctgacaatatccagcctccagcctgaggacgtggccgtgtactactgccagcagagcaacgacgaccctctgacctttggacagggcaccaaggtggaaatcaaactcgaggacctgaagaacgtgttcccacctgaggtggccgtgttcgagcctagcgaggccgagatcagccacacccagaaagccaccctcgtgtgcctggctaccggcttctaccccgaccatgtggaactgtcttggtgggtcaacggcaaagaggtgcacagcggcgtgtgtaccgacccccagccactgaaagaacagcccgccctgaacgacagccggtactgcctgagcagcagactgagagtgtccgccaccttctggcagaacccccggaaccacttcagatgccaggtgcagttctacggcctgagcgagaacgacgagtggacccaggacagagccaagcccgtgacccagatcgtgtctgccgaagcctggggcagagccgattgcggctttaccagcgagagctaccagcagggcgtgctgagcgccaccatcctgtacgagatcctgctgggcaaggccaccctgtacgccgtgctggtgtctgccctggtgctgatggctatggtcaagcggaaggacagccggggaagggccaagcgatctggatctggagcaacaaacttctcactactcaaacaagcaggtgacgtggaggagaatcccgggcctactagtaccatggactggatttggcgcatccttttccttgtcggcgctgctaccggcgcccattccgggccccaggtgcagctccaagaaagcggacccggactggttaagccctctcagaccctgtctctgacctgcacagttagcggagccagcattaccacaggcgagtattattggaattggtttcggcagccaccaggcaaggggcttgagtggatgggtgctattgctgcctctggcagcaccacctactctcccagctttgagagcagaacctccatcagccgggacacctccaaaaaccagttctctctgaagctgtcctccgtgaccgctgctgacaccgccgtctattattgtggccggtctttcggcgtggcagctgtgaccacaggacagaacagaggccagggaacacttgtgaccgtgtcctctggatccggcggcggaggatctggcggaggcggatctgggggcggaggctctttcgaagaagtccaacttgtggagtctggagggggcctggtgcagcccggcggctctctcagactgtcttgtgcggcaagcggctacaccttcagctcttactggatagaatgggtgaggcaggcacctggaaagggactggagtggattggagagattctgccaggagggggagatacaaattacaatgaaatcttcaaggggcgggccaccttttcagcggataccagcaagaatacagcttacctgcagatgaatagcctccgggcagaagataccgctgtttattattgcacgagacgggtgccaataagactggactattgggggcaagggactcttgtcaccgtcagttcaacgcgtatccagaaccctgatcctgccgtgtaccagctgcgggatagcaagagcagcgacaagagcgtgtgtctgttcaccgacttcgacagccagaccaacgtgtcccagagcaaggactccgacgtgtacatcaccgataagtgcgtgctggacatgcggagcatggacttcaagagcaactccgccgtggcctggtccaacaagtccgatttcgcctgcgccaacgccttcaacaacagcattatccccgaggacacattcttcccaagccccgagagcagctgcgacgtgaagctggtggaaaagagcttcgagacagacaccaacctgaacttccagaacctgagcgtgatcggcttcagaatcctgctgctgaaagtggccggctttaacctgctgatgaccctgcggctgtggtccagc

SEQ ID NO: 38563 - DNA, 2712 bp, synthetic construct
  source 1..2712: mol_type = other DNA
atggccttaccagtgaccgccttgctcctgccgctggccttgctgctccacgccgccaggccgcaggttcagctgcaagagtctggccctggcctggtcaagcctagccaaacactgagcctgacctgtaccgtgtctggcggctctatcaccaccggcgagttctactggaactggttcagacagcctcctggcaaaggactggaatggatgggagccattgccgccagcggcagcacaacatacagccctagcttcgagagccggaccagcatcagcagagacaccagcaagaatcagttcagcctgaagctgagcagcgtgacagccgccgatacagccgtgtattactgcggcagatcctttggagtggccgccgtgacaaccggccagaatagaggacagggcaccctggtcacagtgtctagcggtaccggcggaggcggatctggcggcggaggtagcggtggcggaggatctgaattcgacatcgtgatgacacagagccctgatagcctggccgtgtctctgggagagagagccaccattaactgcaaggccagccagagcgtggactacgacggcgacagcttcctgaactggtatcagcagaagcccggccagcctcctaagctgctgatctacgccgccagcaatctggaaagcggcgtgccaagcagattttccggctctggcagcggcaccgatttcaccctgacaatatccagcctccagcctgaggacgtggccgtgtactactgccagcagagcaacgacgaccctctgacctttggacagggcaccaaggtggaaatcaaactcgagatccagaaccctgatcctgccgtgtaccagctgcgggatagcaagagcagcgacaagagcgtgtgtctgttcaccgacttcgacagccagaccaacgtgtcccagagcaaggactccgacgtgtacatcaccgataagtgcgtgctggacatgcggagcatggacttcaagagcaactccgccgtggcctggtccaacaagtccgatttcgcctgcgccaacgccttcaacaacagcattatccccgaggacacattcttcccaagcagcgacgtgccctgcgacgtgaagctggtggaaaagagcttcgagacagacaccaacctgaacttccagaacctgagcgtgatcggcttcagaatcctgctgctgaaagtggccggctttaacctgctgatgaccctgcggctgtggtccagccgcgccaagagaagcggatctggcgtgaagcagaccctgaatttcgacctgctgaagctggctggcgacgtggaatccaacccaggccctactagtaccatggactggatttggcgcatccttttccttgtcggcgctgctaccggcgcccattccgggcccgaagtgcaactggttgaatccggtggcggcctggtgcaacccggcggatctctcagacttagctgtgccgcctccggcagaaccttcacaatgggatggtacaggcaggctccagggaaagagagagagttcgtcgccgccatctctctgtctcccacactggcctactacgccgactctgtgaaaggccggttcaccatctccagagataatagcaagaacaccgtggtgctgcaaatgaactctctgagagccgaggatacagccctgtactattgtgccgctgaccggaagtccgtgatgagcatcagacccgattactggggacagggcacactggtcacagtgtctagtggatccggcggcggaggatctggcggaggcggatctgggggcggaggctctttcgaagaagtccaacttgtggagtctggagggggcctggtgcagcccggcggctctctcagactgtcttgtgcggcaagcggctacaccttcagctcttactggatagaatgggtgaggcaggcacctggaaagggactggagtggattggagagattctgccaggagggggagatacaaattacaatgaaatcttcaaggggcgggccaccttttcagcggataccagcaagaatacagcttacctgcagatgaatagcctccgggcagaagataccgctgtttattattgcacgagacgggtgccaataagactggactattgggggcaagggactcttgtcaccgtcagttcaacgcgtgaggacctgaagaacgtgttcccacctgaggtggccgtgttcgagcctagcaaggccgagatcgcccacacccagaaagccaccctcgtgtgcctggctaccggcttctaccccgaccatgtggaactgtcttggtgggtcaacggcaaagaggtgcacagcggcgtgtgtaccgacccccagccactgaaagaacagcccgccctgaacgacagccggtactgcctgagcagcagactgagagtgtccgccaccttctggcagaacccccggaaccacttcagatgccaggtgcagttctacggcctgagcgagaacgacgagtggacccaggacagagccaagcccgtgacccagatcgtgtctgccgaagcctggggcagagccgattgcggcatcaccagcgccagctaccaccagggcgtgctgagcgccaccatcctgtacgagatcctgctgggcaaggccaccctgtacgccgtgctggtgtctgccctggtgctgatggctatggtcaagcggaaggacagccgggga

SEQ ID NO: 38564 - DNA, 2301 bp, synthetic construct
  source 1..2301: mol_type = other DNA
atggccttaccagtgaccgccttgctcctgccgctggccttgctgctccacgccgccaggccgcaggttcagctgcaagagtctggccctggcctggtcaagcctagccaaacactgagcctgacctgtaccgtgtctggcggctctatcaccaccggcgagttctactggaactggttcagacagcctcctggcaaaggactggaatggatgggagccattgccgccagcggcagcacaacatacagccctagcttcgagagccggaccagcatcagcagagacaccagcaagaatcagttcagcctgaagctgagcagcgtgacagccgccgatacagccgtgtattactgcggcagatcctttggagtggccgccgtgacaaccggccagaatagaggacagggcaccctggtcacagtgtctagcggtaccggcggaggcggatctggcggcggaggtagcggtggcggaggatctgaattcgacatcgtgatgacacagagccctgatagcctggccgtgtctctgggagagagagccaccattaactgcaaggccagccagagcgtggactacgacggcgacagcttcctgaactggtatcagcagaagcccggccagcctcctaagctgctgatctacgccgccagcaatctggaaagcggcgtgccaagcagattttccggctctggcagcggcaccgatttcaccctgacaatatccagcctccagcctgaggacgtggccgtgtactactgccagcagagcaacgacgaccctctgacctttggacagggcaccaaggtggaaatcaaactcgagatccagaaccctgatcctgccgtgtaccagctgcgggatagcaagagcagcgacaagagcgtgtgtctgttcaccgacttcgacagccagaccaacgtgtcccagagcaaggactccgacgtgtacatcaccgataagtgcgtgctggacatgcggagcatggacttcaagagcaactccgccgtggcctggtccaacaagtccgatttcgcctgcgccaacgccttcaacaacagcattatccccgaggacacattcttcccaagcagcgacgtgccctgcgacgtgaagctggtggaaaagagcttcgagacagacaccaacctgaacttccagaacctgagcgtgatcggcttcagaatcctgctgctgaaagtggccggctttaacctgctgatgaccctgcggctgtggtccagccgcgccaagagaagcggatctggcgtgaagcagaccctgaatttcgacctgctgaagctggctggcgacgtggaatccaacccaggccctactagtaccatggactggatttggcgcatccttttccttgtcggcgctgctaccggcgcccattccttcgaagaagtccaacttgtggagtctggagggggcctggtgcagcccggcggctctctcagactgtcttgtgcggcaagcggctacaccttcagctcttactggatagaatgggtgaggcaggcacctggaaagggactggagtggattggagagattctgccaggagggggagatacaaattacaatgaaatcttcaaggggcgggccaccttttcagcggataccagcaagaatacagcttacctgcagatgaatagcctccgggcagaagataccgctgtttattattgcacgagacgggtgccaataagactggactattgggggcaagggactcttgtcaccgtcagttcaacgcgtgaggacctgaagaacgtgttcccacctgaggtggccgtgttcgagcctagcaaggccgagatcgcccacacccagaaagccaccctcgtgtgcctggctaccggcttctaccccgaccatgtggaactgtcttggtgggtcaacggcaaagaggtgcacagcggcgtgtgtaccgacccccagccactgaaagaacagcccgccctgaacgacagccggtactgcctgagcagcagactgagagtgtccgccaccttctggcagaacccccggaaccacttcagatgccaggtgcagttctacggcctgagcgagaacgacgagtggacccaggacagagccaagcccgtgacccagatcgtgtctgccgaagcctggggcagagccgattgcggcatcaccagcgccagctaccaccagggcgtgctgagcgccaccatcctgtacgagatcctgctgggcaaggccaccctgtacgccgtgctggtgtctgccctggtgctgatggctatggtcaagcggaaggacagccgggga

SEQ ID NO: 38565 - DNA, 2700 bp, synthetic construct
  source 1..2700: mol_type = other DNA
atggccttaccagtgaccgccttgctcctgccgctggccttgctgctccacgccgccaggccggaagtgcagctggttgaatctggcggaggactggttcaggctggcggatctctgagactgtcttgtgccgccagcggcagaacctttagcatgggctggtttagacaggcccctggcaaagagagagagttcgtcgccgccatcacatactctggcggcagcccttactacgccgactctgtgaagggcagattcaccatcagccgggacaacgccaagaacaccgtgtacctccagatgaacagcctgaagcctgaggacaccgccgtgtactactgcgccgccaatccaacatacggcagcgactggaacgccgagaattggggccagggaacccaagtgacagtgtctagcggtaccggcggaggcggatctggcggcggaggtagcggtggcggaggatctgaattcgacatcgtgatgacacagagccctgatagcctggccgtgtctctgggagagagagccaccattaactgcaaggccagccagagcgtggactacgacggcgacagcttcctgaactggtatcagcagaagcccggccagcctcctaagctgctgatctacgccgccagcaatctggaaagcggcgtgccaagcagattttccggctctggcagcggcaccgatttcaccctgacaatatccagcctccagcctgaggacgtggccgtgtactactgccagcagagcaacgacgaccctctgacctttggacagggcaccaaggtggaaatcaaactcgaggacctgaagaacgtgttcccacctgaggtggccgtgttcgagcctagcgaggccgagatcagccacacccagaaagccaccctcgtgtgcctggctaccggcttctaccccgaccatgtggaactgtcttggtgggtcaacggcaaagaggtgcacagcggcgtgtgtaccgacccccagccactgaaagaacagcccgccctgaacgacagccggtactgcctgagcagcagactgagagtgtccgccaccttctggcagaacccccggaaccacttcagatgccaggtgcagttctacggcctgagcgagaacgacgagtggacccaggacagagccaagcccgtgacccagatcgtgtctgccgaagcctggggcagagccgattgcggctttaccagcgagagctaccagcagggcgtgctgagcgccaccatcctgtacgagatcctgctgggcaaggccaccctgtacgccgtgctggtgtctgccctggtgctgatggctatggtcaagcggaaggacagccggggaagggccaagcgatctggatctggagcaacaaacttctcactactcaaacaagcaggtgacgtggaggagaatcccgggcctactagtaccatggactggatttggcgcatccttttccttgtcggcgctgctaccggcgcccattccgggccccaggtgcagctccaagaaagcggacccggactggttaagccctctcagaccctgtctctgacctgcacagttagcggagccagcattaccacaggcgagtattattggaattggtttcggcagccaccaggcaaggggcttgagtggatgggtgctattgctgcctctggcagcaccacctactctcccagctttgagagcagaacctccatcagccgggacacctccaaaaaccagttctctctgaagctgtcctccgtgaccgctgctgacaccgccgtctattattgtggccggtctttcggcgtggcagctgtgaccacaggacagaacagaggccagggaacacttgtgaccgtgtcctctggatccggcggcggaggatctggcggaggcggatctgggggcggaggctctttcgaagaagtccaacttgtggagtctggagggggcctggtgcagcccggcggctctctcagactgtcttgtgcggcaagcggctacaccttcagctcttactggatagaatgggtgaggcaggcacctggaaagggactggagtggattggagagattctgccaggagggggagatacaaattacaatgaaatcttcaaggggcgggccaccttttcagcggataccagcaagaatacagcttacctgcagatgaatagcctccgggcagaagataccgctgtttattattgcacgagacgggtgccaataagactggactattgggggcaagggactcttgtcaccgtcagttcaacgcgtatccagaaccctgatcctgccgtgtaccagctgcgggatagcaagagcagcgacaagagcgtgtgtctgttcaccgacttcgacagccagaccaacgtgtcccagagcaaggactccgacgtgtacatcaccgataagtgcgtgctggacatgcggagcatggacttcaagagcaactccgccgtggcctggtccaacaagtccgatttcgcctgcgccaacgccttcaacaacagcattatccccgaggacacattcttcccaagccccgagagcagctgcgacgtgaagctggtggaaaagagcttcgagacagacaccaacctgaacttccagaacctgagcgtgatcggcttcagaatcctgctgctgaaagtggccggctttaacctgctgatgaccctgcggctgtggtccagc

SEQ ID NO: 38566 - DNA, 2721 bp, synthetic construct
  source 1..2721: mol_type = other DNA
atggccttaccagtgaccgccttgctcctgccgctggccttgctgctccacgccgccaggccggaagtgcagctggttgaatctggcggaggactggttcaggctggcggatctctgagactgtcttgtgccgccagcggcagaacctttagcatgggctggtttagacaggcccctggcaaagagagagagttcgtcgccgccatcacatactctggcggcagcccttactacgccgactctgtgaagggcagattcaccatcagccgggacaacgccaagaacaccgtgtacctccagatgaacagcctgaagcctgaggacaccgccgtgtactactgcgccgccaatccaacatacggcagcgactggaacgccgagaattggggccagggaacccaagtgacagtgtctagcggtaccggcggaggcggatctggcggcggaggtagcggtggcggaggatctgaattcgacatcgtgatgacacagagccctgatagcctggccgtgtctctgggagagagagccaccattaactgcaaggccagccagagcgtggactacgacggcgacagcttcctgaactggtatcagcagaagcccggccagcctcctaagctgctgatctacgccgccagcaatctggaaagcggcgtgccaagcagattttccggctctggcagcggcaccgatttcaccctgacaatatccagcctccagcctgaggacgtggccgtgtactactgccagcagagcaacgacgaccctctgacctttggacagggcaccaaggtggaaatcaaactcgagatccagaaccctgatcctgccgtgtaccagctgcgggatagcaagagcagcgacaagagcgtgtgtctgttcaccgacttcgacagccagaccaacgtgtcccagagcaaggactccgacgtgtacatcaccgataagtgcgtgctggacatgcggagcatggacttcaagagcaactccgccgtggcctggtccaacaagtccgatttcgcctgcgccaacgccttcaacaacagcattatccccgaggacacattcttcccaagcagcgacgtgccctgcgacgtgaagctggtggaaaagagcttcgagacagacaccaacctgaacttccagaacctgagcgtgatcggcttcagaatcctgctgctgaaagtggccggctttaacctgctgatgaccctgcggctgtggtccagccgcgccaagagaagcggatctggcgtgaagcagaccctgaatttcgacctgctgaagctggctggcgacgtggaatccaacccaggccctactagtaccatggactggatttggcgcatccttttccttgtcggcgctgctaccggcgcccattccgggccccaggtgcagctggttgaatctggcggaggactggttcagcctggcggatctctgagactgtcttgtgccgccagcggcaacatcaacagcagaaactgcatgggctggttcagacaggcccctggcaagggaagagaaggcgtggcagctatcggccaagtgaccggcagaacctactacgtggacagcgtgaagggcagattcaccatcagcctggacaacagcaagaacaccctgtacctccagatgaacagcctgagagccgaggacaccgccgtgtactattgtgctgctgcccctggctgtctgctgtctgcacttagaagcgccgactacagaaactggggccagggcacactggtcaccgtttcttctggatccggcggcggaggatctggcggaggcggatctgggggcggaggctctttcgaagaagtccaacttgtggagtctggagggggcctggtgcagcccggcggctctctcagactgtcttgtgcggcaagcggctacaccttcagctcttactggatagaatgggtgaggcaggcacctggaaagggactggagtggattggagagattctgccaggagggggagatacaaattacaatgaaatcttcaaggggcgggccaccttttcagcggataccagcaagaatacagcttacctgcagatgaatagcctccgggcagaagataccgctgtttattattgcacgagacgggtgccaataagactggactattgggggcaagggactcttgtcaccgtcagttcaacgcgtgaggacctgaagaacgtgttcccacctgaggtggccgtgttcgagcctagcaaggccgagatcgcccacacccagaaagccaccctcgtgtgcctggctaccggcttctaccccgaccatgtggaactgtcttggtgggtcaacggcaaagaggtgcacagcggcgtgtgtaccgacccccagccactgaaagaacagcccgccctgaacgacagccggtactgcctgagcagcagactgagagtgtccgccaccttctggcagaacccccggaaccacttcagatgccaggtgcagttctacggcctgagcgagaacgacgagtggacccaggacagagccaagcccgtgacccagatcgtgtctgccgaagcctggggcagagccgattgcggcatcaccagcgccagctaccaccagggcgtgctgagcgccaccatcctgtacgagatcctgctgggcaaggccaccctgtacgccgtgctggtgtctgccctggtgctgatggctatggtcaagcggaaggacagccgggga

SEQ ID NO: 38567 - DNA, 2709 bp, synthetic construct
  source 1..2709: mol_type = other DNA
atggccttaccagtgaccgccttgctcctgccgctggccttgctgctccacgccgccaggccggaagtgcagctggttgaatctggcggaggactggttcaggctggcggatctctgagactgtcttgtgccgccagcggcagaacctttagcatgggctggtttagacaggcccctggcaaagagagagagttcgtcgccgccatcacatactctggcggcagcccttactacgccgactctgtgaagggcagattcaccatcagccgggacaacgccaagaacaccgtgtacctccagatgaacagcctgaagcctgaggacaccgccgtgtactactgcgccgccaatccaacatacggcagcgactggaacgccgagaattggggccagggaacccaagtgacagtgtctagcggtaccggcggaggcggatctggcggcggaggtagcggtggcggaggatctgaattcgacatcgtgatgacacagagccctgatagcctggccgtgtctctgggagagagagccaccattaactgcaaggccagccagagcgtggactacgacggcgacagcttcctgaactggtatcagcagaagcccggccagcctcctaagctgctgatctacgccgccagcaatctggaaagcggcgtgccaagcagattttccggctctggcagcggcaccgatttcaccctgacaatatccagcctccagcctgaggacgtggccgtgtactactgccagcagagcaacgacgaccctctgacctttggacagggcaccaaggtggaaatcaaactcgaggacctgaagaacgtgttcccacctgaggtggccgtgttcgagcctagcgaggccgagatcagccacacccagaaagccaccctcgtgtgcctggctaccggcttctaccccgaccatgtggaactgtcttggtgggtcaacggcaaagaggtgcacagcggcgtgtgtaccgacccccagccactgaaagaacagcccgccctgaacgacagccggtactgcctgagcagcagactgagagtgtccgccaccttctggcagaacccccggaaccacttcagatgccaggtgcagttctacggcctgagcgagaacgacgagtggacccaggacagagccaagcccgtgacccagatcgtgtctgccgaagcctggggcagagccgattgcggctttaccagcgagagctaccagcagggcgtgctgagcgccaccatcctgtacgagatcctgctgggcaaggccaccctgtacgccgtgctggtgtctgccctggtgctgatggctatggtcaagcggaaggacagccggggaagggccaagcgatctggatctggagcaacaaacttctcactactcaaacaagcaggtgacgtggaggagaatcccgggcctactagtaccatggactggatttggcgcatccttttccttgtcggcgctgctaccggcgcccattccgggccccaggtgcagctggttgaatctggcggaggactggttcagcctggcggatctctgagactgtcttgtgccgccagcggcaacatcaacagcagaaactgcatgggctggttcagacaggcccctggcaagggaagagaaggcgtggcagctatcggccaagtgaccggcagaacctactacgtggacagcgtgaagggcagattcaccatcagcctggacaacagcaagaacaccctgtacctccagatgaacagcctgagagccgaggacaccgccgtgtactattgtgctgctgcccctggctgtctgctgtctgcacttagaagcgccgactacagaaactggggccagggcacactggtcaccgtttcttctggatccggcggcggaggatctggcggaggcggatctgggggcggaggctctttcgaagaagtccaacttgtggagtctggagggggcctggtgcagcccggcggctctctcagactgtcttgtgcggcaagcggctacaccttcagctcttactggatagaatgggtgaggcaggcacctggaaagggactggagtggattggagagattctgccaggagggggagatacaaattacaatgaaatcttcaaggggcgggccaccttttcagcggataccagcaagaatacagcttacctgcagatgaatagcctccgggcagaagataccgctgtttattattgcacgagacgggtgccaataagactggactattgggggcaagggactcttgtcaccgtcagttcaacgcgtatccagaaccctgatcctgccgtgtaccagctgcgggatagcaagagcagcgacaagagcgtgtgtctgttcaccgacttcgacagccagaccaacgtgtcccagagcaaggactccgacgtgtacatcaccgataagtgcgtgctggacatgcggagcatggacttcaagagcaactccgccgtggcctggtccaacaagtccgatttcgcctgcgccaacgccttcaacaacagcattatccccgaggacacattcttcccaagccccgagagcagctgcgacgtgaagctggtggaaaagagcttcgagacagacaccaacctgaacttccagaacctgagcgtgatcggcttcagaatcctgctgctgaaagtggccggctttaacctgctgatgaccctgcggctgtggtccagc

SEQ ID NO: 38568 - DNA, 2709 bp, synthetic construct
  source 1..2709: mol_type = other DNA
atggccttaccagtgaccgccttgctcctgccgctggccttgctgctccacgccgccaggccggaagtgcaactggttgaatccggtggcggcctggtgcaagcaggcggatctctcagacttagctgtgccgcctccggcagaaccttcacaatgggatggtttaggcaggctccagggaaagagagagagttcgtcgccgccatctctctgtctcccacactggcctactacgccgactctgtgaaaggccggttcaccatctccagagataatgccaagaacaccgtggtgctgcaaatgaactctctgaaacccgaggatacagccctgtactattgtgccgctgaccggaagtccgtgatgagcatcagacccgattactggggacagggcacacaagtcacagtgtcctctggtaccggcggaggcggatctggcggcggaggtagcggtggcggaggatctgaattcgacatcgtgatgacacagagccctgatagcctggccgtgtctctgggagagagagccaccattaactgcaaggccagccagagcgtggactacgacggcgacagcttcctgaactggtatcagcagaagcccggccagcctcctaagctgctgatctacgccgccagcaatctggaaagcggcgtgccaagcagattttccggctctggcagcggcaccgatttcaccctgacaatatccagcctccagcctgaggacgtggccgtgtactactgccagcagagcaacgacgaccctctgacctttggacagggcaccaaggtggaaatcaaactcgaggacctgaagaacgtgttcccacctgaggtggccgtgttcgagcctagcgaggccgagatcagccacacccagaaagccaccctcgtgtgcctggctaccggcttctaccccgaccatgtggaactgtcttggtgggtcaacggcaaagaggtgcacagcggcgtgtgtaccgacccccagccactgaaagaacagcccgccctgaacgacagccggtactgcctgagcagcagactgagagtgtccgccaccttctggcagaacccccggaaccacttcagatgccaggtgcagttctacggcctgagcgagaacgacgagtggacccaggacagagccaagcccgtgacccagatcgtgtctgccgaagcctggggcagagccgattgcggctttaccagcgagagctaccagcagggcgtgctgagcgccaccatcctgtacgagatcctgctgggcaaggccaccctgtacgccgtgctggtgtctgccctggtgctgatggctatggtcaagcggaaggacagccggggaagggccaagcgatctggatctggagcaacaaacttctcactactcaaacaagcaggtgacgtggaggagaatcccgggcctactagtaccatggactggatttggcgcatccttttccttgtcggcgctgctaccggcgcccattccgggccccaggtgcagctggttgaatctggcggaggactggttcagcctggcggatctctgagactgtcttgtgccgccagcggcaacatcaacagcagaaactgcatgggctggttcagacaggcccctggcaagggaagagaaggcgtggcagctatcggccaagtgaccggcagaacctactacgtggacagcgtgaagggcagattcaccatcagcctggacaacagcaagaacaccctgtacctccagatgaacagcctgagagccgaggacaccgccgtgtactattgtgctgctgcccctggctgtctgctgtctgcacttagaagcgccgactacagaaactggggccagggcacactggtcaccgtttcttctggatccggcggcggaggatctggcggaggcggatctgggggcggaggctctttcgaagaagtccaacttgtggagtctggagggggcctggtgcagcccggcggctctctcagactgtcttgtgcggcaagcggctacaccttcagctcttactggatagaatgggtgaggcaggcacctggaaagggactggagtggattggagagattctgccaggagggggagatacaaattacaatgaaatcttcaaggggcgggccaccttttcagcggataccagcaagaatacagcttacctgcagatgaatagcctccgggcagaagataccgctgtttattattgcacgagacgggtgccaataagactggactattgggggcaagggactcttgtcaccgtcagttcaacgcgtatccagaaccctgatcctgccgtgtaccagctgcgggatagcaagagcagcgacaagagcgtgtgtctgttcaccgacttcgacagccagaccaacgtgtcccagagcaaggactccgacgtgtacatcaccgataagtgcgtgctggacatgcggagcatggacttcaagagcaactccgccgtggcctggtccaacaagtccgatttcgcctgcgccaacgccttcaacaacagcattatccccgaggacacattcttcccaagccccgagagcagctgcgacgtgaagctggtggaaaagagcttcgagacagacaccaacctgaacttccagaacctgagcgtgatcggcttcagaatcctgctgctgaaagtggccggctttaacctgctgatgaccctgcggctgtggtccagc

SEQ ID NO: 38569 - DNA, 2721 bp, synthetic construct
  source 1..2721: mol_type = other DNA
atggccttaccagtgaccgccttgctcctgccgctggccttgctgctccacgccgccaggccgcaggttcagctgcaagagtctggccctggcctggtcaagcctagccaaacactgagcctgacctgtaccgtgtctggcggctctatcaccaccggcgagttctactggaactggttcagacagcctcctggcaaaggactggaatggatgggagccattgccgccagcggcagcacaacatacagccctagcttcgagagccggaccagcatcagcagagacaccagcaagaatcagttcagcctgaagctgagcagcgtgacagccgccgatacagccgtgtattactgcggcagatcctttggagtggccgccgtgacaaccggccagaatagaggacagggcaccctggtcacagtgtctagcggtaccggcggaggcggatctggcggcggaggtagcggtggcggaggatctgaattcgacatcgtgatgacacagagccctgatagcctggccgtgtctctgggagagagagccaccattaactgcaaggccagccagagcgtggactacgacggcgacagcttcctgaactggtatcagcagaagcccggccagcctcctaagctgctgatctacgccgccagcaatctggaaagcggcgtgccaagcagattttccggctctggcagcggcaccgatttcaccctgacaatatccagcctccagcctgaggacgtggccgtgtactactgccagcagagcaacgacgaccctctgacctttggacagggcaccaaggtggaaatcaaactcgaggacctgaagaacgtgttcccacctgaggtggccgtgttcgagcctagcgaggccgagatcagccacacccagaaagccaccctcgtgtgcctggctaccggcttctaccccgaccatgtggaactgtcttggtgggtcaacggcaaagaggtgcacagcggcgtgtgtaccgacccccagccactgaaagaacagcccgccctgaacgacagccggtactgcctgagcagcagactgagagtgtccgccaccttctggcagaacccccggaaccacttcagatgccaggtgcagttctacggcctgagcgagaacgacgagtggacccaggacagagccaagcccgtgacccagatcgtgtctgccgaagcctggggcagagccgattgcggctttaccagcgagagctaccagcagggcgtgctgagcgccaccatcctgtacgagatcctgctgggcaaggccaccctgtacgccgtgctggtgtctgccctggtgctgatggctatggtcaagcggaaggacagccggggaagggccaagcgatctggatctggagcaacaaacttctcactactcaaacaagcaggtgacgtggaggagaatcccgggcctactagtaccatggactggatttggcgcatccttttccttgtcggcgctgctaccggcgcccattccgggccccaggtgcagctggttgaatctggcggaggactggttcagcctggcggatctctgagactgtcttgtgccgccagcggcaacatcaacagcagaaactgcatgggctggttcagacaggcccctggcaagggaagagaaggcgtggcagctatcggccaagtgaccggcagaacctactacgtggacagcgtgaagggcagattcaccatcagcctggacaacagcaagaacaccctgtacctccagatgaacagcctgagagccgaggacaccgccgtgtactattgtgctgctgcccctggctgtctgctgtctgcacttagaagcgccgactacagaaactggggccagggcacactggtcaccgtttcttctggatccggcggcggaggatctggcggaggcggatctgggggcggaggctctttcgaagaagtccaacttgtggagtctggagggggcctggtgcagcccggcggctctctcagactgtcttgtgcggcaagcggctacaccttcagctcttactggatagaatgggtgaggcaggcacctggaaagggactggagtggattggagagattctgccaggagggggagatacaaattacaatgaaatcttcaaggggcgggccaccttttcagcggataccagcaagaatacagcttacctgcagatgaatagcctccgggcagaagataccgctgtttattattgcacgagacgggtgccaataagactggactattgggggcaagggactcttgtcaccgtcagttcaacgcgtatccagaaccctgatcctgccgtgtaccagctgcgggatagcaagagcagcgacaagagcgtgtgtctgttcaccgacttcgacagccagaccaacgtgtcccagagcaaggactccgacgtgtacatcaccgataagtgcgtgctggacatgcggagcatggacttcaagagcaactccgccgtggcctggtccaacaagtccgatttcgcctgcgccaacgccttcaacaacagcattatccccgaggacacattcttcccaagccccgagagcagctgcgacgtgaagctggtggaaaagagcttcgagacagacaccaacctgaacttccagaacctgagcgtgatcggcttcagaatcctgctgctgaaagtggccggctttaacctgctgatgaccctgcggctgtggtccagc

SEQ ID NO: 38570 - DNA, 1449 bp, synthetic construct
  source 1..1449: mol_type = other DNA
atggccttaccagtgaccgccttgctcctgccgctggccttgctgctccacgccgccaggccggacgtggtcatgacacagagcccttctagcctgtctgccagcgtgggcgacagagtgaccatcacctgtatggcctccgaggacatctacatccggctggcctggtatcagcagaagcctggaaacgcccctaagctgctgatctacgccgccacctctctggaaacaggcgtgccaagcagattttccggcagcggctctggcaccgatttcaccctgacaatatccagcctccagcctgaggacttcgccacctactactgccagcagtattggagcagcccctggacatttggcggaggcaccaaggtggaaatcaaaggcggaggcggaagtggaggcggaggatctggcggcggaggctctcaggttcagctgcaagagtctggccccggactggtcaagcctagccaaacactgagcctgacctgtaccgtgtccggctacagcatcaccagcgactacacctggaactggatcagacagcctcctggcaacggactggaatggatcggctacatcacctacagcggcagcaccagctacaaccccagcctgaaaagccgggtgctgatctccgtggacaccagcaagaatcaggtgtccctgaagctgagcagcgtgacagccgctgataccgccgtgtactactgtgccagactggggagaagatacacaatggactactggggccagggcaccaccgtgacagtttcttctacgcgtaaaattgaagttatgtatcctcctccttacctagacaatgagaagagcaatggaaccattatccatgtgaaagggaaacacctttgtccaagtcccctatttcccggaccttctaagcccttttgggtgctggtggtggttgggggagtcctggcttgctatagcttgctagtaacagtggcctttattattttctgggtgaggagtaagaggagcaggctcctgcacagtgactacatgaacatgactccacgccgccccggacccacccgcaagcattaccagccctatgccccaccacgcgacttcgcagcctatcgctccagagtgaagttcagcaggagcgcagacgcccccgcgtaccagcagggccagaaccagctctataacgagctcaatctaggacgaagagaggagtacgatgttttggacaagagacgtggccgggaccctgagatggggggaaagccgagaaggaagaaccctcaggaaggcctgtacaatgaactgcagaaagataagatggcggaggcctacagtgagattgggatgaaaggcgagcgccggaggggcaaggggcacgatggcctttaccagggtctcagtacagccaccaaggacacctacgacgcccttcacatgcaggccctgccccctcgc

SEQ ID NO: 38571 - DNA, 1467 bp, synthetic construct
  source 1..1467: mol_type = other DNA
atggccttaccagtgaccgccttgctcctgccgctggccttgctgctccacgccgccaggccggacgtggtcatgacacagagcccttctagcctgtctgccagcgtgggcgacagagtgaccatcacctgtatggcctccgaggacatctacatccggctggcctggtatcagcagaagcctggaaacgcccctaagctgctgatctacgccgccacctctctggaaacaggcgtgccaagcagattttccggcagcggctctggcaccgatttcaccctgacaatatccagcctccagcctgaggacttcgccacctactactgccagcagtattggagcagcccctggacatttggcggaggcaccaaggtggaaatcaaaggcggaggcggaagtggaggcggaggatctggcggcggaggctctcaggttcagctgcaagagtctggccccggactggtcaagcctagccaaacactgagcctgacctgtaccgtgtccggctacagcatcaccagcgactacacctggaactggatcagacagcctcctggcaacggactggaatggatcggctacatcacctacagcggcagcaccagctacaaccccagcctgaaaagccgggtgctgatctccgtggacaccagcaagaatcaggtgtccctgaagctgagcagcgtgacagccgctgataccgccgtgtactactgtgccagactggggagaagatacacaatggactactggggccagggcaccaccgtgacagtttcttctacgcgtgcgaagcccaccacgacgccagcgccgcgaccaccaacaccggcgcccaccatcgcgtcgcagcccctgtccctgcgcccagaggcgtgccggccagcggcggggggcgcagtgcacacgagggggctggacttcgcctgtgacatctacatctgggcgcccttggccgggacttgtggggtccttctcctgtcactggttatcaccctttactgcaaacggggcagaaagaaactcctgtatatattcaaacaaccatttatgagaccagtacaaactactcaagaggaagatggctgtagctgccgatttccagaagaagaagaaggaggatgtgaactgagagtgaagttcagcaggagcgcagacgcccccgcgtaccagcagggccagaaccagctctataacgagctgaatctaggacgaagagaggagtacgatgttttggacaagagacgtggccgggaccctgagatggggggaaagccgagaaggaagaaccctcaggaaggcctgtacaatgaactgcagaaagataagatggcggaggcctacagtgagattgggatgaaaggcgagcgccggaggggcaaggggcacgatggcctttaccagggtctcagtacagccaccaaggacacctacgacgcccttcacatgcaggccctgccccctcgc

SEQ ID NO: 38572 - DNA, 1467 bp, synthetic construct
  source 1..1467: mol_type = other DNA
atggccttaccagtgaccgccttgctcctgccgctggccttgctgctccacgccgccaggccgcaggttcagctgcaagagtctggccccggactggtcaagcctagccaaacactgagcctgacctgtaccgtgtccggctacagcatcaccagcgactacacctggaactggatcagacagcctcctggcaacggactggaatggatcggctacatcacctacagcggcagcaccagctacaaccccagcctgaaaagccgggtgctgatctccgtggacaccagcaagaatcaggtgtccctgaagctgagcagcgtgacagccgctgataccgccgtgtactactgtgccagactggggagaagatacacaatggactactggggccagggcaccaccgtgacagtttcttctggcggaggcggaagtggaggcggaggatctggcggcggaggctctgacgtggtcatgacacagagcccttctagcctgtctgccagcgtgggcgacagagtgaccatcacctgtatggcctccgaggacatctacatccggctggcctggtatcagcagaagcctggaaacgcccctaagctgctgatctacgccgccacctctctggaaacaggcgtgccaagcagattttccggcagcggctctggcaccgatttcaccctgacaatatccagcctccagcctgaggacttcgccacctactactgccagcagtattggagcagcccctggacatttggcggaggcaccaaggtggaaatcaaaacgcgtgcgaagcccaccacgacgccagcgccgcgaccaccaacaccggcgcccaccatcgcgtcgcagcccctgtccctgcgcccagaggcgtgccggccagcggcggggggcgcagtgcacacgagggggctggacttcgcctgtgacatctacatctgggcgcccttggccgggacttgtggggtccttctcctgtcactggttatcaccctttactgcaaacggggcagaaagaaactcctgtatatattcaaacaaccatttatgagaccagtacaaactactcaagaggaagatggctgtagctgccgatttccagaagaagaagaaggaggatgtgaactgagagtgaagttcagcaggagcgcagacgcccccgcgtaccagcagggccagaaccagctctataacgagctgaatctaggacgaagagaggagtacgatgttttggacaagagacgtggccgggaccctgagatggggggaaagccgagaaggaagaaccctcaggaaggcctgtacaatgaactgcagaaagataagatggcggaggcctacagtgagattgggatgaaaggcgagcgccggaggggcaaggggcacgatggcctttaccagggtctcagtacagccaccaaggacacctacgacgcccttcacatgcaggccctgccccctcgc

SEQ ID NO: 38573 - DNA, 1866 bp, synthetic construct
  source 1..1866: mol_type = other DNA
atggccttaccagtgaccgccttgctcctgccgctggccttgctgctccacgccgccaggccggacgtggtcatgacacagagcccttctagcctgtctgccagcgtgggcgacagagtgaccatcacctgtatggcctccgaggacatctacatccggctggcctggtatcagcagaagcctggaaacgcccctaagctgctgatctacgccgccacctctctggaaacaggcgtgccaagcagattttccggcagcggctctggcaccgatttcaccctgacaatatccagcctccagcctgaggacttcgccacctactactgccagcagtattggagcagcccctggacatttggcggaggcaccaaggtggaaatcaaactcgagatccagaaccctgatcctgccgtgtaccagctgcgggatagcaagagcagcgacaagagcgtgtgtctgttcaccgacttcgacagccagaccaacgtgtcccagagcaaggactccgacgtgtacatcaccgataagtgcgtgctggacatgcggagcatggacttcaagagcaactccgccgtggcctggtccaacaagtccgatttcgcctgcgccaacgccttcaacaacagcattatccccgaggacacattcttcccaagcagcgacgtgccctgcgacgtgaagctggtggaaaagagcttcgagacagacaccaacctgaacttccagaacctgagcgtgatcggcttcagaatcctgctgctgaaagtggccggctttaacctgctgatgaccctgcggctgtggtccagccgcgccaagagaagcggatctggcgtgaagcagaccctgaatttcgacctgctgaagctggctggcgacgtggaatccaacccaggccctactagtatggactggatttggcgcatccttttccttgtcggcgctgctaccggcgcgcattccttcgaacaggttcagctgcaagagtctggccccggactggtcaagcctagccaaacactgagcctgacctgtaccgtgtccggctacagcatcaccagcgactacacctggaactggatcagacagcctcctggcaacggactggaatggatcggctacatcacctacagcggcagcaccagctacaaccccagcctgaaaagccgggtgctgatctccgtggacaccagcaagaatcaggtgtccctgaagctgagcagcgtgacagccgctgataccgccgtgtactactgtgccagactggggagaagatacacaatggactactggggccagggcaccaccgtgacagtttcttctacgcgtgaggacctgaagaacgtgttcccacctgaggtggccgtgttcgagcctagcaaggccgagatcgcccacacccagaaagccaccctcgtgtgcctggctaccggcttctaccccgaccatgtggaactgtcttggtgggtcaacggcaaagaggtgcacagcggcgtgtgtaccgacccccagccactgaaagaacagcccgccctgaacgacagccggtactgcctgagcagcagactgagagtgtccgccaccttctggcagaacccccggaaccacttcagatgccaggtgcagttctacggcctgagcgagaacgacgagtggacccaggacagagccaagcccgtgacccagatcgtgtctgccgaagcctggggcagagccgattgcggcatcaccagcgccagctaccaccagggcgtgctgagcgccaccatcctgtacgagatcctgctgggcaaggccaccctgtacgccgtgctggtgtctgccctggtgctgatggctatggtcaagcggaaggacagccgggga

SEQ ID NO: 38574 - DNA, 1854 bp, synthetic construct
  source 1..1854: mol_type = other DNA
atggccttaccagtgaccgccttgctcctgccgctggccttgctgctccacgccgccaggccggacgtggtcatgacacagagcccttctagcctgtctgccagcgtgggcgacagagtgaccatcacctgtatggcctccgaggacatctacatccggctggcctggtatcagcagaagcctggaaacgcccctaagctgctgatctacgccgccacctctctggaaacaggcgtgccaagcagattttccggcagcggctctggcaccgatttcaccctgacaatatccagcctccagcctgaggacttcgccacctactactgccagcagtattggagcagcccctggacatttggcggaggcaccaaggtggaaatcaaactcgaggacctgaagaacgtgttcccacctgaggtggccgtgttcgagcctagcaaggccgagatcgcccacacccagaaagccaccctcgtgtgcctggctaccggcttctaccccgaccatgtggaactgtcttggtgggtcaacggcaaagaggtgcacagcggcgtgtgtaccgacccccagccactgaaagaacagcccgccctgaacgacagccggtactgcctgagcagcagactgagagtgtccgccaccttctggcagaacccccggaaccacttcagatgccaggtgcagttctacggcctgagcgagaacgacgagtggacccaggacagagccaagcccgtgacccagatcgtgtctgccgaagcctggggcagagccgattgcggcatcaccagcgccagctaccaccagggcgtgctgagcgccaccatcctgtacgagatcctgctgggcaaggccaccctgtacgccgtgctggtgtctgccctggtgctgatggctatggtcaagcggaaggacagccggggaagggccaagcgatctggatctggagcaacaaacttctcactactcaaacaagcaggtgacgtggaggagaatcccgggcctactagtatggactggatttggcgcatccttttccttgtcggcgctgctaccggcgcgcattccttcgaacaggttcagctgcaagagtctggccccggactggtcaagcctagccaaacactgagcctgacctgtaccgtgtccggctacagcatcaccagcgactacacctggaactggatcagacagcctcctggcaacggactggaatggatcggctacatcacctacagcggcagcaccagctacaaccccagcctgaaaagccgggtgctgatctccgtggacaccagcaagaatcaggtgtccctgaagctgagcagcgtgacagccgctgataccgccgtgtactactgtgccagactggggagaagatacacaatggactactggggccagggcaccaccgtgacagtttcttctacgcgtatccagaaccctgatcctgccgtgtaccagctgcgggatagcaagagcagcgacaagagcgtgtgtctgttcaccgacttcgacagccagaccaacgtgtcccagagcaaggactccgacgtgtacatcaccgataagtgcgtgctggacatgcggagcatggacttcaagagcaactccgccgtggcctggtccaacaagtccgatttcgcctgcgccaacgccttcaacaacagcattatccccgaggacacattcttcccaagcagcgacgtgccctgcgacgtgaagctggtggaaaagagcttcgagacagacaccaacctgaacttccagaacctgagcgtgatcggcttcagaatcctgctgctgaaagtggccggctttaacctgctgatgaccctgcggctgtggtccagc

SEQ ID NO: 38575 - DNA, 1854 bp, synthetic construct
  source 1..1854: mol_type = other DNA
atggccttaccagtgaccgccttgctcctgccgctggccttgctgctccacgccgccaggccggacgtggtcatgacacagagcccttctagcctgtctgccagcgtgggcgacagagtgaccatcacctgtatggcctccgaggacatctacatccggctggcctggtatcagcagaagcctggaaacgcccctaagctgctgatctacgccgccacctctctggaaacaggcgtgccaagcagattttccggcagcggctctggcaccgatttcaccctgacaatatccagcctccagcctgaggacttcgccacctactactgccagcagtattggagcagcccctggacatttggcggaggcaccaaggtggaaatcaaactcgaggacctgaagaacgtgttcccacctgaggtggccgtgttcgagcctagcgaggccgagatcagccacacccagaaagccaccctcgtgtgcctggctaccggcttctaccccgaccatgtggaactgtcttggtgggtcaacggcaaagaggtgcacagcggcgtgtgtaccgacccccagccactgaaagaacagcccgccctgaacgacagccggtactgcctgagcagcagactgagagtgtccgccaccttctggcagaacccccggaaccacttcagatgccaggtgcagttctacggcctgagcgagaacgacgagtggacccaggacagagccaagcccgtgacccagatcgtgtctgccgaagcctggggcagagccgattgcggctttaccagcgagagctaccagcagggcgtgctgagcgccaccatcctgtacgagatcctgctgggcaaggccaccctgtacgccgtgctggtgtctgccctggtgctgatggctatggtcaagcggaaggacagccggggaagggccaagcgatctggatctggagcaacaaacttctcactactcaaacaagcaggtgacgtggaggagaatcccgggcctactagtatggactggatttggcgcatccttttccttgtcggcgctgctaccggcgcgcattccttcgaacaggttcagctgcaagagtctggccccggactggtcaagcctagccaaacactgagcctgacctgtaccgtgtccggctacagcatcaccagcgactacacctggaactggatcagacagcctcctggcaacggactggaatggatcggctacatcacctacagcggcagcaccagctacaaccccagcctgaaaagccgggtgctgatctccgtggacaccagcaagaatcaggtgtccctgaagctgagcagcgtgacagccgctgataccgccgtgtactactgtgccagactggggagaagatacacaatggactactggggccagggcaccaccgtgacagtttcttctacgcgtatccagaaccctgatcctgccgtgtaccagctgcgggatagcaagagcagcgacaagagcgtgtgtctgttcaccgacttcgacagccagaccaacgtgtcccagagcaaggactccgacgtgtacatcaccgataagtgcgtgctggacatgcggagcatggacttcaagagcaactccgccgtggcctggtccaacaagtccgatttcgcctgcgccaacgccttcaacaacagcattatccccgaggacacattcttcccaagccccgagagcagctgcgacgtgaagctggtggaaaagagcttcgagacagacaccaacctgaacttccagaacctgagcgtgatcggcttcagaatcctgctgctgaaagtggccggctttaacctgctgatgaccctgcggctgtggtccagc

SEQ ID NO: 38576 - DNA, 1866 bp, synthetic construct
  source 1..1866: mol_type = other DNA
atggccttaccagtgaccgccttgctcctgccgctggccttgctgctccacgccgccaggccggacgtggtcatgacacagagcccttctagcctgtctgccagcgtgggcgacagagtgaccatcacctgtatggcctccgaggacatctacatccggctggcctggtatcagcagaagcctggaaacgcccctaagctgctgatctacgccgccacctctctggaaacaggcgtgccaagcagattttccggcagcggctctggcaccgatttcaccctgacaatatccagcctccagcctgaggacttcgccacctactactgccagcagtattggagcagcccctggacatttggcggaggcaccaaggtggaaatcaaactcgagatccagaaccctgatcctgccgtgtaccagctgcgggatagcaagagcagcgacaagagcgtgtgtctgttcaccgacttcgacagccagaccaacgtgtcccagagcaaggactccgacgtgtacatcaccgataagtgcgtgctggacatgcggagcatggacttcaagagcaactccgccgtggcctggtccaacaagtccgatttcgcctgcgccaacgccttcaacaacagcattatccccgaggacacattcttcccaagccccgagagcagctgcgacgtgaagctggtggaaaagagcttcgagacagacaccaacctgaacttccagaacctgagcgtgatcggcttcagaatcctgctgctgaaagtggccggctttaacctgctgatgaccctgcggctgtggtccagccgcgccaagagaagcggatctggcgtgaagcagaccctgaatttcgacctgctgaagctggctggcgacgtggaatccaacccaggccctactagtatggactggatttggcgcatccttttccttgtcggcgctgctaccggcgcgcattccttcgaacaggttcagctgcaagagtctggccccggactggtcaagcctagccaaacactgagcctgacctgtaccgtgtccggctacagcatcaccagcgactacacctggaactggatcagacagcctcctggcaacggactggaatggatcggctacatcacctacagcggcagcaccagctacaaccccagcctgaaaagccgggtgctgatctccgtggacaccagcaagaatcaggtgtccctgaagctgagcagcgtgacagccgctgataccgccgtgtactactgtgccagactggggagaagatacacaatggactactggggccagggcaccaccgtgacagtttcttctacgcgtgaggacctgaagaacgtgttcccacctgaggtggccgtgttcgagcctagcgaggccgagatcagccacacccagaaagccaccctcgtgtgcctggctaccggcttctaccccgaccatgtggaactgtcttggtgggtcaacggcaaagaggtgcacagcggcgtgtgtaccgacccccagccactgaaagaacagcccgccctgaacgacagccggtactgcctgagcagcagactgagagtgtccgccaccttctggcagaacccccggaaccacttcagatgccaggtgcagttctacggcctgagcgagaacgacgagtggacccaggacagagccaagcccgtgacccagatcgtgtctgccgaagcctggggcagagccgattgcggctttaccagcgagagctaccagcagggcgtgctgagcgccaccatcctgtacgagatcctgctgggcaaggccaccctgtacgccgtgctggtgtctgccctggtgctgatggctatggtcaagcggaaggacagccgggga

SEQ ID NO: 38577 - DNA, 1902 bp, synthetic construct
  source 1..1902: mol_type = other DNA
atggccttaccagtgaccgccttgctcctgccgctggccttgctgctccacgccgccaggccgctcgaggaggacctgaagaacgtgttcccacctgaggtggccgtgttcgagcctagcaaggccgagatcgcccacacccagaaagccaccctcgtgtgcctggctaccggcttctaccccgaccatgtggaactgtcttggtgggtcaacggcaaagaggtgcacagcggcgtgtgtaccgacccccagccactgaaagaacagcccgccctgaacgacagccggtactgcctgagcagcagactgagagtgtccgccaccttctggcagaacccccggaaccacttcagatgccaggtgcagttctacggcctgagcgagaacgacgagtggacccaggacagagccaagcccgtgacccagatcgtgtctgccgaagcctggggcagagccgattgcggcatcaccagcgccagctaccaccagggcgtgctgagcgccaccatcctgtacgagatcctgctgggcaaggccaccctgtacgccgtgctggtgtctgccctggtgctgatggctatggtcaagcggaaggacagccggggaagggccaagcgatctggatctggagcaacaaacttctcactactcaaacaagcaggtgacgtggaggagaatcccgggcctactagcatggccttaccagtgaccgccttgctcctgccgctggccttgctgctccacgccgccaggccggacgtggtcatgacacagagcccttctagcctgtctgccagcgtgggcgacagagtgaccatcacctgtatggcctccgaggacatctacatccggctggcctggtatcagcagaagcctggaaacgcccctaagctgctgatctacgccgccacctctctggaaacaggcgtgccaagcagattttccggcagcggctctggcaccgatttcaccctgacaatatccagcctccagcctgaggacttcgccacctactactgccagcagtattggagcagcccctggacatttggcggaggcaccaaggtggaaatcaaaggcggaggcggaagtggaggcggaggatctggcggcggaggctctcaggttcagctgcaagagtctggccccggactggtcaagcctagccaaacactgagcctgacctgtaccgtgtccggctacagcatcaccagcgactacacctggaactggatcagacagcctcctggcaacggactggaatggatcggctacatcacctacagcggcagcaccagctacaaccccagcctgaaaagccgggtgctgatctccgtggacaccagcaagaatcaggtgtccctgaagctgagcagcgtgacagccgctgataccgccgtgtactactgtgccagactggggagaagatacacaatggactactggggccagggcaccaccgtgacagtttcttctacgcgtatccagaaccctgatcctgccgtgtaccagctgcgggatagcaagagcagcgacaagagcgtgtgtctgttcaccgacttcgacagccagaccaacgtgtcccagagcaaggactccgacgtgtacatcaccgataagtgcgtgctggacatgcggagcatggacttcaagagcaactccgccgtggcctggtccaacaagtccgatttcgcctgcgccaacgccttcaacaacagcattatccccgaggacacattcttcccaagcagcgacgtgccctgcgacgtgaagctggtggaaaagagcttcgagacagacaccaacctgaacttccagaacctgagcgtgatcggcttcagaatcctgctgctgaaagtggccggctttaacctgctgatgaccctgcggctgtggtccagc

SEQ ID NO: 38578 - DNA, 1923 bp, synthetic construct
  source 1..1923: mol_type = other DNA
atggccttaccagtgaccgccttgctcctgccgctggccttgctgctccacgccgccaggccgctcgagggctccggcgatcgccctgatcctgccgtgtaccagctgcgggatagcaagagcagcgacaagagcgtgtgtctgttcaccgacttcgacagccagaccaacgtgtcccagagcaaggactccgacgtgtacatcaccgataagtgcgtgctggacatgcggagcatggacttcaagagcaactccgccgtggcctggtccaacaagtccgatttcgcctgcgccaacgccttcaacaacagcattatccccgaggacacattcttcccaagccccgagagcagctgcgacgtgaagctggtggaaaagagcttcgagacagacaccaacctgaacttccagaacctgagcgtgatcggcttcagaatcctgctgctgaaagtggccggctttaacctgctgatgaccctgcggctgtggtccagctctagtcgcgccaagagaagcggatctggcgtgaagcagaccctgaatttcgacctgctgaagctggctggcgacgtggaatccaacccaggccccactagcatggccttaccagtgaccgccttgctcctgccgctggccttgctgctccacgccgccaggccggacgtggtcatgacacagagcccttctagcctgtctgccagcgtgggcgacagagtgaccatcacctgtatggcctccgaggacatctacatccggctggcctggtatcagcagaagcctggaaacgcccctaagctgctgatctacgccgccacctctctggaaacaggcgtgccaagcagattttccggcagcggctctggcaccgatttcaccctgacaatatccagcctccagcctgaggacttcgccacctactactgccagcagtattggagcagcccctggacatttggcggaggcaccaaggtggaaatcaaaggcggaggcggaagtggaggcggaggatctggcggcggaggctctcaggttcagctgcaagagtctggccccggactggtcaagcctagccaaacactgagcctgacctgtaccgtgtccggctacagcatcaccagcgactacacctggaactggatcagacagcctcctggcaacggactggaatggatcggctacatcacctacagcggcagcaccagctacaaccccagcctgaaaagccgggtgctgatctccgtggacaccagcaagaatcaggtgtccctgaagctgagcagcgtgacagccgctgataccgccgtgtactactgtgccagactggggagaagatacacaatggactactggggccagggcaccaccgtgacagtttcttctacgcgtgaggacctgaagaacgtgttcccacctgaggtggccgtgttcgagcctagcgaggccgagatcagccacacccagaaagccaccctcgtgtgcctggctaccggcttctaccccgaccatgtggaactgtcttggtgggtcaacggcaaagaggtgcacagcggcgtgtgtaccgacccccagccactgaaagaacagcccgccctgaacgacagccggtactgcctgagcagcagactgagagtgtccgccaccttctggcagaacccccggaaccacttcagatgccaggtgcagttctacggcctgagcgagaacgacgagtggacccaggacagagccaagcccgtgacccagatcgtgtctgccgaagcctggggcagagccgattgcggctttaccagcgagagctaccagcagggcgtgctgagcgccaccatcctgtacgagatcctgctgggcaaggccaccctgtacgccgtgctggtgtctgccctggtgctgatggctatggtcaagcggaaggacagccgggga

SEQ ID NO: 38579 - DNA, 1854 bp, synthetic construct
  source 1..1854: mol_type = other DNA
atggccttaccagtgaccgccttgctcctgccgctggccttgctgctccacgccgccaggccggacgtggtcatgacacagagcccttctagcctgtctgccagcgtgggcgacagagtgaccatcacctgtatggcctccgaggacatctacatccggctggcctggtatcagcagaagcctggaaacgcccctaagctgctgatctacgccgccacctctctggaaacaggcgtgccaagcagattttccggcagcggctctggcaccgatttcaccctgacaatatccagcctccagcctgaggacttcgccacctactactgccagcagtattggagcagcccctggacatttggcggaggcaccaaggtggaaatcaaactcgaggacctgaagaacgtgttcccacctgaggtggccgtgttcgagcctagcgaggccgagatcagccacacccagaaagccaccctcgtgtgcctggctaccggcttctaccccgaccatgtggaactgtcttggtgggtcaacggcaaagaggtgcacagcggcgtgtctaccgacccccagccactgaaagaacagcccgccctgaacgacagccggtactgcctgagcagcagactgagagtgtccgccaccttctggcagaacccccggaaccacttcagatgccaggtgcagttctacggcctgagcgagaacgacgagtggacccaggacagagccaagcccgtgacccagatcgtgtctgccgaagcctggggcagagccgattgcggctttaccagcgagagctaccagcagggcgtgctgagcgccaccatcctgtacgagatcctgctgggcaaggccaccctgtacgccgtgctggtgtctgccctggtgctgatggctatggtcaagcggaaggacagccggggaagggccaagcgatctggatctggagcaacaaacttctcactactcaaacaagcaggtgacgtggaggagaatcccgggcctactagtatggactggatttggcgcatccttttccttgtcggcgctgctaccggcgcgcattccttcgaacaggttcagctgcaagagtctggccccggactggtcaagcctagccaaacactgagcctgacctgtaccgtgtccggctacagcatcaccagcgactacacctggaactggatcagacagcctcctggcaacggactggaatggatcggctacatcacctacagcggcagcaccagctacaaccccagcctgaaaagccgggtgctgatctccgtggacaccagcaagaatcaggtgtccctgaagctgagcagcgtgacagccgctgataccgccgtgtactactgtgccagactggggagaagatacacaatggactactggggccagggcaccaccgtgacagtttcttctacgcgtatccagaaccctgatcctgccgtgtaccagctgcgggatagcaagagcagcgacaagagcgtgtgtctgttcaccgacttcgacagccagaccaacgtgtcccagagcaaggactccgacgtgtacatcaccgataagaccgtgctggacatgcggagcatggacttcaagagcaactccgccgtggcctggtccaacaagtccgatttcgcctgcgccaacgccttcaacaacagcattatccccgaggacacattcttcccaagccccgagagcagctgcgacgtgaagctggtggaaaagagcttcgagacagacaccaacctgaacttccagaacctgagcgtgatcggcttcagaatcctgctgctgaaagtggccggctttaacctgctgatgaccctgcggctgtggtccagc

SEQ ID NO: 38580 - DNA, 1878 bp, synthetic construct
  source 1..1878: mol_type = other DNA
atggccttaccagtgaccgccttgctcctgccgctggccttgctgctccacgccgccaggccggacgtggtcatgacacagagcccttctagcctgtctgccagcgtgggcgacagagtgaccatcacctgtatggcctccgaggacatctacatccggctggcctggtatcagcagaagcctggaaacgcccctaagctgctgatctacgccgccacctctctggaaacaggcgtgccaagcagattttccggcagcggctctggcaccgatttcaccctgacaatatccagcctccagcctgaggacttcgccacctactactgccagcagtattggagcagcccctggacatttggcggaggcaccaaggtggaaatcaaactcgaggacaagcagctggacgccgacgtgtcccccaagcctaccatcttcctgccctctatcgccgagacaaagctccagaaggccggcacctacctgtgcctgctggaaaagttcttcccagatgtgattaagatccactggcaggaaaagaagtccaacaccatcctgggcagccaggaaggcaacaccatgaagaccaacgacacctacatgaagttcagctggctgaccgtgcccgagaagtccctggacaaagaacacagatgcatcgtgcggcacgaaaacaacaagaacggcgtggaccaggaaatcatcttcccacccatcaagaccgatgtgattacaatggaccccaaggacaactgctccaaggacgccaacgataccctgctgctccagctgaccaacaccagcgcctactacatgtacttgttgctgctgctgaagtccgtggtgtacttcgccatcatcacatgctgcctgctgcggagaaccgccttctgctgcaacggcgagaagtctagggccaagcgatctggatctggagcaacaaacttctcactactcaaacaagcaggtgacgtggaggagaatcccgggcctactagtatggactggatttggcgcatccttttccttgtcggcgctgctaccggcgcgcattccttcgaacaggttcagctgcaagagtctggccccggactggtcaagcctagccaaacactgagcctgacctgtaccgtgtccggctacagcatcaccagcgactacacctggaactggatcagacagcctcctggcaacggactggaatggatcggctacatcacctacagcggcagcaccagctacaaccccagcctgaaaagccgggtgctgatctccgtggacaccagcaagaatcaggtgtccctgaagctgagcagcgtgacagccgctgataccgccgtgtactactgtgccagactggggagaagatacacaatggactactggggccagggcaccaccgtgacagtttcttctacgcgtagccagcctcacaccaagcccagcgtgttcgtgatgaagaacggcaccaacgtggcctgcctcgtgaaagagttctaccccaaggacatcaggatcaacctggtgtccagcaagaagatcaccgagttcgaccccgccatcgtgatctcccccagcggcaagtacaacgccgtgaagctggggaagtacgaggacagcaacagcgtgacctgctccgtgcagcacgacaacaagaccgtgcacagcaccgactttgaagtgaaaaccgactccaccgaccacgtgaagcccaaagagacagagaacaccaagcagcccagcaagagctgccacaagcccaaggccatcgtgcacaccgagaaagtgaacatgatgagcctgaccgtgctgggcctgcggatgctgttcgccaaaaccgtggccgtgaacttcctgctgaccgccaagctgttcttcctc

SEQ ID NO: 38581 - DNA, 1878 bp, synthetic construct
  source 1..1878: mol_type = other DNA
atggccttaccagtgaccgccttgctcctgccgctggccttgctgctccacgccgccaggccggacgtggtcatgacacagagcccttctagcctgtctgccagcgtgggcgacagagtgaccatcacctgtatggcctccgaggacatctacatccggctggcctggtatcagcagaagcctggaaacgcccctaagctgctgatctacgccgccacctctctggaaacaggcgtgccaagcagattttccggcagcggctctggcaccgatttcaccctgacaatatccagcctccagcctgaggacttcgccacctactactgccagcagtattggagcagcccctggacatttggcggaggcaccaaggtggaaatcaaactcgagagccagcctcacaccaagcccagcgtgttcgtgatgaagaacggcaccaacgtggcctgcctcgtgaaagagttctaccccaaggacatcaggatcaacctggtgtccagcaagaagatcaccgagttcgaccccgccatcgtgatctcccccagcggcaagtacaacgccgtgaagctggggaagtacgaggacagcaacagcgtgacctgctccgtgcagcacgacaacaagaccgtgcacagcaccgactttgaagtgaaaaccgactccaccgaccacgtgaagcccaaagagacagagaacaccaagcagcccagcaagagctgccacaagcccaaggccatcgtgcacaccgagaaagtgaacatgatgagcctgaccgtgctgggcctgcggatgctgttcgccaaaaccgtggccgtgaacttcctgctgaccgccaagctgttcttcctcagggccaagcgatctggatctggagcaacaaacttctcactactcaaacaagcaggtgacgtggaggagaatcccgggcctactagtatggactggatttggcgcatccttttccttgtcggcgctgctaccggcgcgcattccttcgaacaggttcagctgcaagagtctggccccggactggtcaagcctagccaaacactgagcctgacctgtaccgtgtccggctacagcatcaccagcgactacacctggaactggatcagacagcctcctggcaacggactggaatggatcggctacatcacctacagcggcagcaccagctacaaccccagcctgaaaagccgggtgctgatctccgtggacaccagcaagaatcaggtgtccctgaagctgagcagcgtgacagccgctgataccgccgtgtactactgtgccagactggggagaagatacacaatggactactggggccagggcaccaccgtgacagtttcttctacgcgtgacaagcagctggacgccgacgtgtcccccaagcctaccatcttcctgccctctatcgccgagacaaagctccagaaggccggcacctacctgtgcctgctggaaaagttcttcccagatgtgattaagatccactggcaggaaaagaagtccaacaccatcctgggcagccaggaaggcaacaccatgaagaccaacgacacctacatgaagttcagctggctgaccgtgcccgagaagtccctggacaaagaacacagatgcatcgtgcggcacgaaaacaacaagaacggcgtggaccaggaaatcatcttcccacccatcaagaccgatgtgattacaatggaccccaaggacaactgctccaaggacgccaacgataccctgctgctccagctgaccaacaccagcgcctactacatgtacttgttgctgctgctgaagtccgtggtgtacttcgccatcatcacatgctgcctgctgcggagaaccgccttctgctgcaacggcgagaagtct

SEQ ID NO: 38582 - DNA, 1923 bp, synthetic construct
  source 1..1923: mol_type = other DNA
atggccttaccagtgaccgccttgctcctgccgctggccttgctgctccacgccgccaggccgctcgaggacaagcagctggacgccgacgtgtcccccaagcctaccatcttcctgccctctatcgccgagacaaagctccagaaggccggcacctacctgtgcctgctggaaaagttcttcccagatgtgattaagatccactggcaggaaaagaagtccaacaccatcctgggcagccaggaaggcaacaccatgaagaccaacgacacctacatgaagttcagctggctgaccgtgcccgagaagtccctggacaaagaacacagatgcatcgtgcggcacgaaaacaacaagaacggcgtggaccaggaaatcatcttcccacccatcaagaccgatgtgattacaatggaccccaaggacaactgctccaaggacgccaacgataccctgctgctccagctgaccaacaccagcgcctactacatgtacttgttgctgctgctgaagtccgtggtgtacttcgccatcatcacatgctgcctgctgcggagaaccgccttctgctgcaacggcgagaagtctagggccaagcgatctggatctggagcaacaaacttctcactactcaaacaagcaggtgacgtggaggagaatcccgggcctactagcatggccttaccagtgaccgccttgctcctgccgctggccttgctgctccacgccgccaggccggacgtggtcatgacacagagcccttctagcctgtctgccagcgtgggcgacagagtgaccatcacctgtatggcctccgaggacatctacatccggctggcctggtatcagcagaagcctggaaacgcccctaagctgctgatctacgccgccacctctctggaaacaggcgtgccaagcagattttccggcagcggctctggcaccgatttcaccctgacaatatccagcctccagcctgaggacttcgccacctactactgccagcagtattggagcagcccctggacatttggcggaggcaccaaggtggaaatcaaaggcggaggcggaagtggaggcggaggatctggcggcggaggctctcaggttcagctgcaagagtctggccccggactggtcaagcctagccaaacactgagcctgacctgtaccgtgtccggctacagcatcaccagcgactacacctggaactggatcagacagcctcctggcaacggactggaatggatcggctacatcacctacagcggcagcaccagctacaaccccagcctgaaaagccgggtgctgatctccgtggacaccagcaagaatcaggtgtccctgaagctgagcagcgtgacagccgctgataccgccgtgtactactgtgccagactggggagaagatacacaatggactactggggccagggcaccaccgtgacagtttcttctacgcgtagccagcctcacaccaagcccagcgtgttcgtgatgaagaacggcaccaacgtggcctgcctcgtgaaagagttctaccccaaggacatcaggatcaacctggtgtccagcaagaagatcaccgagttcgaccccgccatcgtgatctcccccagcggcaagtacaacgccgtgaagctggggaagtacgaggacagcaacagcgtgacctgctccgtgcagcacgacaacaagaccgtgcacagcaccgactttgaagtgaaaaccgactccaccgaccacgtgaagcccaaagagacagagaacaccaagcagcccagcaagagctgccacaagcccaaggccatcgtgcacaccgagaaagtgaacatgatgagcctgaccgtgctgggcctgcggatgctgttcgccaaaaccgtggccgtgaacttcctgctgaccgccaagctgttcttcctc

SEQ ID NO: 38583 - DNA, 2385 bp, synthetic construct
  source 1..2385: mol_type = other DNA
atggccttaccagtgaccgccttgctcctgccgctggccttgctgctccacgccgccaggccggacgtggtcatgacacagagcccttctagcctgtctgccagcgtgggcgacagagtgaccatcacctgtatggcctccgaggacatctacatccggctggcctggtatcagcagaagcctggaaacgcccctaagctgctgatctacgccgccacctctctggaaacaggcgtgccaagcagattttccggcagcggctctggcaccgatttcaccctgacaatatccagcctccagcctgaggacttcgccacctactactgccagcagtattggagcagcccctggacatttggcggaggcaccaaggtggaaatcaaaggacagcctaaggccaatcctaccgtgacactgttccctccaagcagcgaagaactccaggccaacaaggccacacttgtgtgcctgatctccgacttctaccctggggctgtgacagtggcttggaaggccgatggatctcctgtgaaagccggcgtggaaaccaccaagccatccaagcagagcaacaacaaatacgccgccagctcctacctgagcctgacacctgagcagtggaagtcccacagatcctacagctgccaagtgacccacgaaggcagcaccgtggaaaagacagtggcccctacagagtgcagcggatcccagagcttcggcctgctggaccccaagctgtgctacctgctggatggcatcctgttcatctacggcgtgatcctgaccgccctgttcctgagagtgaagttcagcagaagcgccgacgcccctgcctaccagcagggacagaaccaactgtacaacgagctgaacctgggcagacgggaagagtacgacgtgctggacaagcggagaggcagggaccctgagatgggcggaaagccccagcggagaaagaacccccaggaaggactgtataacgaactccagaaagacaagatggccgaagcctacagcgagatcggcatgaagggcgagcggagaagaggcaagggccacgatggcctgtaccagggcctgagcaccgccaccaaggacacctatgacgccctgcacatgcaggccctgcctccaagaagggccaagcgatctggatctggagcaacaaacttctcactactcaaacaagcaggtgacgtggaggagaatcccgggcctactagtatggactggatttggcgcatccttttccttgtcggcgctgctaccggcgcgcattccttcgaacaggttcagctgcaagagtctggccccggactggtcaagcctagccaaacactgagcctgacctgtaccgtgtccggctacagcatcaccagcgactacacctggaactggatcagacagcctcctggcaacggactggaatggatcggctacatcacctacagcggcagcaccagctacaaccccagcctgaaaagccgggtgctgatctccgtggacaccagcaagaatcaggtgtccctgaagctgagcagcgtgacagccgctgataccgccgtgtactactgtgccagactggggagaagatacacaatggactactggggccagggcaccaccgtgacagtttcttctgcctctacaaagggaccctccgtgtttcctctggctcccagcagcaagtctacaagcggaggaacagccgctctgggctgcctggtcaaggattactttcccgagcctgtgaccgtgtcctggaatagcggagcactgacaagcggcgtgcacacctttccagccgtgctgcaaagcagcggcctgtactctctgagcagcgtggtcacagtgcctagctctagcctgggcacccagacctacatctgcaatgtgaaccacaagcctagcaacaccaaggtggacaagagagtggaacccaagagctgtggtacccagagttttgggttgttggaccctaaattgtgctatctgttggacggaatcctgttcatttacggagtgatcctgaccgcattgttcctgcgggttaagttttccagatccgcagacgcacccgcttaccaacaagggcagaaccaactctacaatgaacttaatttggggcggagggaagagtacgacgttctggacaaaaggaggggacgagatcccgagatgggcggaaagcctcagcgaaggaagaatccgcaagaggggctttataacgaactccagaaagataaaatggcagaagcctatagtgagattgggatgaagggagaaaggaggaggggtaaaggtcacgatgggttgtaccaaggattgagcacagccactaaagatacctatgatgcgctccacatgcaggccctgccgccaaga

SEQ ID NO: 38584 - DNA, 2442 bp, synthetic construct
  source 1..2442: mol_type = other DNA
atggccttaccagtgaccgccttgctcctgccgctggccttgctgctccacgccgccaggccggacgtggtcatgacacagagcccttctagcctgtctgccagcgtgggcgacagagtgaccatcacctgtatggcctccgaggacatctacatccggctggcctggtatcagcagaagcctggaaacgcccctaagctgctgatctacgccgccacctctctggaaacaggcgtgccaagcagattttccggcagcggctctggcaccgatttcaccctgacaatatccagcctccagcctgaggacttcgccacctactactgccagcagtattggagcagcccctggacatttggcggaggcaccaaggtggaaatcaaactcgaggacctgaagaacgtgttcccacctgaggtggccgtgttcgagcctagcgaggccgagatcagccacacccagaaagccaccctcgtgtgcctggctaccggcttctaccccgaccatgtggaactgtcttggtgggtcaacggcaaagaggtgcacagcggcgtgtctaccgacccccagccactgaaagaacagcccgccctgaacgacagccggtactgcctgagcagcagactgagagtgtccgccaccttctggcagaacccccggaaccacttcagatgccaggtgcagttctacggcctgagcgagaacgacgagtggacccaggacagagccaagcccgtgacccagatcgtgtctgccgaagcctggggcagagccgattgcggatcccagagcttcggcctgctggaccccaagctgtgctacctgctggatggcatcctgttcatctacggcgtgatcctgaccgccctgttcctgagagtgaagttcagcagaagcgccgacgcccctgcctaccagcagggacagaaccaactgtacaacgagctgaacctgggcagacgggaagagtacgacgtgctggacaagcggagaggcagggaccctgagatgggcggaaagccccagcggagaaagaacccccaggaaggactgtataacgaactccagaaagacaagatggccgaagcctacagcgagatcggcatgaagggcgagcggagaagaggcaagggccacgatggcctgtaccagggcctgagcaccgccaccaaggacacctatgacgccctgcacatgcaggccctgcctccaagaagggccaagcgatctggatctggagcaacaaacttctcactactcaaacaagcaggtgacgtggaggagaatcccgggcctactagtatggactggatttggcgcatccttttccttgtcggcgctgctaccggcgcgcattccttcgaacaggttcagctgcaagagtctggccccggactggtcaagcctagccaaacactgagcctgacctgtaccgtgtccggctacagcatcaccagcgactacacctggaactggatcagacagcctcctggcaacggactggaatggatcggctacatcacctacagcggcagcaccagctacaaccccagcctgaaaagccgggtgctgatctccgtggacaccagcaagaatcaggtgtccctgaagctgagcagcgtgacagccgctgataccgccgtgtactactgtgccagactggggagaagatacacaatggactactggggccagggcaccaccgtgacagtttcttctacgcgtatccagaaccctgatcctgccgtgtaccagctgcgggatagcaagagcagcgacaagagcgtgtgtctgttcaccgacttcgacagccagaccaacgtgtcccagagcaaggactccgacgtgtacatcaccgataagaccgtgctggacatgcggagcatggacttcaagagcaactccgccgtggcctggtccaacaagtccgatttcgcctgcgccaacgccttcaacaacagcattatccccgaggacacattcttcccaagccccgagagcagctgcggtacccagagttttgggttgttggaccctaaattgtgctatctgttggacggaatcctgttcatttacggagtgatcctgaccgcattgttcctgcgggttaagttttccagatccgcagacgcacccgcttaccaacaagggcagaaccaactctacaatgaacttaatttggggcggagggaagagtacgacgttctggacaaaaggaggggacgagatcccgagatgggcggaaagcctcagcgaaggaagaatccgcaagaggggctttataacgaactccagaaagataaaatggcagaagcctatagtgagattgggatgaagggagaaaggaggaggggtaaaggtcacgatgggttgtaccaaggattgagcacagccactaaagatacctatgatgcgctccacatgcaggccctgccgccaaga

SEQ ID NO: 38585 - DNA, 2568 bp, synthetic construct
  source 1..2568: mol_type = other DNA
atggccttaccagtgaccgccttgctcctgccgctggccttgctgctccacgccgccaggccggacgtggtcatgacacagagcccttctagcctgtctgccagcgtgggcgacagagtgaccatcacctgtatggcctccgaggacatctacatccggctggcctggtatcagcagaagcctggaaacgcccctaagctgctgatctacgccgccacctctctggaaacaggcgtgccaagcagattttccggcagcggctctggcaccgatttcaccctgacaatatccagcctccagcctgaggacttcgccacctactactgccagcagtattggagcagcccctggacatttggcggaggcaccaaggtggaaatcaaactcgaggaggacctgaagaacgtgttcccacctgaggtggccgtgttcgagcctagcgaggccgagatcagccacacccagaaagccaccctcgtgtgcctggctaccggcttctaccccgaccatgtggaactgtcttggtgggtcaacggcaaagaggtgcacagcggcgtgtctaccgacccccagccactgaaagaacagcccgccctgaacgacagccggtactgcctgagcagcagactgagagtgtccgccaccttctggcagaacccccggaaccacttcagatgccaggtgcagttctacggcctgagcgagaacgacgagtggacccaggacagagccaagcccgtgacccagatcgtgtctgccgaagcctggggcagagccgattgcggatcccagagcttcggcctgctggaccccaagctgtgctacctgctggatggcatcctgttcatctacggcgtgatcctgaccgccctgttcctgagagtgaagttcagcagaagcgccgacgcccctgcctaccagcagggacagaaccaactgtacaacgagctgaacctgggcagacgggaagagtacgacgtgctggacaagcggagaggcagggaccctgagatgggcggaaagccccagcggagaaagaacccccaggaaggactgtataacgaactccagaaagacaagatggccgaagcctacagcgagatcggcatgaagggcgagcggagaagaggcaagggccacgatggcctgtaccagggcctgagcaccgccaccaaggacacctatgacgccctgcacatgcaggccctgcctccaagaagggccaagcgatctggatctggagcaacaaacttctcactactcaaacaagcaggtgacgtggaggagaatcccgggcctactagtatggactggatttggcgcatccttttccttgtcggcgctgctaccggcgcgcattccttcgaacaggttcagctgcaagagtctggccccggactggtcaagcctagccaaacactgagcctgacctgtaccgtgtccggctacagcatcaccagcgactacacctggaactggatcagacagcctcctggcaacggactggaatggatcggctacatcacctacagcggcagcaccagctacaaccccagcctgaaaagccgggtgctgatctccgtggacaccagcaagaatcaggtgtccctgaagctgagcagcgtgacagccgctgataccgccgtgtactactgtgccagactggggagaagatacacaatggactactggggccagggcaccaccgtgacagtttcttctacgcgtatccagaaccctgatcctgccgtgtaccagctgcgggatagcaagagcagcgacaagagcgtgtgtctgttcaccgacttcgacagccagaccaacgtgtcccagagcaaggactccgacgtgtacatcaccgataagaccgtgctggacatgcggagcatggacttcaagagcaactccgccgtggcctggtccaacaagtccgatttcgcctgcgccaacgccttcaacaacagcattatccccgaggacacattcttcccaagccccgagagcagctgcggtacccagagttttgggttgttggaccctaaattgtgctatctgttggacggaatcctgttcatttacggagtgatcctgaccgcattgttcctgaggagcaagcggtcacggctgctccacagcgattacatgaatatgacaccacgaagaccgggtcctactcgcaaacactaccaaccctacgcacctccccgcgactttgcagcgtaccgatctcgggttaagttttccagatccgcagacgcacccgcttaccaacaagggcagaaccaactctacaatgaacttaatttggggcggagggaagagtacgacgttctggacaaaaggaggggacgagatcccgagatgggcggaaagcctcagcgaaggaagaatccgcaagaggggctttataacgaactccagaaagataaaatggcagaagcctatagtgagattgggatgaagggagaaaggaggaggggtaaaggtcacgatgggttgtaccaaggattgagcacagccactaaagatacctatgatgcgctccacatgcaggccctgccgccaaga

SEQ ID NO: 38586 - DNA, 2697 bp, synthetic construct
  source 1..2697: mol_type = other DNA
atggccttaccagtgaccgccttgctcctgccgctggccttgctgctccacgccgccaggccggacgtggtcatgacacagagcccttctagcctgtctgccagcgtgggcgacagagtgaccatcacctgtatggcctccgaggacatctacatccggctggcctggtatcagcagaagcctggaaacgcccctaagctgctgatctacgccgccacctctctggaaacaggcgtgccaagcagattttccggcagcggctctggcaccgatttcaccctgacaatatccagcctccagcctgaggacttcgccacctactactgccagcagtattggagcagcccctggacatttggcggaggcaccaaggtggaaatcaaactcgaggaggacctgaagaacgtgttcccacctgaggtggccgtgttcgagcctagcgaggccgagatcagccacacccagaaagccaccctcgtgtgcctggctaccggcttctaccccgaccatgtggaactgtcttggtgggtcaacggcaaagaggtgcacagcggcgtgtctaccgacccccagccactgaaagaacagcccgccctgaacgacagccggtactgcctgagcagcagactgagagtgtccgccaccttctggcagaacccccggaaccacttcagatgccaggtgcagttctacggcctgagcgagaacgacgagtggacccaggacagagccaagcccgtgacccagatcgtgtctgccgaagcctggggcagagccgattgcggatcccagagcttcggcctgctggaccccaagctgtgctacctgctggatggcatcctgttcatctacggcgtgatcctgaccgccctgttcctgaaacggggcagaaagaaactcctgtatatattcaaacaaccatttatgagaccagtacaaactactcaagaggaagatggctgtagctgccgatttccagaagaagaagaaggaggatgtgaactgagagtgaagttcagcagaagcgccgacgcccctgcctaccagcagggacagaaccaactgtacaacgagctgaacctgggcagacgggaagagtacgacgtgctggacaagcggagaggcagggaccctgagatgggcggaaagccccagcggagaaagaacccccaggaaggactgtataacgaactccagaaagacaagatggccgaagcctacagcgagatcggcatgaagggcgagcggagaagaggcaagggccacgatggcctgtaccagggcctgagcaccgccaccaaggacacctatgacgccctgcacatgcaggccctgcctccaagaagggccaagcgatctggatctggagcaacaaacttctcactactcaaacaagcaggtgacgtggaggagaatcccgggcctactagtatggactggatttggcgcatccttttccttgtcggcgctgctaccggcgcgcattccttcgaacaggttcagctgcaagagtctggccccggactggtcaagcctagccaaacactgagcctgacctgtaccgtgtccggctacagcatcaccagcgactacacctggaactggatcagacagcctcctggcaacggactggaatggatcggctacatcacctacagcggcagcaccagctacaaccccagcctgaaaagccgggtgctgatctccgtggacaccagcaagaatcaggtgtccctgaagctgagcagcgtgacagccgctgataccgccgtgtactactgtgccagactggggagaagatacacaatggactactggggccagggcaccaccgtgacagtttcttctacgcgtatccagaaccctgatcctgccgtgtaccagctgcgggatagcaagagcagcgacaagagcgtgtgtctgttcaccgacttcgacagccagaccaacgtgtcccagagcaaggactccgacgtgtacatcaccgataagaccgtgctggacatgcggagcatggacttcaagagcaactccgccgtggcctggtccaacaagtccgatttcgcctgcgccaacgccttcaacaacagcattatccccgaggacacattcttcccaagccccgagagcagctgcggtacccagagttttgggttgttggaccctaaattgtgctatctgttggacggaatcctgttcatttacggagtgatcctgaccgcattgttcctgaagagaggccggaagaagctgctgtacatcttcaagcagcctttcatgcggcccgtgcagaccacccaggaagaggacggctgctcctgccggttccccgaggaagaagaaggcggctgcgagctgcgggttaagttttccagatccgcagacgcacccgcttaccaacaagggcagaaccaactctacaatgaacttaatttggggcggagggaagagtacgacgttctggacaaaaggaggggacgagatcccgagatgggcggaaagcctcagcgaaggaagaatccgcaagaggggctttataacgaactccagaaagataaaatggcagaagcctatagtgagattgggatgaagggagaaaggaggaggggtaaaggtcacgatgggttgtaccaaggattgagcacagccactaaagatacctatgatgcgctccacatgcaggccctgccgccaaga

SEQ ID NO: 38587 - DNA, 1758 bp, synthetic construct
  source 1..1758: mol_type = other DNA
atggccttaccagtgaccgccttgctcctgccgctggccttgctgctccacgccgccaggccggacgtggtcatgacacagagcccttctagcctgtctgccagcgtgggcgacagagtgaccatcacctgtatggcctccgaggacatctacatccggctggcctggtatcagcagaagcctggaaacgcccctaagctgctgatctacgccgccacctctctggaaacaggcgtgccaagcagattttccggcagcggctctggcaccgatttcaccctgacaatatccagcctccagcctgaggacttcgccacctactactgccagcagtattggagcagcccctggacatttggcggaggcaccaaggtggaaatcaaactcgagcagagcttcggcctgctggaccccaagctgtgctacctgctggatggcatcctgttcatctacggcgtgatcctgaccgccctgttcctgagagtgaagttcagcagaagcgccgacgcccctgcctaccagcagggacagaaccaactgtacaacgagctgaacctgggcagacgggaagagtacgacgtgctggacaagcggagaggcagggaccctgagatgggcggaaagccccagcggagaaagaacccccaggaaggactgtataacgaactccagaaagacaagatggccgaagcctacagcgagatcggcatgaagggcgagcggagaagaggcaagggccacgatggcctgtaccagggcctgagcaccgccaccaaggacacctatgacgccctgcacatgcaggccctgcctccaagaagggccaagcgatctggatctggagcaacaaacttctcactactcaaacaagcaggtgacgtggaggagaatcccgggcctactagtatggactggatttggcgcatccttttccttgtcggcgctgctaccggcgcgcattccttcgaacaggttcagctgcaagagtctggccccggactggtcaagcctagccaaacactgagcctgacctgtaccgtgtccggctacagcatcaccagcgactacacctggaactggatcagacagcctcctggcaacggactggaatggatcggctacatcacctacagcggcagcaccagctacaaccccagcctgaaaagccgggtgctgatctccgtggacaccagcaagaatcaggtgtccctgaagctgagcagcgtgacagccgctgataccgccgtgtactactgtgccagactggggagaagatacacaatggactactggggccagggcaccaccgtgacagtttcttctacgcgtcagagttttgggttgttggaccctaaattgtgctatctgttggacggaatcctgttcatttacggagtgatcctgaccgcattgttcctgcgggttaagttttccagatccgcagacgcacccgcttaccaacaagggcagaaccaactctacaatgaacttaatttggggcggagggaagagtacgacgttctggacaaaaggaggggacgagatcccgagatgggcggaaagcctcagcgaaggaagaatccgcaagaggggctttataacgaactccagaaagataaaatggcagaagcctatagtgagattgggatgaagggagaaaggaggaggggtaaaggtcacgatgggttgtaccaaggattgagcacagccactaaagatacctatgatgcgctccacatgcaggccctgccgccaaga

SEQ ID NO: 38588 - DNA, 1932 bp, synthetic construct
  source 1..1932: mol_type = other DNA
atggccttaccagtgaccgccttgctcctgccgctggccttgctgctccacgccgccaggccggacgtggtcatgacacagagcccttctagcctgtctgccagcgtgggcgacagagtgaccatcacctgtatggcctccgaggacatctacatccggctggcctggtatcagcagaagcctggaaacgcccctaagctgctgatctacgccgccacctctctggaaacaggcgtgccaagcagattttccggcagcggctctggcaccgatttcaccctgacaatatccagcctccagcctgaggacttcgccacctactactgccagcagtattggagcagcccctggacatttggcggaggcaccaaggtggaaatcaaactcgagggacagcctaaggccaatcctaccgtgacactgttccctccaagcagcgaagaactccaggccaacaaggccacacttgtgtgcctgatctccgacttctaccctggggctgtgacagtggcttggaaggccgatggatctcctgtgaaagccggcgtggaaaccaccaagccatccaagcagagcaacaacaaatacgccgccagctcctacctgagcctgacacctgagcagtggaagtcccacagatcctacagctgccaagtgacccacgaaggcagcaccgtggaaaagacagtggcccctacagagtgcagccccatcaagaccgatgtgattacaatggaccccaaggacaactgctccaaggacgccaacgataccctgctgctccagctgaccaacaccagcgcctactacatgtacttgttgctgctgctgaagtccgtggtgtacttcgccatcatcacatgctgcctgctgcggagaaccgccttctgctgcaacggcgagaagtctagggccaagcgatctggatctggagcaacaaacttctcactactcaaacaagcaggtgacgtggaggagaatcccgggcctactagtatggactggatttggcgcatccttttccttgtcggcgctgctaccggcgcgcattccttcgaacaggttcagctgcaagagtctggccccggactggtcaagcctagccaaacactgagcctgacctgtaccgtgtccggctacagcatcaccagcgactacacctggaactggatcagacagcctcctggcaacggactggaatggatcggctacatcacctacagcggcagcaccagctacaaccccagcctgaaaagccgggtgctgatctccgtggacaccagcaagaatcaggtgtccctgaagctgagcagcgtgacagccgctgataccgccgtgtactactgtgccagactggggagaagatacacaatggactactggggccagggcaccaccgtgacagtttcttctacgcgtgcctctacaaagggaccctccgtgtttcctctggctcccagcagcaagtctacaagcggaggaacagccgctctgggctgcctggtcaaggattactttcccgagcctgtgaccgtgtcctggaatagcggagcactgacaagcggcgtgcacacctttccagccgtgctgcaaagcagcggcctgtactctctgagcagcgtggtcacagtgcctagctctagcctgggcacccagacctacatctgcaatgtgaaccacaagcctagcaacaccaaggtggacaagagagtggaacccaagagctgtgaagtgaaaaccgactccaccgaccacgtgaagcccaaagagacagagaacaccaagcagcccagcaagagctgccacaagcccaaggccatcgtgcacaccgagaaagtgaacatgatgagcctgaccgtgctgggcctgcggatgctgttcgccaaaaccgtggccgtgaacttcctgctgaccgccaagctgttcttcctc

SEQ ID NO: 38589 - DNA, 1866 bp, synthetic construct
  source 1..1866: mol_type = other DNA
atggccttaccagtgaccgccttgctcctgccgctggccttgctgctccacgccgccaggccggacgtggtcatgacacagagcccttctagcctgtctgccagcgtgggcgacagagtgaccatcacctgtatggcctccgaggacatctacatccggctggcctggtatcagcagaagcctggaaacgcccctaagctgctgatctacgccgccacctctctggaaacaggcgtgccaagcagattttccggcagcggctctggcaccgatttcaccctgacaatatccagcctccagcctgaggacttcgccacctactactgccagcagtattggagcagcccctggacatttggcggaggcaccaaggtggaaatcaaactcgagggacagcctaaggccaatcctaccgtgacactgttccctccaagcagcgaagaactccaggccaacaaggccacacttgtgtgcctgatctccgacttctaccctggggctgtgacagtggcttggaaggccgatggatctcctgtgaaagccggcgtggaaaccaccaagccatccaagcagagcaacaacaaatacgccgccagctcctacctgagcctgacacctgagcagtggaagtcccacagatcctacagctgccaagtgacccacgaaggcagcaccgtggaaaagacagtggcccctacagagtgcagcggcagagccgattgcggcatcaccagcgccagctaccaccagggcgtgctgagcgccaccatcctgtacgagatcctgctgggcaaggccaccctgtacgccgtgctggtgtctgccctggtgctgatggctatggtcaagcggaaggacagccggggaagggccaagcgatctggatctggagcaacaaacttctcactactcaaacaagcaggtgacgtggaggagaatcccgggcctactagtatggactggatttggcgcatccttttccttgtcggcgctgctaccggcgcgcattccttcgaacaggttcagctgcaagagtctggccccggactggtcaagcctagccaaacactgagcctgacctgtaccgtgtccggctacagcatcaccagcgactacacctggaactggatcagacagcctcctggcaacggactggaatggatcggctacatcacctacagcggcagcaccagctacaaccccagcctgaaaagccgggtgctgatctccgtggacaccagcaagaatcaggtgtccctgaagctgagcagcgtgacagccgctgataccgccgtgtactactgtgccagactggggagaagatacacaatggactactggggccagggcaccaccgtgacagtttcttctacgcgtgcctctacaaagggaccctccgtgtttcctctggctcccagcagcaagtctacaagcggaggaacagccgctctgggctgcctggtcaaggattactttcccgagcctgtgaccgtgtcctggaatagcggagcactgacaagcggcgtgcacacctttccagccgtgctgcaaagcagcggcctgtactctctgagcagcgtggtcacagtgcctagctctagcctgggcacccagacctacatctgcaatgtgaaccacaagcctagcaacaccaaggtggacaagagagtggaacccaagagctgtatccccgaggacacattcttcccaagcagcgacgtgccctgcgacgtgaagctggtggaaaagagcttcgagacagacaccaacctgaacttccagaacctgagcgtgatcggcttcagaatcctgctgctgaaagtggccggctttaacctgctgatgaccctgcggctgtggtccagc

SEQ ID NO: 38590 - DNA, 1866 bp, synthetic construct
  source 1..1866: mol_type = other DNA
atggccttaccagtgaccgccttgctcctgccgctggccttgctgctccacgccgccaggccggacgtggtcatgacacagagcccttctagcctgtctgccagcgtgggcgacagagtgaccatcacctgtatggcctccgaggacatctacatccggctggcctggtatcagcagaagcctggaaacgcccctaagctgctgatctacgccgccacctctctggaaacaggcgtgccaagcagattttccggcagcggctctggcaccgatttcaccctgacaatatccagcctccagcctgaggacttcgccacctactactgccagcagtattggagcagcccctggacatttggcggaggcaccaaggtggaaatcaaactcgagggacagcctaaggccaatcctaccgtgacactgttccctccaagcagcgaagaactccaggccaacaaggccacacttgtgtgcctgatctccgacttctaccctggggctgtgacagtggcttggaaggccgatggatctcctgtgaaagccggcgtggaaaccaccaagccatccaagcagagcaacaacaaatacgccgccagctcctacctgagcctgacacctgagcagtggaagtcccacagatcctacagctgccaagtgacccacgaaggcagcaccgtggaaaagacagtggcccctacagagtgcagcggcagagccgattgcggctttaccagcgagagctaccagcagggcgtgctgagcgccaccatcctgtacgagatcctgctgggcaaggccaccctgtacgccgtgctggtgtctgccctggtgctgatggctatggtcaagcggaaggacagccggggaagggccaagcgatctggatctggagcaacaaacttctcactactcaaacaagcaggtgacgtggaggagaatcccgggcctactagtatggactggatttggcgcatccttttccttgtcggcgctgctaccggcgcgcattccttcgaacaggttcagctgcaagagtctggccccggactggtcaagcctagccaaacactgagcctgacctgtaccgtgtccggctacagcatcaccagcgactacacctggaactggatcagacagcctcctggcaacggactggaatggatcggctacatcacctacagcggcagcaccagctacaaccccagcctgaaaagccgggtgctgatctccgtggacaccagcaagaatcaggtgtccctgaagctgagcagcgtgacagccgctgataccgccgtgtactactgtgccagactggggagaagatacacaatggactactggggccagggcaccaccgtgacagtttcttctacgcgtgcctctacaaagggaccctccgtgtttcctctggctcccagcagcaagtctacaagcggaggaacagccgctctgggctgcctggtcaaggattactttcccgagcctgtgaccgtgtcctggaatagcggagcactgacaagcggcgtgcacacctttccagccgtgctgcaaagcagcggcctgtactctctgagcagcgtggtcacagtgcctagctctagcctgggcacccagacctacatctgcaatgtgaaccacaagcctagcaacaccaaggtggacaagagagtggaacccaagagctgtatccccgaggacacattcttcccaagccccgagagcagctgcgacgtgaagctggtggaaaagagcttcgagacagacaccaacctgaacttccagaacctgagcgtgatcggcttcagaatcctgctgctgaaagtggccggctttaacctgctgatgaccctgcggctgtggtccagc

SEQ ID NO: 38591 - DNA, 1344 bp, synthetic construct
  source 1..1344: mol_type = other DNA
atggccttaccagtgaccgccttgctcctgccgctggccttgctgctccacgccgccaggccggacgtggtcatgacacagagcccttctagcctgtctgccagcgtgggcgacagagtgaccatcacctgtatggcctccgaggacatctacatccggctggcctggtatcagcagaagcctggaaacgcccctaagctgctgatctacgccgccacctctctggaaacaggcgtgccaagcagattttccggcagcggctctggcaccgatttcaccctgacaatatccagcctccagcctgaggacttcgccacctactactgccagcagtattggagcagcccctggacatttggcggaggcaccaaggtggaaatcaaaggcggaggcggaagtggaggcggaggatctggcggcggaggctctcaggttcagctgcaagagtctggccccggactggtcaagcctagccaaacactgagcctgacctgtaccgtgtccggctacagcatcaccagcgactacacctggaactggatcagacagcctcctggcaacggactggaatggatcggctacatcacctacagcggcagcaccagctacaaccccagcctgaaaagccgggtgctgatctccgtggacaccagcaagaatcaggtgtccctgaagctgagcagcgtgacagccgctgataccgccgtgtactactgtgccagactggggagaagatacacaatggactactggggccagggcaccaccgtgacagtttcttctacgcgtgacggtaacgaggagatgggaggaatcactcaaaccccttacaaagtctcaatttcaggaacaactgttatccttacatgtccccagtatcctggcagcgagatcctttggcagcataacgacaagaatatagggggagatgaagacgataagaatatcggatctgacgaggatcacttgagcctgaaagagttctccgagcttgaacaaagcggatattatgtgtgctatccgcgcgggtcaaagccggaagacgctaacttttacctttatctccgagccagagtgtgcgaaaattgcatggaaatggacgttatgtccgttgctacaatagttatcgtagatatatgcatcacgggtggactgcttctgctggtttattattggtccaagaatagaaaggccaaagctaaacccgtgaccagaggcgctggcgcaggcggaaggcaaaggggacaaaacaaagaacggccaccaccagtgccaaatccagattatgagcctattcggaaaggacagagggacctgtactctggcctgaatcagagaagaatc

SEQ ID NO: 38592 - DNA, 1239 bp, synthetic construct
  source 1..1239: mol_type = other DNA
atggccttaccagtgaccgccttgctcctgccgctggccttgctgctccacgccgccaggccggacgtggtcatgacacagagcccttctagcctgtctgccagcgtgggcgacagagtgaccatcacctgtatggcctccgaggacatctacatccggctggcctggtatcagcagaagcctggaaacgcccctaagctgctgatctacgccgccacctctctggaaacaggcgtgccaagcagattttccggcagcggctctggcaccgatttcaccctgacaatatccagcctccagcctgaggacttcgccacctactactgccagcagtattggagcagcccctggacatttggcggaggcaccaaggtggaaatcaaaggcggaggcggaagtggaggcggaggatctggcggcggaggctctcaggttcagctgcaagagtctggccccggactggtcaagcctagccaaacactgagcctgacctgtaccgtgtccggctacagcatcaccagcgactacacctggaactggatcagacagcctcctggcaacggactggaatggatcggctacatcacctacagcggcagcaccagctacaaccccagcctgaaaagccgggtgctgatctccgtggacaccagcaagaatcaggtgtccctgaagctgagcagcgtgacagccgctgataccgccgtgtactactgtgccagactggggagaagatacacaatggactactggggccagggcaccaccgtgacagtttcttctacgcgtttcaagatccccatcgaggaactggaagatcgggtgttcgtgaactgcaacacctctatcacctgggtggaaggcaccgtgggaacactgctgagcgacatcaccagactggacctcggcaagcggattctggaccctcggggcatctacagatgcaacggcaccgacatctacaaggacaaagaaagcaccgtgcaggtccactacagaatgtgccagtcctgcgtggaactggaccctgctacagtggccggcatcatcgtgaccgatgtgatcgctactctgctgctggctctgggagtgttctgcttcgccggacacgaaacaggcagactgtctggcgctgccgatacacaggccctgctgagaaacgaccaagtgtatcagcccctgcgcgacagagatgatgcccagtattctcacctcggcggcaactgggctagaaacaag

SEQ ID NO: 38593 - DNA, 1269 bp, synthetic construct
  source 1..1269: mol_type = other DNA
atggccttaccagtgaccgccttgctcctgccgctggccttgctgctccacgccgccaggccggacgtggtcatgacacagagcccttctagcctgtctgccagcgtgggcgacagagtgaccatcacctgtatggcctccgaggacatctacatccggctggcctggtatcagcagaagcctggaaacgcccctaagctgctgatctacgccgccacctctctggaaacaggcgtgccaagcagattttccggcagcggctctggcaccgatttcaccctgacaatatccagcctccagcctgaggacttcgccacctactactgccagcagtattggagcagcccctggacatttggcggaggcaccaaggtggaaatcaaaggcggaggcggaagtggaggcggaggatctggcggcggaggctctcaggttcagctgcaagagtctggccccggactggtcaagcctagccaaacactgagcctgacctgtaccgtgtccggctacagcatcaccagcgactacacctggaactggatcagacagcctcctggcaacggactggaatggatcggctacatcacctacagcggcagcaccagctacaaccccagcctgaaaagccgggtgctgatctccgtggacaccagcaagaatcaggtgtccctgaagctgagcagcgtgacagccgctgataccgccgtgtactactgtgccagactggggagaagatacacaatggactactggggccagggcaccaccgtgacagtttcttctacgcgtcagagcatcaagggcaaccacctggtcaaggtgtacgactaccaagaggacggcagcgtgctgctgacatgtgatgccgaggccaagaacatcacctggtttaaggacggcaagatgatcggcttcctgaccgaggacaagaagaagtggaacctgggcagcaacgctaaggaccccagaggcatgtatcagtgcaagggcagccagaacaagagcaagcccctccaggtgtactaccggatgtgccagaactgcatcgagctgaacgccgctaccatcagcggctttctgttcgccgagatcgtgtccatcttcgtgctggccgtgggcgtgtactttatcgctggacaggatggcgtgcggcagagcagagcttccgataagcaaaccctgctgcctaacgaccagctgtaccagcctctgaaggacagagaggacgaccagtacagccacctccagggcaatcagctgagaagaaac

SEQ ID NO: 38594 - DNA, 1218 bp, synthetic construct
  source 1..1218: mol_type = other DNA
atggccttaccagtgaccgccttgctcctgccgctggccttgctgctccacgccgccaggccggacgtggtcatgacacagagcccttctagcctgtctgccagcgtgggcgacagagtgaccatcacctgtatggcctccgaggacatctacatccggctggcctggtatcagcagaagcctggaaacgcccctaagctgctgatctacgccgccacctctctggaaacaggcgtgccaagcagattttccggcagcggctctggcaccgatttcaccctgacaatatccagcctccagcctgaggacttcgccacctactactgccagcagtattggagcagcccctggacatttggcggaggcaccaaggtggaaatcaaaggcggaggcggaagtggaggcggaggatctggcggcggaggctctcaggttcagctgcaagagtctggccccggactggtcaagcctagccaaacactgagcctgacctgtaccgtgtccggctacagcatcaccagcgactacacctggaactggatcagacagcctcctggcaacggactggaatggatcggctacatcacctacagcggcagcaccagctacaaccccagcctgaaaagccgggtgctgatctccgtggacaccagcaagaatcaggtgtccctgaagctgagcagcgtgacagccgctgataccgccgtgtactactgtgccagactggggagaagatacacaatggactactggggccagggcaccaccgtgacagtttcttctacgcgtcagagttttgggttgttggaccctaaattgtgctatctgttggacggaatcctgttcatttacggagtgatcctgaccgcattgttcctgcgggttaagttttccagatccgcagacgcacccgcttaccaacaagggcagaaccaactctacaatgaacttaatttggggcggagggaagagtacgacgttctggacaaaaggaggggacgagatcccgagatgggcggaaagcctcagcgaaggaagaatccgcaagaggggctttataacgaactccagaaagataaaatggcagaagcctatagtgagattgggatgaagggagaaaggaggaggggtaaaggtcacgatgggttgtaccaaggattgagcacagccactaaagatacctatgatgcgctccacatgcaggccctgccgccaaga

SEQ ID NO: 38595 - DNA, 1503 bp, synthetic construct
  source 1..1503: mol_type = other DNA
atggccttaccagtgaccgccttgctcctgccgctggccttgctgctccacgccgccaggccggacgtggtcatgacacagagcccttctagcctgtctgccagcgtgggcgacagagtgaccatcacctgtatggcctccgaggacatctacatccggctggcctggtatcagcagaagcctggaaacgcccctaagctgctgatctacgccgccacctctctggaaacaggcgtgccaagcagattttccggcagcggctctggcaccgatttcaccctgacaatatccagcctccagcctgaggacttcgccacctactactgccagcagtattggagcagcccctggacatttggcggaggcaccaaggtggaaatcaaaggcggaggcggaagtggaggcggaggatctggcggcggaggctctcaggttcagctgcaagagtctggccccggactggtcaagcctagccaaacactgagcctgacctgtaccgtgtccggctacagcatcaccagcgactacacctggaactggatcagacagcctcctggcaacggactggaatggatcggctacatcacctacagcggcagcaccagctacaaccccagcctgaaaagccgggtgctgatctccgtggacaccagcaagaatcaggtgtccctgaagctgagcagcgtgacagccgctgataccgccgtgtactactgtgccagactggggagaagatacacaatggactactggggccagggcaccaccgtgacagtttcttctacgcgtggaatgaggactgaggatcttcccaaagctgtcgtctttctcgaaccccaatggtatcgggtgctcgaaaaagactctgtgacactgaaatgccaaggggcctactctcccgaggacaactccacacagtggtttcataatgagtccctcatcagctctcaggccagctcttatttcattgatgccgctacagtggacgactccggcgagtatcggtgtcagaccaatctgtctacactgtctgaccccgtgcagcttgaggtccacattggatggttgctcttgcaagccccacgctgggttttcaaagaggaagatccaatccatctgcggtgccacagctggaaaaacaccgctctccacaaagtcacatacctgcaaaatggcaaaggacgcaaatacttccatcacaattccgatttttacattccgaaggctaccctgaaagacagcggcagctatttctgccggggactcgtcggctccaagaatgtgtcctccgaaaccgtgaatatcacgattacccaaggactggctgtgcctacaatctctagcttctttccgcctggataccaagtctccttctgtcttgtgatggtcctcctgtttgctgtggacacaggactgtacttttccgtgaaaacgaacatccgcagctccacacgcgattggaaagatcacaagtttaaatggcgcaaagatccccaggacaag

SEQ ID NO: 38596 - DNA, 1428 bp, synthetic construct; identical to SEQ ID NO: 1514
  source 1..1428: mol_type = other DNA

SEQ ID NO: 38597 - DNA, 1431 bp, synthetic construct; identical to SEQ ID NO: 1233
  source 1..1431: mol_type = other DNA

SEQ ID NO: 38598 - DNA, 2163 bp, synthetic construct
  source 1..2163: mol_type = other DNA
atggccttaccagtgaccgccttgctcctgccgctggccttgctgctccacgccgccaggccggacgtggtcatgacacagagcccttctagcctgtctgccagcgtgggcgacagagtgaccatcacctgtatggcctccgaggacatctacatccggctggcctggtatcagcagaagcctggaaacgcccctaagctgctgatctacgccgccacctctctggaaacaggcgtgccaagcagattttccggcagcggctctggcaccgatttcaccctgacaatatccagcctccagcctgaggacttcgccacctactactgccagcagtattggagcagcccctggacatttggcggaggcaccaaggtggaaatcaaactcgagggacagcctaaggccaatcctaccgtgacactgttccctccaagcagcgaagaactccaggccaacaaggccacacttgtgtgcctgatctccgacttctaccctggggctgtgacagtggcttggaaggccgatggatctcctgtgaaagccggcgtggaaaccaccaagccatccaagcagagcaacaacaaatacgccgccagctcctacctgagcctgacacctgagcagtggaagtcccacagatcctacagctgccaagtgacccacgaaggcagcaccgtggaaaagacagtggcccctacagagtgcagcggatcccagagcttcggcctgctggaccccaagctgtgctacctgctggatggcatcctgttcatctacggcgtgatcctgaccgccctgttcctgagagtgaagttcagcagaagcgccgacgcccctgcctaccagcagggacagaaccaactgtacaacgagctgaacctgggcagacgggaagagtacgacgtgctggacaagcggagaggcagggaccctgagatgggcggaaagccccagcggagaaagaacccccaggaaggactgtataacgaactccagaaagacaagatggccgaagcctacagcgagatcggcatgaagggcgagcggagaagaggcaagggccacgatggcctgtaccagggcctgagcaccgccaccaaggacacctatgacgccctgcacatgcaggccctgcctccaagaagggccaagcgatctggatctggagcaacaaacttctcactactcaaacaagcaggtgacgtggaggagaatcccgggcctactagtatggactggatttggcgcatccttttccttgtcggcgctgctaccggcgcgcattccttcgaacaggttcagctgcaagagtctggccccggactggtcaagcctagccaaacactgagcctgacctgtaccgtgtccggctacagcatcaccagcgactacacctggaactggatcagacagcctcctggcaacggactggaatggatcggctacatcacctacagcggcagcaccagctacaaccccagcctgaaaagccgggtgctgatctccgtggacaccagcaagaatcaggtgtccctgaagctgagcagcgtgacagccgctgataccgccgtgtactactgtgccagactggggagaagatacacaatggactactggggccagggcaccaccgtgacagtttcttctacgcgtgcctctacaaagggaccctccgtgtttcctctggctcccagcagcaagtctacaagcggaggaacagccgctctgggctgcctggtcaaggattactttcccgagcctgtgaccgtgtcctggaatagcggagcactgacaagcggcgtgcacacctttccagccgtgctgcaaagcagcggcctgtactctctgagcagcgtggtcacagtgcctagctctagcctgggcacccagacctacatctgcaatgtgaaccacaagcctagcaacaccaaggtggacaagagagtggaacccaagagctgtggtaccatcactcaaggtttggcagtgtcaaccatctcatcattctttccacctggctaccaagtgtccttctgcctggtcatggtgctgctgttcgccgtggataccggcctgtacttcagcgtcaagaccaacatccggtccagcaccagagactggaaggaccacaagttcaagtggcggaaggaccctcaggacaag

SEQ ID NO: 38599 - DNA, 2208 bp, synthetic construct
  source 1..2208: mol_type = other DNA
atggccttaccagtgaccgccttgctcctgccgctggccttgctgctccacgccgccaggccggacgtggtcatgacacagagcccttctagcctgtctgccagcgtgggcgacagagtgaccatcacctgtatggcctccgaggacatctacatccggctggcctggtatcagcagaagcctggaaacgcccctaagctgctgatctacgccgccacctctctggaaacaggcgtgccaagcagattttccggcagcggctctggcaccgatttcaccctgacaatatccagcctccagcctgaggacttcgccacctactactgccagcagtattggagcagcccctggacatttggcggaggcaccaaggtggaaatcaaactcgaggacctgaagaacgtgttcccacctgaggtggccgtgttcgagcctagcgaggccgagatcagccacacccagaaagccaccctcgtgtgcctggctaccggcttctaccccgaccatgtggaactgtcttggtgggtcaacggcaaagaggtgcacagcggcgtgtctaccgacccccagccactgaaagaacagcccgccctgaacgacagccggtactgcctgagcagcagactgagagtgtccgccaccttctggcagaacccccggaaccacttcagatgccaggtgcagttctacggcctgagcgagaacgacgagtggacccaggacagagccaagcccgtgacccagatcgtgtctgccgaagcctggggcagagccgattgcggatcccagagcttcggcctgctggaccccaagctgtgctacctgctggatggcatcctgttcatctacggcgtgatcctgaccgccctgttcctgagagtgaagttcagcagaagcgccgacgcccctgcctaccagcagggacagaaccaactgtacaacgagctgaacctgggcagacgggaagagtacgacgtgctggacaagcggagaggcagggaccctgagatgggcggaaagccccagcggagaaagaacccccaggaaggactgtataacgaactccagaaagacaagatggccgaagcctacagcgagatcggcatgaagggcgagcggagaagaggcaagggccacgatggcctgtaccagggcctgagcaccgccaccaaggacacctatgacgccctgcacatgcaggccctgcctccaagaagggccaagcgatctggatctggagcaacaaacttctcactactcaaacaagcaggtgacgtggaggagaatcccgggcctactagtatggactggatttggcgcatccttttccttgtcggcgctgctaccggcgcgcattccttcgaacaggttcagctgcaagagtctggccccggactggtcaagcctagccaaacactgagcctgacctgtaccgtgtccggctacagcatcaccagcgactacacctggaactggatcagacagcctcctggcaacggactggaatggatcggctacatcacctacagcggcagcaccagctacaaccccagcctgaaaagccgggtgctgatctccgtggacaccagcaagaatcaggtgtccctgaagctgagcagcgtgacagccgctgataccgccgtgtactactgtgccagactggggagaagatacacaatggactactggggccagggcaccaccgtgacagtttcttctacgcgtatccagaaccctgatcctgccgtgtaccagctgcgggatagcaagagcagcgacaagagcgtgtgtctgttcaccgacttcgacagccagaccaacgtgtcccagagcaaggactccgacgtgtacatcaccgataagaccgtgctggacatgcggagcatggacttcaagagcaactccgccgtggcctggtccaacaagtccgatttcgcctgcgccaacgccttcaacaacagcattatccccgaggacacattcttcccaagccccgagagcagctgcggtaccatcactcaaggtttggcagtgtcaaccatctcatcattctttccacctggctaccaagtgtccttctgcctggtcatggtgctgctgttcgccgtggataccggcctgtacttcagcgtcaagaccaacatccggtccagcaccagagactggaaggaccacaagttcaagtggcggaaggaccctcaggacaag

SEQ ID NO: 38600 - DNA, 2133 bp, synthetic construct
  source 1..2133: mol_type = other DNA
atggccttaccagtgaccgccttgctcctgccgctggccttgctgctccacgccgccaggccggacgtggtcatgacacagagcccttctagcctgtctgccagcgtgggcgacagagtgaccatcacctgtatggcctccgaggacatctacatccggctggcctggtatcagcagaagcctggaaacgcccctaagctgctgatctacgccgccacctctctggaaacaggcgtgccaagcagattttccggcagcggctctggcaccgatttcaccctgacaatatccagcctccagcctgaggacttcgccacctactactgccagcagtattggagcagcccctggacatttggcggaggcaccaaggtggaaatcaaactcgaggacctgaagaacgtgttcccacctgaggtggccgtgttcgagcctagcgaggccgagatcagccacacccagaaagccaccctcgtgtgcctggctaccggcttctaccccgaccatgtggaactgtcttggtgggtcaacggcaaagaggtgcacagcggcgtgtctaccgacccccagccactgaaagaacagcccgccctgaacgacagccggtactgcctgagcagcagactgagagtgtccgccaccttctggcagaacccccggaaccacttcagatgccaggtgcagttctacggcctgagcgagaacgacgagtggacccaggacagagccaagcccgtgacccagatcgtgtctgccgaagcctggggcagagccgattgcggatcccagagcttcggcctgctggaccccaagctgtgctacctgctggatggcatcctgttcatctacggcgtgatcctgaccgccctgttcctgagagtgaagttcagcagaagcgccgacgcccctgcctaccagcagggacagaaccaactgtacaacgagctgaacctgggcagacgggaagagtacgacgtgctggacaagcggagaggcagggaccctgagatgggcggaaagccccagcggagaaagaacccccaggaaggactgtataacgaactccagaaagacaagatggccgaagcctacagcgagatcggcatgaagggcgagcggagaagaggcaagggccacgatggcctgtaccagggcctgagcaccgccaccaaggacacctatgacgccctgcacatgcaggccctgcctccaagaagggccaagcgatctggatctggagcaacaaacttctcactactcaaacaagcaggtgacgtggaggagaatcccgggcctactagtatggactggatttggcgcatccttttccttgtcggcgctgctaccggcgcgcattccttcgaacaggttcagctgcaagagtctggccccggactggtcaagcctagccaaacactgagcctgacctgtaccgtgtccggctacagcatcaccagcgactacacctggaactggatcagacagcctcctggcaacggactggaatggatcggctacatcacctacagcggcagcaccagctacaaccccagcctgaaaagccgggtgctgatctccgtggacaccagcaagaatcaggtgtccctgaagctgagcagcgtgacagccgctgataccgccgtgtactactgtgccagactggggagaagatacacaatggactactggggccagggcaccaccgtgacagtttcttctacgcgtatccagaaccctgatcctgccgtgtaccagctgcgggatagcaagagcagcgacaagagcgtgtgtctgttcaccgacttcgacagccagaccaacgtgtcccagagcaaggactccgacgtgtacatcaccgataagaccgtgctggacatgcggagcatggacttcaagagcaactccgccgtggcctggtccaacaagtccgatttcgcctgcgccaacgccttcaacaacagcattatccccgaggacacattcttcccaagccccgagagcagctgcggtaccatcactcaaggtttggcagtgtcaaccatctcatcattctttccacctggctaccaagtgtccttctgcctggtcatggtgctgctgttcgccgtggataccggcctgtacttcagcgtc

SEQ ID NO: 38601 - DNA, 2136 bp, synthetic construct
  source 1..2136: mol_type = other DNA
atggccttaccagtgaccgccttgctcctgccgctggccttgctgctccacgccgccaggccggacgtggtcatgacacagagcccttctagcctgtctgccagcgtgggcgacagagtgaccatcacctgtatggcctccgaggacatctacatccggctggcctggtatcagcagaagcctggaaacgcccctaagctgctgatctacgccgccacctctctggaaacaggcgtgccaagcagattttccggcagcggctctggcaccgatttcaccctgacaatatccagcctccagcctgaggacttcgccacctactactgccagcagtattggagcagcccctggacatttggcggaggcaccaaggtggaaatcaaactcgaggacctgaagaacgtgttcccacctgaggtggccgtgttcgagcctagcgaggccgagatcagccacacccagaaagccaccctcgtgtgcctggctaccggcttctaccccgaccatgtggaactgtcttggtgggtcaacggcaaagaggtgcacagcggcgtgtctaccgacccccagccactgaaagaacagcccgccctgaacgacagccggtactgcctgagcagcagactgagagtgtccgccaccttctggcagaacccccggaaccacttcagatgccaggtgcagttctacggcctgagcgagaacgacgagtggacccaggacagagccaagcccgtgacccagatcgtgtctgccgaagcctggggcagagccgattgcggatcccagagcttcggcctgctggaccccaagctgtgctacctgctggatggcatcctgttcatctacggcgtgatcctgaccgccctgttcctgagagtgaagttcagcagaagcgccgacgcccctgcctaccagcagggacagaaccaactgtacaacgagctgaacctgggcagacgggaagagtacgacgtgctggacaagcggagaggcagggaccctgagatgggcggaaagccccagcggagaaagaacccccaggaaggactgtataacgaactccagaaagacaagatggccgaagcctacagcgagatcggcatgaagggcgagcggagaagaggcaagggccacgatggcctgtaccagggcctgagcaccgccaccaaggacacctatgacgccctgcacatgcaggccctgcctccaagaagggccaagcgatctggatctggagcaacaaacttctcactactcaaacaagcaggtgacgtggaggagaatcccgggcctactagtatggactggatttggcgcatccttttccttgtcggcgctgctaccggcgcgcattccttcgaacaggttcagctgcaagagtctggccccggactggtcaagcctagccaaacactgagcctgacctgtaccgtgtccggctacagcatcaccagcgactacacctggaactggatcagacagcctcctggcaacggactggaatggatcggctacatcacctacagcggcagcaccagctacaaccccagcctgaaaagccgggtgctgatctccgtggacaccagcaagaatcaggtgtccctgaagctgagcagcgtgacagccgctgataccgccgtgtactactgtgccagactggggagaagatacacaatggactactggggccagggcaccaccgtgacagtttcttctacgcgtatccagaaccctgatcctgccgtgtaccagctgcgggatagcaagagcagcgacaagagcgtgtgtctgttcaccgacttcgacagccagaccaacgtgtcccagagcaaggactccgacgtgtacatcaccgataagaccgtgctggacatgcggagcatggacttcaagagcaactccgccgtggcctggtccaacaagtccgatttcgcctgcgccaacgccttcaacaacagcattatccccgaggacacattcttcccaagccccgagagcagctgcggtaccatcactcaaggtttggcagtgtcaaccatctcatcattctttccacctggctaccaagtgtccttctgcctggtcatggtgctgctgttcgccgtggataccggcctgtacttcagcgtcaag

SEQ ID NO: 38602 - DNA, 2139 bp, synthetic construct
  source 1..2139: mol_type = other DNA
atggccttaccagtgaccgccttgctcctgccgctggccttgctgctccacgccgccaggccggacgtggtcatgacacagagcccttctagcctgtctgccagcgtgggcgacagagtgaccatcacctgtatggcctccgaggacatctacatccggctggcctggtatcagcagaagcctggaaacgcccctaagctgctgatctacgccgccacctctctggaaacaggcgtgccaagcagattttccggcagcggctctggcaccgatttcaccctgacaatatccagcctccagcctgaggacttcgccacctactactgccagcagtattggagcagcccctggacatttggcggaggcaccaaggtggaaatcaaactcgaggacctgaagaacgtgttcccacctgaggtggccgtgttcgagcctagcgaggccgagatcagccacacccagaaagccaccctcgtgtgcctggctaccggcttctaccccgaccatgtggaactgtcttggtgggtcaacggcaaagaggtgcacagcggcgtgtctaccgacccccagccactgaaagaacagcccgccctgaacgacagccggtactgcctgagcagcagactgagagtgtccgccaccttctggcagaacccccggaaccacttcagatgccaggtgcagttctacggcctgagcgagaacgacgagtggacccaggacagagccaagcccgtgacccagatcgtgtctgccgaagcctggggcagagccgattgcggatcccagagcttcggcctgctggaccccaagctgtgctacctgctggatggcatcctgttcatctacggcgtgatcctgaccgccctgttcctgagagtgaagttcagcagaagcgccgacgcccctgcctaccagcagggacagaaccaactgtacaacgagctgaacctgggcagacgggaagagtacgacgtgctggacaagcggagaggcagggaccctgagatgggcggaaagccccagcggagaaagaacccccaggaaggactgtataacgaactccagaaagacaagatggccgaagcctacagcgagatcggcatgaagggcgagcggagaagaggcaagggccacgatggcctgtaccagggcctgagcaccgccaccaaggacacctatgacgccctgcacatgcaggccctgcctccaagaagggccaagcgatctggatctggagcaacaaacttctcactactcaaacaagcaggtgacgtggaggagaatcccgggcctactagtatggactggatttggcgcatccttttccttgtcggcgctgctaccggcgcgcattccttcgaacaggttcagctgcaagagtctggccccggactggtcaagcctagccaaacactgagcctgacctgtaccgtgtccggctacagcatcaccagcgactacacctggaactggatcagacagcctcctggcaacggactggaatggatcggctacatcacctacagcggcagcaccagctacaaccccagcctgaaaagccgggtgctgatctccgtggacaccagcaagaatcaggtgtccctgaagctgagcagcgtgacagccgctgataccgccgtgtactactgtgccagactggggagaagatacacaatggactactggggccagggcaccaccgtgacagtttcttctacgcgtatccagaaccctgatcctgccgtgtaccagctgcgggatagcaagagcagcgacaagagcgtgtgtctgttcaccgacttcgacagccagaccaacgtgtcccagagcaaggactccgacgtgtacatcaccgataagaccgtgctggacatgcggagcatggacttcaagagcaactccgccgtggcctggtccaacaagtccgatttcgcctgcgccaacgccttcaacaacagcattatccccgaggacacattcttcccaagccccgagagcagctgcggtaccatcactcaaggtttggcagtgtcaaccatctcatcattctttccacctggctaccaagtgtccttctgcctggtcatggtgctgctgttcgccgtggataccggcctgtacttcagcgtcaagacc

SEQ ID NO: 38603 - DNA, 1950 bp, synthetic construct
  source 1..1950: mol_type = other DNA
atggccttaccagtgaccgccttgctcctgccgctggccttgctgctccacgccgccaggccggacgtggtcatgacacagagcccttctagcctgtctgccagcgtgggcgacagagtgaccatcacctgtatggcctccgaggacatctacatccggctggcctggtatcagcagaagcctggaaacgcccctaagctgctgatctacgccgccacctctctggaaacaggcgtgccaagcagattttccggcagcggctctggcaccgatttcaccctgacaatatccagcctccagcctgaggacttcgccacctactactgccagcagtattggagcagcccctggacatttggcggaggcaccaaggtggaaatcaaactcgagggacagcctaaggccaatcctaccgtgacactgttccctccaagcagcgaagaactccaggccaacaaggccacacttgtgtgcctgatctccgacttctaccctggggctgtgacagtggcttggaaggccgatggatctcctgtgaaagccggcgtggaaaccaccaagccatccaagcagagcaacaacaaatacgccgccagctcctacctgagcctgacacctgagcagtggaagtcccacagatcctacagctgccaagtgacccacgaaggcagcaccgtggaaaagacagtggcccctacagagtgcagcggatccctgggagagcctcagctgtgctatatcctggacgccatcctgtttctgtacggcatcgtgctgaccctgctgtactgccggctgaagatccaagtgcggaaggccgccatcaccagctacgagaaatccgacggcgtgtacaccggcctgagcaccagaaatcaagagacatacgagacactgaagcacgaaaagcctccacaaagggccaagcgatctggatctggagcaacaaacttctcactactcaaacaagcaggtgacgtggaggagaatcccgggcctactagtatggactggatttggcgcatccttttccttgtcggcgctgctaccggcgcgcattccttcgaacaggttcagctgcaagagtctggccccggactggtcaagcctagccaaacactgagcctgacctgtaccgtgtccggctacagcatcaccagcgactacacctggaactggatcagacagcctcctggcaacggactggaatggatcggctacatcacctacagcggcagcaccagctacaaccccagcctgaaaagccgggtgctgatctccgtggacaccagcaagaatcaggtgtccctgaagctgagcagcgtgacagccgctgataccgccgtgtactactgtgccagactggggagaagatacacaatggactactggggccagggcaccaccgtgacagtttcttctacgcgtgcctctacaaagggaccctccgtgtttcctctggctcccagcagcaagtctacaagcggaggaacagccgctctgggctgcctggtcaaggattactttcccgagcctgtgaccgtgtcctggaatagcggagcactgacaagcggcgtgcacacctttccagccgtgctgcaaagcagcggcctgtactctctgagcagcgtggtcacagtgcctagctctagcctgggcacccagacctacatctgcaatgtgaaccacaagcctagcaacaccaaggtggacaagagagtggaacccaagagctgtggtaccctcggagaaccacagctctgttacattctggatgctatcctgttcctctatgggatcgtcctgacactcctgtattgcagactcaaaattcaagttcgcaaagccgccattacctcttacgagaagagtgatggggtgtacacaggactgtctacccggaatcaagaaacctacgaaaccctcaaacatgagaagccacctcagtaa

SEQ ID NO: 38604 - DNA, 1857 bp, synthetic construct
  source 1..1857: mol_type = other DNA
atggccttaccagtgaccgccttgctcctgccgctggccttgctgctccacgccgccaggccggacgtggtcatgacacagagcccttctagcctgtctgccagcgtgggcgacagagtgaccatcacctgtatggcctccgaggacatctacatccggctggcctggtatcagcagaagcctggaaacgcccctaagctgctgatctacgccgccacctctctggaaacaggcgtgccaagcagattttccggcagcggctctggcaccgatttcaccctgacaatatccagcctccagcctgaggacttcgccacctactactgccagcagtattggagcagcccctggacatttggcggaggcaccaaggtggaaatcaaactcgaggacctgaagaacgtgttcccacctgaggtggccgtgttcgagcctagcgaggccgagatcagccacacccagaaagccaccctcgtgtgcctggctaccggcttctaccccgaccatgtggaactgtcttggtgggtcaacggcaaagaggtgcacagcggcgtgtgtaccgacccccagccactgaaagaacagcccgccctgaacgacagccggtactgcctgagcagcagactgagagtgtccgccaccttctggcagaacccccggaaccacttcagatgccaggtgcagttctacggcctgagcgagaacgacgagtggacccaggacagagccaagcccgtgacccagatcgtgtctgccgaagcctggggcagagccgattgcggctttaccagcgagagctaccagcagggcgtgctgagcgcctactacatgtacttgttgctgctgctgaagtccgtggtgtacttcgccatcatcacatgctgcctgctgcggagaaccgccttctgctgcaacggcgagaagtctagggccaagcgatctggatctggagcaacaaacttctcactactcaaacaagcaggtgacgtggaggagaatcccgggcctactagtatggactggatttggcgcatccttttccttgtcggcgctgctaccggcgcgcattccttcgaacaggttcagctgcaagagtctggccccggactggtcaagcctagccaaacactgagcctgacctgtaccgtgtccggctacagcatcaccagcgactacacctggaactggatcagacagcctcctggcaacggactggaatggatcggctacatcacctacagcggcagcaccagctacaaccccagcctgaaaagccgggtgctgatctccgtggacaccagcaagaatcaggtgtccctgaagctgagcagcgtgacagccgctgataccgccgtgtactactgtgccagactggggagaagatacacaatggactactggggccagggcaccaccgtgacagtttcttctacgcgtatccagaaccctgatcctgccgtgtaccagctgcgggatagcaagagcagcgacaagagcgtgtgtctgttcaccgacttcgacagccagaccaacgtgtcccagagcaaggactccgacgtgtacatcaccgataagtgcgtgctggacatgcggagcatggacttcaagagcaactccgccgtggcctggtccaacaagtccgatttcgcctgcgccaacgccttcaacaacagcattatccccgaggacacattcttcccaagccccgagagcagctgcgacgtgaagctggtggaaaagagcttcgagacagacaccaacctgaacttccagaacctgagcgtgatcggcttcagaatcctgctgctgaaagtggccggctttaacctgctgatgaccctgcggctgtggtccagc

SEQ ID NO: 38605 - DNA, 1878 bp, synthetic construct
  source 1..1878: mol_type = other DNA
atggccttaccagtgaccgccttgctcctgccgctggccttgctgctccacgccgccaggccggacgtggtcatgacacagagcccttctagcctgtctgccagcgtgggcgacagagtgaccatcacctgtatggcctccgaggacatctacatccggctggcctggtatcagcagaagcctggaaacgcccctaagctgctgatctacgccgccacctctctggaaacaggcgtgccaagcagattttccggcagcggctctggcaccgatttcaccctgacaatatccagcctccagcctgaggacttcgccacctactactgccagcagtattggagcagcccctggacatttggcggaggcaccaaggtggaaatcaaactcgaggacaagcagctggacgccgacgtgtcccccaagcctaccatcttcctgccctctatcgccgagacaaagctccagaaggccggcacctacctgtgcctgctggaaaagttcttcccagatgtgattaagatccactggcaggaaaagaagtccaacaccatcctgggcagccaggaaggcaacaccatgaagaccaacgacacctacatgaagttcagctggctgaccgtgcccgagaagtccctggacaaagaacacagatgcatcgtgcggcacgaaaacaacaagaacggcgtggaccaggaaatcatcttcccacccatcaagaccgatgtgattacaatggaccccaaggacaactgctccaaggacgccaacgataccctgctgctccagctgaccaacaccagcgcctactacatgtacgagatcctgctgggcaaggccaccctgtacgccgtgctggtgtctgccctggtgctgatggctatggtcaagcggaaggacagccggggaagggccaagcgatctggatctggagcaacaaacttctcactactcaaacaagcaggtgacgtggaggagaatcccgggcctactagtatggactggatttggcgcatccttttccttgtcggcgctgctaccggcgcgcattccttcgaacaggttcagctgcaagagtctggccccggactggtcaagcctagccaaacactgagcctgacctgtaccgtgtccggctacagcatcaccagcgactacacctggaactggatcagacagcctcctggcaacggactggaatggatcggctacatcacctacagcggcagcaccagctacaaccccagcctgaaaagccgggtgctgatctccgtggacaccagcaagaatcaggtgtccctgaagctgagcagcgtgacagccgctgataccgccgtgtactactgtgccagactggggagaagatacacaatggactactggggccagggcaccaccgtgacagtttcttctacgcgtagccagcctcacaccaagcccagcgtgttcgtgatgaagaacggcaccaacgtggcctgcctcgtgaaagagttctaccccaaggacatcaggatcaacctggtgtccagcaagaagatcaccgagttcgaccccgccatcgtgatctcccccagcggcaagtacaacgccgtgaagctggggaagtatgaggacagcaacagcgtgacctgctccgtgcagcacgacaacaagaccgtgcacagcaccgactttgaagtgaaaaccgactccaccgaccacgtgaagcccaaagagacagagaacaccaagcagcccagcaagagctgccacaagcccaaggccatcgtgcacaccgagaaagtgaacatgatgagcctgaccgtgatcggcttcagaatcctgctgctgaaagtggccggctttaacctgctgatgaccctgcggctgtggtccagctaa

SEQ ID NO: 38606 - DNA, 1878 bp, synthetic construct
  source 1..1878: mol_type = other DNA
atggccttaccagtgaccgccttgctcctgccgctggccttgctgctccacgccgccaggccggacgtggtcatgacacagagcccttctagcctgtctgccagcgtgggcgacagagtgaccatcacctgtatggcctccgaggacatctacatccggctggcctggtatcagcagaagcctggaaacgcccctaagctgctgatctacgccgccacctctctggaaacaggcgtgccaagcagattttccggcagcggctctggcaccgatttcaccctgacaatatccagcctccagcctgaggacttcgccacctactactgccagcagtattggagcagcccctggacatttggcggaggcaccaaggtggaaatcaaactcgaggacaagcagctggacgccgacgtgtcccccaagcctaccatcttcctgccctctatcgccgagacaaagctccagaaggccggcacctacctgtgcctgctggaaaagttcttcccagatgtgattaagatccactggcaggaaaagaagtccaacaccatcctgggcagccaggaaggcaacaccatgaagaccaacgacacctacatgaagttcagctggctgaccgtgcccgagaagtccctggacaaagaacacagatgcatcgtgcggcacgaaaacaacaagaacggcgtggaccaggaaatcatcttcccacccatcaagaccgatgtgattacaatggaccccaaggacaactgctccaaggacgccaacgataccctgctgctccagctgaccaacaccagcgccaccatcctgtacgagatcctgctgggcaaggccaccctgtacgccgtgctggtgtctgccctggtgctgatggctatggtcaagcggaaggacagccggggaagggccaagcgatctggatctggagcaacaaacttctcactactcaaacaagcaggtgacgtggaggagaatcccgggcctactagtatggactggatttggcgcatccttttccttgtcggcgctgctaccggcgcgcattccttcgaacaggttcagctgcaagagtctggccccggactggtcaagcctagccaaacactgagcctgacctgtaccgtgtccggctacagcatcaccagcgactacacctggaactggatcagacagcctcctggcaacggactggaatggatcggctacatcacctacagcggcagcaccagctacaaccccagcctgaaaagccgggtgctgatctccgtggacaccagcaagaatcaggtgtccctgaagctgagcagcgtgacagccgctgataccgccgtgtactactgtgccagactggggagaagatacacaatggactactggggccagggcaccaccgtgacagtttcttctacgcgtagccagcctcacaccaagcccagcgtgttcgtgatgaagaacggcaccaacgtggcctgcctcgtgaaagagttctaccccaaggacatcaggatcaacctggtgtccagcaagaagatcaccgagttcgaccccgccatcgtgatctcccccagcggcaagtacaacgccgtgaagctggggaagtatgaggacagcaacagcgtgacctgctccgtgcagcacgacaacaagaccgtgcacagcaccgactttgaagtgaaaaccgactccaccgaccacgtgaagcccaaagagacagagaacaccaagcagcccagcaagagctgccacaagcccaaggccatcgtgcacaccgagaaagtgaacatgatgagcctgaccgtgatcggcttcagaatcctgctgctgaaagtggccggctttaacctgctgatgaccctgcggctgtggtccagctaa

SEQ ID NO: 38607 - DNA, 1878 bp, synthetic construct
  source 1..1878: mol_type = other DNA
atggccttaccagtgaccgccttgctcctgccgctggccttgctgctccacgccgccaggccggacgtggtcatgacacagagcccttctagcctgtctgccagcgtgggcgacagagtgaccatcacctgtatggcctccgaggacatctacatccggctggcctggtatcagcagaagcctggaaacgcccctaagctgctgatctacgccgccacctctctggaaacaggcgtgccaagcagattttccggcagcggctctggcaccgatttcaccctgacaatatccagcctccagcctgaggacttcgccacctactactgccagcagtattggagcagcccctggacatttggcggaggcaccaaggtggaaatcaaactcgaggacaagcagctggacgccgacgtgtcccccaagcctaccatcttcctgccctctatcgccgagacaaagctccagaaggccggcacctacctgtgcctgctggaaaagttcttcccagatgtgattaagatccactggcaggaaaagaagtccaacaccatcctgggcagccaggaaggcaacaccatgaagaccaacgacacctacatgaagttcagctggctgaccgtgcccgagaagtccctggacaaagaacacagatgcatcgtgcggcacgaaaacaacaagaacggcgtggaccaggaaatcatcttcccacccatcaagaccgatgtgattacaatggaccccaaggacaactgctccaaggacgccaacgataccctgctgctccagctgaccaacaccagcgcctactacatgtacgagatcctgctgggcaaggccaccctgtacgccgtgctggtgtctgccctggtgctgatggctatggtcaagcggaaggacagccggggaagggccaagcgatctggatctggagcaacaaacttctcactactcaaacaagcaggtgacgtggaggagaatcccgggcctactagtatggactggatttggcgcatccttttccttgtcggcgctgctaccggcgcgcattccttcgaacaggttcagctgcaagagtctggccccggactggtcaagcctagccaaacactgagcctgacctgtaccgtgtccggctacagcatcaccagcgactacacctggaactggatcagacagcctcctggcaacggactggaatggatcggctacatcacctacagcggcagcaccagctacaaccccagcctgaaaagccgggtgctgatctccgtggacaccagcaagaatcaggtgtccctgaagctgagcagcgtgacagccgctgataccgccgtgtactactgtgccagactggggagaagatacacaatggactactggggccagggcaccaccgtgacagtttcttctacgcgtagccagcctcacaccaagcccagcgtgttcgtgatgaagaacggcaccaacgtggcctgcctcgtgaaagagttctaccccaaggacatcaggatcaacctggtgtccagcaagaagatcaccgagttcgaccccgccatcgtgatctcccccagcggcaagtacaacgccgtgaagctggggaagtacgaggacagcaacagcgtgacctgctccgtgcagcacgacaacaagaccgtgcacagcaccgactttgaagtgaaaaccgactccaccgaccacgtgaagcccaaagagacagagaacaccaagcagcccagcaagagctgccacaagcccaaggccatcgtgcacaccgagaaagtgaacatgatgagcctgaccgtgctgggcttcagaatcctgctgctgaaagtggccggctttaacctgctgatgaccctgcggctgtggtccagctaa

SEQ ID NO: 38608 - DNA, 1878 bp, synthetic construct
  source 1..1878: mol_type = other DNA
atggccttaccagtgaccgccttgctcctgccgctggccttgctgctccacgccgccaggccggacgtggtcatgacacagagcccttctagcctgtctgccagcgtgggcgacagagtgaccatcacctgtatggcctccgaggacatctacatccggctggcctggtatcagcagaagcctggaaacgcccctaagctgctgatctacgccgccacctctctggaaacaggcgtgccaagcagattttccggcagcggctctggcaccgatttcaccctgacaatatccagcctccagcctgaggacttcgccacctactactgccagcagtattggagcagcccctggacatttggcggaggcaccaaggtggaaatcaaactcgaggacaagcagctggacgccgacgtgtcccccaagcctaccatcttcctgccctctatcgccgagacaaagctccagaaggccggcacctacctgtgcctgctggaaaagttcttcccagatgtgattaagatccactggcaggaaaagaagtccaacaccatcctgggcagccaggaaggcaacaccatgaagaccaacgacacctacatgaagttcagctggctgaccgtgcccgagaagtccctggacaaagaacacagatgcatcgtgcggcacgaaaacaacaagaacggcgtggaccaggaaatcatcttcccacccatcaagaccgatgtgattacaatggaccccaaggacaactgctccaaggacgccaacgataccctgctgctccagctgaccaacaccagcgccaccatcctgtacgagatcctgctgggcaaggccaccctgtacgccgtgctggtgtctgccctggtgctgatggctatggtcaagcggaaggacagccggggaagggccaagcgatctggatctggagcaacaaacttctcactactcaaacaagcaggtgacgtggaggagaatcccgggcctactagtatggactggatttggcgcatccttttccttgtcggcgctgctaccggcgcgcattccttcgaacaggttcagctgcaagagtctggccccggactggtcaagcctagccaaacactgagcctgacctgtaccgtgtccggctacagcatcaccagcgactacacctggaactggatcagacagcctcctggcaacggactggaatggatcggctacatcacctacagcggcagcaccagctacaaccccagcctgaaaagccgggtgctgatctccgtggacaccagcaagaatcaggtgtccctgaagctgagcagcgtgacagccgctgataccgccgtgtactactgtgccagactggggagaagatacacaatggactactggggccagggcaccaccgtgacagtttcttctacgcgtagccagcctcacaccaagcccagcgtgttcgtgatgaagaacggcaccaacgtggcctgcctcgtgaaagagttctaccccaaggacatcaggatcaacctggtgtccagcaagaagatcaccgagttcgaccccgccatcgtgatctcccccagcggcaagtacaacgccgtgaagctggggaagtacgaggacagcaacagcgtgacctgctccgtgcagcacgacaacaagaccgtgcacagcaccgactttgaagtgaaaaccgactccaccgaccacgtgaagcccaaagagacagagaacaccaagcagcccagcaagagctgccacaagcccaaggccatcgtgcacaccgagaaagtgaacatgatgagcctgaccgtgctgggcttcagaatcctgctgctgaaagtggccggctttaacctgctgatgaccctgcggctgtggtccagctaa

SEQ ID NO: 38609 - DNA, 1860 bp, synthetic construct
  source 1..1860: mol_type = other DNA
atggccttaccagtgaccgccttgctcctgccgctggccttgctgctccacgccgccaggccggacgtggtcatgacacagagcccttctagcctgtctgccagcgtgggcgacagagtgaccatcacctgtatggcctccgaggacatctacatccggctggcctggtatcagcagaagcctggaaacgcccctaagctgctgatctacgccgccacctctctggaaacaggcgtgccaagcagattttccggcagcggctctggcaccgatttcaccctgacaatatccagcctccagcctgaggacttcgccacctactactgccagcagtattggagcagcccctggacatttggcggaggcaccaaggtggaaatcaaactcgaggacctgaagaacgtgttcccacctgaggtggccgtgttcgagcctagcgaggccgagatcagccacacccagaaagccaccctcgtgtgcctggctaccggcttctaccccgaccatgtggaactgtcttggtgggtcaacggcaaagaggtgcacagcggcgtgtgtaccgacccccagccactgaaagaacagcccgccctgaacgacagccggtactgcctgagcagcagactgagagtgtccgccaccttctggcagaacccccggaaccacttcagatgccaggtgcagttctacggcctgagcgagaacgacgagtggacccaggacagagccaagcccgtgacccagatcgtgtctgccgaagcctggggcagagccgattgcggctttaccagcgagagctaccagcagggcgtgctgagcgccaccatcctgtacttgttgctgctgctgaagtccgtggtgtacttcgccatcatcacatgctgcctgctgcggagaaccgccttctgctgcaacggcgagaagtctagggccaagcgatctggatctggagcaacaaacttctcactactcaaacaagcaggtgacgtggaggagaatcccgggcctactagtatggactggatttggcgcatccttttccttgtcggcgctgctaccggcgcgcattccttcgaacaggttcagctgcaagagtctggccccggactggtcaagcctagccaaacactgagcctgacctgtaccgtgtccggctacagcatcaccagcgactacacctggaactggatcagacagcctcctggcaacggactggaatggatcggctacatcacctacagcggcagcaccagctacaaccccagcctgaaaagccgggtgctgatctccgtggacaccagcaagaatcaggtgtccctgaagctgagcagcgtgacagccgctgataccgccgtgtactactgtgccagactggggagaagatacacaatggactactggggccagggcaccaccgtgacagtttcttctacgcgtatccagaaccctgatcctgccgtgtaccagctgcgggatagcaagagcagcgacaagagcgtgtgtctgttcaccgacttcgacagccagaccaacgtgtcccagagcaaggactccgacgtgtacatcaccgataagtgcgtgctggacatgcggagcatggacttcaagagcaactccgccgtggcctggtccaacaagtccgatttcgcctgcgccaacgccttcaacaacagcattatccccgaggacacattcttcccaagccccgagagcagctgcgacgtgaagctggtggaaaagagcttcgagacagacaccaacctgaacttccagaacctgagcgtgatcggcctgcggatgctgttcgccaaaaccgtggccgtgaacttcctgctgaccgccaagctgttcttcctctaa

SEQ ID NO: 38610 - DNA, 1947 bp, synthetic construct
  source 1..1947: mol_type = other DNA
atggccttaccagtgaccgccttgctcctgccgctggccttgctgctccacgccgccaggccggacgtggtcatgacacagagcccttctagcctgtctgccagcgtgggcgacagagtgaccatcacctgtatggcctccgaggacatctacatccggctggcctggtatcagcagaagcctggaaacgcccctaagctgctgatctacgccgccacctctctggaaacaggcgtgccaagcagattttccggcagcggctctggcaccgatttcaccctgacaatatccagcctccagcctgaggacttcgccacctactactgccagcagtattggagcagcccctggacatttggcggaggcaccaaggtggaaatcaaactcgaggacctgaagaacgtgttcccacctgaggtggccgtgttcgagcctagcgaggccgagatcagccacacccagaaagccaccctcgtgtgcctggctaccggcttctaccccgaccatgtggaactgtcttggtgggtcaacggcaaagaggtgcacagcggcgtgtctaccgacccccagccactgaaagaacagcccgccctgaacgacagccggtactgcctgagcagcagactgagagtgtccgccaccttctggcagaacccccggaaccacttcagatgccaggtgcagttctacggcctgagcgagaacgacgagtggacccaggacagagccaagcccgtgacccagatcgtgtctgccgaagcctggggcagagccgattgcggatcctccaaggacgccaacgataccctgctgctccagctgaccaacaccagcgcctactacatgtacttgttgctgctgctgaagtccgtggtgtacttcgccatcatcacatgctgcctgctgcggagaaccgccttctgctgcaacggcgagaagtctagggccaagcgatctggatctggagcaacaaacttctcactactcaaacaagcaggtgacgtggaggagaatcccgggcctactagtatggactggatttggcgcatccttttccttgtcggcgctgctaccggcgcgcattccttcgaacaggttcagctgcaagagtctggccccggactggtcaagcctagccaaacactgagcctgacctgtaccgtgtccggctacagcatcaccagcgactacacctggaactggatcagacagcctcctggcaacggactggaatggatcggctacatcacctacagcggcagcaccagctacaaccccagcctgaaaagccgggtgctgatctccgtggacaccagcaagaatcaggtgtccctgaagctgagcagcgtgacagccgctgataccgccgtgtactactgtgccagactggggagaagatacacaatggactactggggccagggcaccaccgtgacagtttcttctacgcgtatccagaaccctgatcctgccgtgtaccagctgcgggatagcaagagcagcgacaagagcgtgtgtctgttcaccgacttcgacagccagaccaacgtgtcccagagcaaggactccgacgtgtacatcaccgataagaccgtgctggacatgcggagcatggacttcaagagcaactccgccgtggcctggtccaacaagtccgatttcgcctgcgccaacgccttcaacaacagcattatccccgaggacacattcttcccaagccccgagagcagctgcggtaccgaagtgaaaaccgactccaccgaccacgtgaagcccaaagagacagagaacaccaagcagcccagcaagagctgccacaagcccaaggccatcgtgcacaccgagaaagtgaacatgatgagcctgaccgtgctgggcctgcggatgctgttcgccaaaaccgtggccgtgaacttcctgctgaccgccaagctgttcttcctctaa

SEQ ID NO: 38611 - DNA, 1857 bp, synthetic construct
  source 1..1857: mol_type = other DNA
atggccttaccagtgaccgccttgctcctgccgctggccttgctgctccacgccgccaggccggacgtggtcatgacacagagcccttctagcctgtctgccagcgtgggcgacagagtgaccatcacctgtatggcctccgaggacatctacatccggctggcctggtatcagcagaagcctggaaacgcccctaagctgctgatctacgccgccacctctctggaaacaggcgtgccaagcagattttccggcagcggctctggcaccgatttcaccctgacaatatccagcctccagcctgaggacttcgccacctactactgccagcagtattggagcagcccctggacatttggcggaggcaccaaggtggaaatcaaactcgaggacctgaagaacgtgttcccacctgaggtggccgtgttcgagcctagcgaggccgagatcagccacacccagaaagccaccctcgtgtgcctggctaccggcttctaccccgaccatgtggaactgtcttggtgggtcaacggcaaagaggtgcacagcggcgtgtgtaccgacccccagccactgaaagaacagcccgccctgaacgacagccggtactgcctgagcagcagactgagagtgtccgccaccttctggcagaacccccggaaccacttcagatgccaggtgcagttctacggcctgagcgagaacgacgagtggacccaggacagagccaagcccgtgacccagatcgtgtctgccgaagcctggggcagagccgattgcgacgtgaagctggtggaaaagagcttcgagacagacaccaacctgaacttccagaacctgagcgtgatcggcttcagaatcctgctgctgaaagtggccggctttaacctgctgatgaccctgcggctgtggtccagcagggccaagcgatctggatctggagcaacaaacttctcactactcaaacaagcaggtgacgtggaggagaatcccgggcctactagtatggactggatttggcgcatccttttccttgtcggcgctgctaccggcgcgcattccttcgaacaggttcagctgcaagagtctggccccggactggtcaagcctagccaaacactgagcctgacctgtaccgtgtccggctacagcatcaccagcgactacacctggaactggatcagacagcctcctggcaacggactggaatggatcggctacatcacctacagcggcagcaccagctacaaccccagcctgaaaagccgggtgctgatctccgtggacaccagcaagaatcaggtgtccctgaagctgagcagcgtgacagccgctgataccgccgtgtactactgtgccagactggggagaagatacacaatggactactggggccagggcaccaccgtgacagtttcttctacgcgtatccagaaccctgatcctgccgtgtaccagctgcgggatagcaagagcagcgacaagagcgtgtgtctgttcaccgacttcgacagccagaccaacgtgtcccagagcaaggactccgacgtgtacatcaccgataagtgcgtgctggacatgcggagcatggacttcaagagcaactccgccgtggcctggtccaacaagtccgatttcgcctgcgccaacgccttcaacaacagcattatccccgaggacacattcttcccaagccccgagagcagctgcggctttaccagcgagagctaccagcagggcgtgctgagcgccaccatcctgtacgagatcctgctgggcaaggccaccctgtacgccgtgctggtgtctgccctggtgctgatggctatggtcaagcggaaggacagccggggataa

SEQ ID NO: 38612 - DNA, 1857 bp, synthetic construct
  source 1..1857: mol_type = other DNA
atggccttaccagtgaccgccttgctcctgccgctggccttgctgctccacgccgccaggccggacgtggtcatgacacagagcccttctagcctgtctgccagcgtgggcgacagagtgaccatcacctgtatggcctccgaggacatctacatccggctggcctggtatcagcagaagcctggaaacgcccctaagctgctgatctacgccgccacctctctggaaacaggcgtgccaagcagattttccggcagcggctctggcaccgatttcaccctgacaatatccagcctccagcctgaggacttcgccacctactactgccagcagtattggagcagcccctggacatttggcggaggcaccaaggtggaaatcaaactcgaggacctgaagaacgtgttcccacctgaggtggccgtgttcgagcctagcgaggccgagatcagccacacccagaaagccaccctcgtgtgcctggctaccggcttctaccccgaccatgtggaactgtcttggtgggtcaacggcaaagaggtgcacagcggcgtgtgtaccgacccccagccactgaaagaacagcccgccctgaacgacagccggtactgcctgagcagcagactgagagtgtccgccaccttctggcagaacccccggaaccacttcagatgccaggtgcagttctacggcctgagcgagaacgacgagtggacccaggacagagccaagcccgtgacccagatcgtgtctgccgaagcctggggcagagccgattgcggctttaccagcgagagctaccagcagggcgtgctgagcgccaccaacctgagcgtgatcggcttcagaatcctgctgctgaaagtggccggctttaacctgctgatgaccctgcggctgtggtccagcagggccaagcgatctggatctggagcaacaaacttctcactactcaaacaagcaggtgacgtggaggagaatcccgggcctactagtatggactggatttggcgcatccttttccttgtcggcgctgctaccggcgcgcattccttcgaacaggttcagctgcaagagtctggccccggactggtcaagcctagccaaacactgagcctgacctgtaccgtgtccggctacagcatcaccagcgactacacctggaactggatcagacagcctcctggcaacggactggaatggatcggctacatcacctacagcggcagcaccagctacaaccccagcctgaaaagccgggtgctgatctccgtggacaccagcaagaatcaggtgtccctgaagctgagcagcgtgacagccgctgataccgccgtgtactactgtgccagactggggagaagatacacaatggactactggggccagggcaccaccgtgacagtttcttctacgcgtatccagaaccctgatcctgccgtgtaccagctgcgggatagcaagagcagcgacaagagcgtgtgtctgttcaccgacttcgacagccagaccaacgtgtcccagagcaaggactccgacgtgtacatcaccgataagtgcgtgctggacatgcggagcatggacttcaagagcaactccgccgtggcctggtccaacaagtccgatttcgcctgcgccaacgccttcaacaacagcattatccccgaggacacattcttcccaagccccgagagcagctgcgacgtgaagctggtggaaaagagcttcgagacagacaccaacctgaacttccagatcctgtacgagatcctgctgggcaaggccaccctgtacgccgtgctggtgtctgccctggtgctgatggctatggtcaagcggaaggacagccggggataa

SEQ ID NO: 38613 - DNA, 1857 bp, synthetic construct; identical to SEQ ID NO: 38611
  source 1..1857: mol_type = other DNA

SEQ ID NO: 38614 - DNA, 1857 bp, synthetic construct; identical to SEQ ID NO: 38612
  source 1..1857: mol_type = other DNA

SEQ ID NO: 38615 - DNA, 1854 bp, synthetic construct; identical to SEQ ID NO: 4075
  source 1..1854: mol_type = other DNA

SEQ ID NO: 38616 - DNA, 1866 bp, synthetic construct
  source 1..1866: mol_type = other DNA
atggccttaccagtgaccgccttgctcctgccgctggccttgctgctccacgccgccaggccggacgtggtcatgacacagagcccttctagcctgtctgccagcgtgggcgacagagtgaccatcacctgtatggcctccgaggacatctacatccggctggcctggtatcagcagaagcctggaaacgcccctaagctgctgatctacgccgccacctctctggaaacaggcgtgccaagcagattttccggcagcggctctggcaccgatttcaccctgacaatatccagcctccagcctgaggacttcgccacctactactgccagcagtattggagcagcccctggacatttggcggaggcaccaaggtggaaatcaaactcgaggccgacgtgtcccccaagcctaccatcttcctgccctctatcgccgagacaaagctccagaaggccggcacctacctgtgcctgctggaaaagttcttcccagatgtgattaagatccactggcaggaaaagaagtccaacaccatcctgggcagccaggaaggcaacaccatgaagaccaacgacacctacatgaagttcagctggctgaccgtgcccgagaagtccctggacaaagaacacagatgcatcgtgcggcacgaaaacaacaagaacggcgtggaccaggaaatcatcttcccacccatcaagaccgatgtgattacaatggaccccaaggacaactgctccaaggacgccaacgataccctgctgctccagctgaccaacaccagcgcctactacatgtacttgttgctgctgctgaagtccgtggtgtacttcgccatcatcacatgctgcctgctgcggagaaccgccttctgctgcaacggcgagaagtctagggccaagcgatctggatctggagcaacaaacttctcactactcaaacaagcaggtgacgtggaggagaatcccgggcctactagtatggactggatttggcgcatccttttccttgtcggcgctgctaccggcgcgcattccttcgaacaggttcagctgcaagagtctggccccggactggtcaagcctagccaaacactgagcctgacctgtaccgtgtccggctacagcatcaccagcgactacacctggaactggatcagacagcctcctggcaacggactggaatggatcggctacatcacctacagcggcagcaccagctacaaccccagcctgaaaagccgggtgctgatctccgtggacaccagcaagaatcaggtgtccctgaagctgagcagcgtgacagccgctgataccgccgtgtactactgtgccagactggggagaagatacacaatggactactggggccagggcaccaccgtgacagtttcttctacgcgtagccagcctcacaccaagcccagcgtgttcgtgatgaagaacggcaccaacgtggcctgcctcgtgaaagagttctaccccaaggacatcaggatcaacctggtgtccagcaagaagatcaccgagttcgaccccgccatcgtgatctcccccagcggcaagtacaacgccgtgaagctggggaagtatgaggacagcaacagcgtgacctgctccgtgcagcacgacaacaagaccgtgcacagcaccgactttgaagtgaaaaccgactccaccgaccacgtgaagcccaaagagacagagaacaccaagcagcccagcaagagctgccacaagcccaaggccatcgtgcacaccgagaaagtgaacatgatgagcctgaccgtgatcggcttcagaatcctgctgctgaaagtggccggctttaacctgctgatgaccctgcggctgtggtccagctaa

SEQ ID NO: 38617 - DNA, 1866 bp, synthetic construct
  source 1..1866: mol_type = other DNA
atggccttaccagtgaccgccttgctcctgccgctggccttgctgctccacgccgccaggccggacgtggtcatgacacagagcccttctagcctgtctgccagcgtgggcgacagagtgaccatcacctgtatggcctccgaggacatctacatccggctggcctggtatcagcagaagcctggaaacgcccctaagctgctgatctacgccgccacctctctggaaacaggcgtgccaagcagattttccggcagcggctctggcaccgatttcaccctgacaatatccagcctccagcctgaggacttcgccacctactactgccagcagtattggagcagcccctggacatttggcggaggcaccaaggtggaaatcaaactcgaggccgacgtgtcccccaagcctaccatcttcctgccctctatcgccgagacaaagctccagaaggccggcacctacctgtgcctgctggaaaagttcttcccagatgtgattaagatccactggcaggaaaagaagtccaacaccatcctgggcagccaggaaggcaacaccatgaagaccaacgacacctacatgaagttcagctggctgaccgtgcccgagaagtccctggacaaagaacacagatgcatcgtgcggcacgaaaacaacaagaacggcgtggaccaggaaatcatcttcccacccatcaagaccgatgtgattacaatggaccccaaggacaactgctccaaggacgccaacgataccctgctgctccagctgaccaacaccagcgcctactacatgtacttgttgctgctgctgaagtccgtggtgtacttcgccatcatcacatgctgcctgctgcggagaaccgccttctgctgcaacggcgagaagtctagggccaagcgatctggatctggagcaacaaacttctcactactcaaacaagcaggtgacgtggaggagaatcccgggcctactagtatggactggatttggcgcatccttttccttgtcggcgctgctaccggcgcgcattccttcgaacaggttcagctgcaagagtctggccccggactggtcaagcctagccaaacactgagcctgacctgtaccgtgtccggctacagcatcaccagcgactacacctggaactggatcagacagcctcctggcaacggactggaatggatcggctacatcacctacagcggcagcaccagctacaaccccagcctgaaaagccgggtgctgatctccgtggacaccagcaagaatcaggtgtccctgaagctgagcagcgtgacagccgctgataccgccgtgtactactgtgccagactggggagaagatacacaatggactactggggccagggcaccaccgtgacagtttcttctacgcgtagccagcctcacaccaagcccagcgtgttcgtgatgaagaacggcaccaacgtggcctgcctcgtgaaagagttctaccccaaggacatcaggatcaacctggtgtccagcaagaagatcaccgagttcgaccccgccatcgtgatctcccccagcggcaagtacaacgccgtgaagctggggaagtacgaggacagcaacagcgtgacctgctccgtgcagcacgacaacaagaccgtgcacagcaccgactttgaagtgaaaaccgactccaccgaccacgtgaagcccaaagagacagagaacaccaagcagcccagcaagagctgccacaagcccaaggccatcgtgcacaccgagaaagtgaacatgatgagcctgaccgtgctgggcttcagaatcctgctgctgaaagtggccggctttaacctgctgatgaccctgcggctgtggtccagctaa

SEQ ID NO: 38618 - DNA, 1854 bp, synthetic construct; identical to SEQ ID NO: 4075
  source 1..1854: mol_type = other DNA

SEQ ID NO: 38619 - DNA, 1866 bp, synthetic construct; identical to SEQ ID NO: 4240
  source 1..1866: mol_type = other DNA

SEQ ID NO: 38620 - DNA, 2259 bp, synthetic construct; identical to SEQ ID NO: 4405
  source 1..2259: mol_type = other DNA

SEQ ID NO: 38621 - DNA, 2271 bp, synthetic construct; identical to SEQ ID NO: 4570
  source 1..2271: mol_type = other DNA

SEQ ID NO: 38622 - DNA, 2670 bp, synthetic construct; identical to SEQ ID NO: 4735
  source 1..2670: mol_type = other DNA

SEQ ID NO: 38623 - DNA, 2682 bp, synthetic construct; identical to SEQ ID NO: 4900
  source 1..2682: mol_type = other DNA

SEQ ID NO: 38624 - DNA, 2064 bp, synthetic construct
  source 1..2064: mol_type = other DNA
atggccttaccagtgaccgccttgctcctgccgctggccttgctgctccacgccgccaggccggacgtggtcatgacacagagcccttctagcctgtctgccagcgtgggcgacagagtgaccatcacctgtatggcctccgaggacatctacatccggctggcctggtatcagcagaagcctggaaacgcccctaagctgctgatctacgccgccacctctctggaaacaggcgtgccaagcagattttccggcagcggctctggcaccgatttcaccctgacaatatccagcctccagcctgaggacttcgccacctactactgccagcagtattggagcagcccctggacatttggcggaggcaccaaggtggaaatcaaactcgaggacctgaagaacgtgttcccacctgaggtggccgtgttcgagcctagcgaggccgagatcagccacacccagaaagccaccctcgtgtgcctggctaccggcttctaccccgaccatgtggaactgtcttggtgggtcaacggcaaagaggtgcacagcggcgtgtgtaccgacccccagccactgaaagaacagcccgccctgaacgacagccggtactgcctgagcagcagactgagagtgtccgccaccttctggcagaacccccggaaccacttcagatgccaggtgcagttctacggcctgagcgagaacgacgagtggacccaggacagagccaagcccgtgacccagatcgtgtctgccgaagcctggggcagagccgattgcgacgtgaagctggtggaaaagagcttcgagacagacaccaacctgaacttccagaacctgagcgtgatcggcttcagaatcctgctgctgaaagtggccggctttaacctgctgatgaccctgcggctgtggtccagcagggccaagcgatctggatctggagcaacaaacttctcactactcaaacaagcaggtgacgtggaggagaatcccgggcctactagtatggactggatttggcgcatccttttccttgtcggcgctgctaccggcgcccattccgggcccatggaccccgacctggaaatcagagccgccttcctgcggcagagaaacacagccctgagaacagaggtggccgagctggaacaagaggtgcagcggctggaaaacgaggtgtcccagtacgagacaagatacggccctctcggaggcggaaaaggatccggcggcggaggatctggcggaggcggatctgggggcggaggctctttcgaacaggttcagctgcaagagtctggccccggactggtcaagcctagccaaacactgagcctgacctgtaccgtgtccggctacagcatcaccagcgactacacctggaactggatcagacagcctcctggcaacggactggaatggatcggctacatcacctacagcggcagcaccagctacaaccccagcctgaaaagccgggtgctgatctccgtggacaccagcaagaatcaggtgtccctgaagctgagcagcgtgacagccgctgataccgccgtgtactactgtgccagactggggagaagatacacaatggactactggggccagggcaccaccgtgacagtttcttctacgcgtatccagaaccctgatcctgccgtgtaccagctgcgggatagcaagagcagcgacaagagcgtgtgtctgttcaccgacttcgacagccagaccaacgtgtcccagagcaaggactccgacgtgtacatcaccgataagtgcgtgctggacatgcggagcatggacttcaagagcaactccgccgtggcctggtccaacaagtccgatttcgcctgcgccaacgccttcaacaacagcattatccccgaggacacattcttcccaagccccgagagcagctgcggctttaccagcgagagctaccagcagggcgtgctgagcgccaccatcctgtacgagatcctgctgggcaaggccaccctgtacgccgtgctggtgtctgccctggtgctgatggctatggtcaagcggaaggacagccgggga

SEQ ID NO: 38625 - DNA, 2076 bp, synthetic construct
  source 1..2076: mol_type = other DNA
atggccttaccagtgaccgccttgctcctgccgctggccttgctgctccacgccgccaggccggacgtggtcatgacacagagcccttctagcctgtctgccagcgtgggcgacagagtgaccatcacctgtatggcctccgaggacatctacatccggctggcctggtatcagcagaagcctggaaacgcccctaagctgctgatctacgccgccacctctctggaaacaggcgtgccaagcagattttccggcagcggctctggcaccgatttcaccctgacaatatccagcctccagcctgaggacttcgccacctactactgccagcagtattggagcagcccctggacatttggcggaggcaccaaggtggaaatcaaactcgagatccagaaccctgatcctgccgtgtaccagctgcgggatagcaagagcagcgacaagagcgtgtgtctgttcaccgacttcgacagccagaccaacgtgtcccagagcaaggactccgacgtgtacatcaccgataagtgcgtgctggacatgcggagcatggacttcaagagcaactccgccgtggcctggtccaacaagtccgatttcgcctgcgccaacgccttcaacaacagcattatccccgaggacacattcttcccaagccccgagagcagctgcggctttaccagcgagagctaccagcagggcgtgctgagcgccaccatcctgtacgagatcctgctgggcaaggccaccctgtacgccgtgctggtgtctgccctggtgctgatggctatggtcaagcggaaggacagccggggacgcgccaagagaagcggatctggcgtgaagcagaccctgaatttcgacctgctgaagctggctggcgacgtggaatccaacccaggccctactagtatggactggatttggcgcatccttttccttgtcggcgctgctaccggcgcccattccgggcccatggaccccgacctggaaatcagagccgccttcctgcggcagagaaacacagccctgagaacagaggtggccgagctggaacaagaggtgcagcggctggaaaacgaggtgtcccagtacgagacaagatacggccctctcggaggcggaaaaggatccggcggcggaggatctggcggaggcggatctgggggcggaggctctttcgaacaggttcagctgcaagagtctggccccggactggtcaagcctagccaaacactgagcctgacctgtaccgtgtccggctacagcatcaccagcgactacacctggaactggatcagacagcctcctggcaacggactggaatggatcggctacatcacctacagcggcagcaccagctacaaccccagcctgaaaagccgggtgctgatctccgtggacaccagcaagaatcaggtgtccctgaagctgagcagcgtgacagccgctgataccgccgtgtactactgtgccagactggggagaagatacacaatggactactggggccagggcaccaccgtgacagtttcttctacgcgtgaggacctgaagaacgtgttcccacctgaggtggccgtgttcgagcctagcgaggccgagatcagccacacccagaaagccaccctcgtgtgcctggctaccggcttctaccccgaccatgtggaactgtcttggtgggtcaacggcaaagaggtgcacagcggcgtgtgtaccgacccccagccactgaaagaacagcccgccctgaacgacagccggtactgcctgagcagcagactgagagtgtccgccaccttctggcagaacccccggaaccacttcagatgccaggtgcagttctacggcctgagcgagaacgacgagtggacccaggacagagccaagcccgtgacccagatcgtgtctgccgaagcctggggcagagccgattgcgacgtgaagctggtggaaaagagcttcgagacagacaccaacctgaacttccagaacctgagcgtgatcggcttcagaatcctgctgctgaaagtggccggctttaacctgctgatgaccctgcggctgtggtccagc

SEQ ID NO: 38626 - DNA, 1995 bp, synthetic construct
  source 1..1995: mol_type = other DNA
atggccttaccagtgaccgccttgctcctgccgctggccttgctgctccacgccgccaggccggacgtggtcatgacacagagcccttctagcctgtctgccagcgtgggcgacagagtgaccatcacctgtatggcctccgaggacatctacatccggctggcctggtatcagcagaagcctggaaacgcccctaagctgctgatctacgccgccacctctctggaaacaggcgtgccaagcagattttccggcagcggctctggcaccgatttcaccctgacaatatccagcctccagcctgaggacttcgccacctactactgccagcagtattggagcagcccctggacatttggcggaggcaccaaggtggaaatcaaactcgaggacctgaagaacgtgttcccacctgaggtggccgtgttcgagcctagcgaggccgagatcagccacacccagaaagccaccctcgtgtgcctggctaccggcttctaccccgaccatgtggaactgtcttggtgggtcaacggcaaagaggtgcacagcggcgtgtgtaccgacccccagccactgaaagaacagcccgccctgaacgacagccggtactgcctgagcagcagactgagagtgtccgccaccttctggcagaacccccggaaccacttcagatgccaggtgcagttctacggcctgagcgagaacgacgagtggacccaggacagagccaagcccgtgacccagatcgtgtctgccgaagcctggggcagagccgattgcgacgtgaagctggtggaaaagagcttcgagacagacaccaacctgaacttccagaacctgagcgtgatcggcttcagaatcctgctgctgaaagtggccggctttaacctgctgatgaccctgcggctgtggtccagcagggccaagcgatctggatctggagcaacaaacttctcactactcaaacaagcaggtgacgtggaggagaatcccgggcctactagtatggactggatttggcgcatccttttccttgtcggcgctgctaccggcgcccattccgggcccgaagttgctgccctcgagaaggaggtagcagctttggaaaaagaagtcgcagcccttgagaaagaagttgcggctctggagaagggatccggcggcggaggatctggcggaggcggatctgggggcggaggctctttcgaacaggttcagctgcaagagtctggccccggactggtcaagcctagccaaacactgagcctgacctgtaccgtgtccggctacagcatcaccagcgactacacctggaactggatcagacagcctcctggcaacggactggaatggatcggctacatcacctacagcggcagcaccagctacaaccccagcctgaaaagccgggtgctgatctccgtggacaccagcaagaatcaggtgtccctgaagctgagcagcgtgacagccgctgataccgccgtgtactactgtgccagactggggagaagatacacaatggactactggggccagggcaccaccgtgacagtttcttctacgcgtatccagaaccctgatcctgccgtgtaccagctgcgggatagcaagagcagcgacaagagcgtgtgtctgttcaccgacttcgacagccagaccaacgtgtcccagagcaaggactccgacgtgtacatcaccgataagtgcgtgctggacatgcggagcatggacttcaagagcaactccgccgtggcctggtccaacaagtccgatttcgcctgcgccaacgccttcaacaacagcattatccccgaggacacattcttcccaagccccgagagcagctgcggctttaccagcgagagctaccagcagggcgtgctgagcgccaccatcctgtacgagatcctgctgggcaaggccaccctgtacgccgtgctggtgtctgccctggtgctgatggctatggtcaagcggaaggacagccgggga

SEQ ID NO: 38627 - DNA, 2007 bp, synthetic construct
  source 1..2007: mol_type = other DNA
atggccttaccagtgaccgccttgctcctgccgctggccttgctgctccacgccgccaggccggacgtggtcatgacacagagcccttctagcctgtctgccagcgtgggcgacagagtgaccatcacctgtatggcctccgaggacatctacatccggctggcctggtatcagcagaagcctggaaacgcccctaagctgctgatctacgccgccacctctctggaaacaggcgtgccaagcagattttccggcagcggctctggcaccgatttcaccctgacaatatccagcctccagcctgaggacttcgccacctactactgccagcagtattggagcagcccctggacatttggcggaggcaccaaggtggaaatcaaactcgagatccagaaccctgatcctgccgtgtaccagctgcgggatagcaagagcagcgacaagagcgtgtgtctgttcaccgacttcgacagccagaccaacgtgtcccagagcaaggactccgacgtgtacatcaccgataagtgcgtgctggacatgcggagcatggacttcaagagcaactccgccgtggcctggtccaacaagtccgatttcgcctgcgccaacgccttcaacaacagcattatccccgaggacacattcttcccaagccccgagagcagctgcggctttaccagcgagagctaccagcagggcgtgctgagcgccaccatcctgtacgagatcctgctgggcaaggccaccctgtacgccgtgctggtgtctgccctggtgctgatggctatggtcaagcggaaggacagccggggacgcgccaagagaagcggatctggcgtgaagcagaccctgaatttcgacctgctgaagctggctggcgacgtggaatccaacccaggccctactagtatggactggatttggcgcatccttttccttgtcggcgctgctaccggcgcccattccgggcccgaagttgctgccctcgagaaggaggtagcagctttggaaaaagaagtcgcagcccttgagaaagaagttgcggctctggagaagggatccggcggcggaggatctggcggaggcggatctgggggcggaggctctttcgaacaggttcagctgcaagagtctggccccggactggtcaagcctagccaaacactgagcctgacctgtaccgtgtccggctacagcatcaccagcgactacacctggaactggatcagacagcctcctggcaacggactggaatggatcggctacatcacctacagcggcagcaccagctacaaccccagcctgaaaagccgggtgctgatctccgtggacaccagcaagaatcaggtgtccctgaagctgagcagcgtgacagccgctgataccgccgtgtactactgtgccagactggggagaagatacacaatggactactggggccagggcaccaccgtgacagtttcttctacgcgtgaggacctgaagaacgtgttcccacctgaggtggccgtgttcgagcctagcgaggccgagatcagccacacccagaaagccaccctcgtgtgcctggctaccggcttctaccccgaccatgtggaactgtcttggtgggtcaacggcaaagaggtgcacagcggcgtgtgtaccgacccccagccactgaaagaacagcccgccctgaacgacagccggtactgcctgagcagcagactgagagtgtccgccaccttctggcagaacccccggaaccacttcagatgccaggtgcagttctacggcctgagcgagaacgacgagtggacccaggacagagccaagcccgtgacccagatcgtgtctgccgaagcctggggcagagccgattgcgacgtgaagctggtggaaaagagcttcgagacagacaccaacctgaacttccagaacctgagcgtgatcggcttcagaatcctgctgctgaaagtggccggctttaacctgctgatgaccctgcggctgtggtccagc

SEQ ID NO: 38628 - DNA, 2265 bp, synthetic construct
  source 1..2265: mol_type = other DNA
atggccttaccagtgaccgccttgctcctgccgctggccttgctgctccacgccgccaggccggacgtggtcatgacacagagcccttctagcctgtctgccagcgtgggcgacagagtgaccatcacctgtatggcctccgaggacatctacatccggctggcctggtatcagcagaagcctggaaacgcccctaagctgctgatctacgccgccacctctctggaaacaggcgtgccaagcagattttccggcagcggctctggcaccgatttcaccctgacaatatccagcctccagcctgaggacttcgccacctactactgccagcagtattggagcagcccctggacatttggcggaggcaccaaggtggaaatcaaactcgaggacctgaagaacgtgttcccacctgaggtggccgtgttcgagcctagcgaggccgagatcagccacacccagaaagccaccctcgtgtgcctggctaccggcttctaccccgaccatgtggaactgtcttggtgggtcaacggcaaagaggtgcacagcggcgtgtgtaccgacccccagccactgaaagaacagcccgccctgaacgacagccggtactgcctgagcagcagactgagagtgtccgccaccttctggcagaacccccggaaccacttcagatgccaggtgcagttctacggcctgagcgagaacgacgagtggacccaggacagagccaagcccgtgacccagatcgtgtctgccgaagcctggggcagagccgattgcgacgtgaagctggtggaaaagagcttcgagacagacaccaacctgaacttccagaacctgagcgtgatcggcttcagaatcctgctgctgaaagtggccggctttaacctgctgatgaccctgcggctgtggtccagcagggccaagcgatctggatctggagcaacaaacttctcactactcaaacaagcaggtgacgtggaggagaatcccgggcctactagtatggactggatttggcgcatccttttccttgtcggcgctgctaccggcgcccattccgggccccaggttcagctgcaagagtctggcggaggacttgctcaagctggcggaagcctgagactgtcttgtgccgcctctggcagaaccttcagcatgggctggtttagacaggcccctggcaaagagagagagttcgtcgccgccatcacatacagcggcggcagcccttactacgcctcttctgtcagaggccggttcaccatcagccgggacaacgccaagaacaccgtgtacctccagatgaacagcctgaagccagaggacaccgccgtgtactactgtgccgccaatccaacctacggcagcgactggaatgccgagaattggggccagggcacccaagtgacagtgtctagtggatccggcggcggaggatctggcggaggcggatctgggggcggaggctctttcgaacaggttcagctgcaagagtctggccccggactggtcaagcctagccaaacactgagcctgacctgtaccgtgtccggctacagcatcaccagcgactacacctggaactggatcagacagcctcctggcaacggactggaatggatcggctacatcacctacagcggcagcaccagctacaaccccagcctgaaaagccgggtgctgatctccgtggacaccagcaagaatcaggtgtccctgaagctgagcagcgtgacagccgctgataccgccgtgtactactgtgccagactggggagaagatacacaatggactactggggccagggcaccaccgtgacagtttcttctacgcgtatccagaaccctgatcctgccgtgtaccagctgcgggatagcaagagcagcgacaagagcgtgtgtctgttcaccgacttcgacagccagaccaacgtgtcccagagcaaggactccgacgtgtacatcaccgataagtgcgtgctggacatgcggagcatggacttcaagagcaactccgccgtggcctggtccaacaagtccgatttcgcctgcgccaacgccttcaacaacagcattatccccgaggacacattcttcccaagccccgagagcagctgcggctttaccagcgagagctaccagcagggcgtgctgagcgccaccatcctgtacgagatcctgctgggcaaggccaccctgtacgccgtgctggtgtctgccctggtgctgatggctatggtcaagcggaaggacagccgggga

SEQ ID NO: 38629 - DNA, 2277 bp, synthetic construct
  source 1..2277: mol_type = other DNA
atggccttaccagtgaccgccttgctcctgccgctggccttgctgctccacgccgccaggccggacgtggtcatgacacagagcccttctagcctgtctgccagcgtgggcgacagagtgaccatcacctgtatggcctccgaggacatctacatccggctggcctggtatcagcagaagcctggaaacgcccctaagctgctgatctacgccgccacctctctggaaacaggcgtgccaagcagattttccggcagcggctctggcaccgatttcaccctgacaatatccagcctccagcctgaggacttcgccacctactactgccagcagtattggagcagcccctggacatttggcggaggcaccaaggtggaaatcaaactcgagatccagaaccctgatcctgccgtgtaccagctgcgggatagcaagagcagcgacaagagcgtgtgtctgttcaccgacttcgacagccagaccaacgtgtcccagagcaaggactccgacgtgtacatcaccgataagtgcgtgctggacatgcggagcatggacttcaagagcaactccgccgtggcctggtccaacaagtccgatttcgcctgcgccaacgccttcaacaacagcattatccccgaggacacattcttcccaagccccgagagcagctgcggctttaccagcgagagctaccagcagggcgtgctgagcgccaccatcctgtacgagatcctgctgggcaaggccaccctgtacgccgtgctggtgtctgccctggtgctgatggctatggtcaagcggaaggacagccggggacgcgccaagagaagcggatctggcgtgaagcagaccctgaatttcgacctgctgaagctggctggcgacgtggaatccaacccaggccctactagtatggactggatttggcgcatccttttccttgtcggcgctgctaccggcgcccattccgggccccaggttcagctgcaagagtctggcggaggacttgctcaagctggcggaagcctgagactgtcttgtgccgcctctggcagaaccttcagcatgggctggtttagacaggcccctggcaaagagagagagttcgtcgccgccatcacatacagcggcggcagcccttactacgcctcttctgtcagaggccggttcaccatcagccgggacaacgccaagaacaccgtgtacctccagatgaacagcctgaagccagaggacaccgccgtgtactactgtgccgccaatccaacctacggcagcgactggaatgccgagaattggggccagggcacccaagtgacagtgtctagtggatccggcggcggaggatctggcggaggcggatctgggggcggaggctctttcgaacaggttcagctgcaagagtctggccccggactggtcaagcctagccaaacactgagcctgacctgtaccgtgtccggctacagcatcaccagcgactacacctggaactggatcagacagcctcctggcaacggactggaatggatcggctacatcacctacagcggcagcaccagctacaaccccagcctgaaaagccgggtgctgatctccgtggacaccagcaagaatcaggtgtccctgaagctgagcagcgtgacagccgctgataccgccgtgtactactgtgccagactggggagaagatacacaatggactactggggccagggcaccaccgtgacagtttcttctacgcgtgaggacctgaagaacgtgttcccacctgaggtggccgtgttcgagcctagcgaggccgagatcagccacacccagaaagccaccctcgtgtgcctggctaccggcttctaccccgaccatgtggaactgtcttggtgggtcaacggcaaagaggtgcacagcggcgtgtgtaccgacccccagccactgaaagaacagcccgccctgaacgacagccggtactgcctgagcagcagactgagagtgtccgccaccttctggcagaacccccggaaccacttcagatgccaggtgcagttctacggcctgagcgagaacgacgagtggacccaggacagagccaagcccgtgacccagatcgtgtctgccgaagcctggggcagagccgattgcgacgtgaagctggtggaaaagagcttcgagacagacaccaacctgaacttccagaacctgagcgtgatcggcttcagaatcctgctgctgaaagtggccggctttaacctgctgatgaccctgcggctgtggtccagc

SEQ ID NO: 38630 - DNA, 2283 bp, synthetic construct
  source 1..2283: mol_type = other DNA
atggccttaccagtgaccgccttgctcctgccgctggccttgctgctccacgccgccaggccggaagtgcaactggtggaatctggaggctctctggtgcagccagggggaagcctgagactgtcttgtgccgcttccggcttcaccttcgacgactacgccatgagctgggtgcgccaggtgccaggcaaaggcctggaatgggtgtccagcatcaactggagcggcacccacaccgattacgccgactccgtgaaaggcagattcacaatcagcagaaacaacgccaacaataccctgtacctgcagatgaactccctgaagtctgaggatacagcagtgtattattgcgccaagaactggcgggacgccggcaccacttggtttgagaaaagcggctctgccggacagggaacccaagtgacagtgtcctccggtaccggcggaggcggatctggcggcggaggtagcggtggcggaggatctgaattcgacgtggtcatgacacagagcccttctagcctgtctgccagcgtgggcgacagagtgaccatcacctgtatggcctccgaggacatctacatccggctggcctggtatcagcagaagcctggaaacgcccctaagctgctgatctacgccgccacctctctggaaacaggcgtgccaagcagattttccggcagcggctctggcaccgatttcaccctgacaatatccagcctccagcctgaggacttcgccacctactactgccagcagtattggagcagcccctggacatttggcggaggcaccaaggtggaaatcaaactcgaggacctgaagaacgtgttcccacctgaggtggccgtgttcgagcctagcgaggccgagatcagccacacccagaaagccaccctcgtgtgcctggctaccggcttctaccccgaccatgtggaactgtcttggtgggtcaacggcaaagaggtgcacagcggcgtgtgtaccgacccccagccactgaaagaacagcccgccctgaacgacagccggtactgcctgagcagcagactgagagtgtccgccaccttctggcagaacccccggaaccacttcagatgccaggtgcagttctacggcctgagcgagaacgacgagtggacccaggacagagccaagcccgtgacccagatcgtgtctgccgaagcctggggcagagccgattgcgacgtgaagctggtggaaaagagcttcgagacagacaccaacctgaacttccagaacctgagcgtgatcggcttcagaatcctgctgctgaaagtggccggctttaacctgctgatgaccctgcggctgtggtccagcagggccaagcgatctggatctggagcaacaaacttctcactactcaaacaagcaggtgacgtggaggagaatcccgggcctactagtatggactggatttggcgcatccttttccttgtcggcgctgctaccggcgcgcattccttcgaacaggttcagctgcaagagtctggccccggactggtcaagcctagccaaacactgagcctgacctgtaccgtgtccggctacagcatcaccagcgactacacctggaactggatcagacagcctcctggcaacggactggaatggatcggctacatcacctacagcggcagcaccagctacaaccccagcctgaaaagccgggtgctgatctccgtggacaccagcaagaatcaggtgtccctgaagctgagcagcgtgacagccgctgataccgccgtgtactactgtgccagactggggagaagatacacaatggactactggggccagggcaccaccgtgacagtttcttctacgcgtatccagaaccctgatcctgccgtgtaccagctgcgggatagcaagagcagcgacaagagcgtgtgtctgttcaccgacttcgacagccagaccaacgtgtcccagagcaaggactccgacgtgtacatcaccgataagtgcgtgctggacatgcggagcatggacttcaagagcaactccgccgtggcctggtccaacaagtccgatttcgcctgcgccaacgccttcaacaacagcattatccccgaggacacattcttcccaagccccgagagcagctgcggctttaccagcgagagctaccagcagggcgtgctgagcgccaccatcctgtacgagatcctgctgggcaaggccaccctgtacgccgtgctggtgtctgccctggtgctgatggctatggtcaagcggaaggacagccgggga

SEQ ID NO: 38631 - DNA, 2295 bp, synthetic construct
  source 1..2295: mol_type = other DNA
atggccttaccagtgaccgccttgctcctgccgctggccttgctgctccacgccgccaggccggaagtgcaactggtggaatctggaggctctctggtgcagccagggggaagcctgagactgtcttgtgccgcttccggcttcaccttcgacgactacgccatgagctgggtgcgccaggtgccaggcaaaggcctggaatgggtgtccagcatcaactggagcggcacccacaccgattacgccgactccgtgaaaggcagattcacaatcagcagaaacaacgccaacaataccctgtacctgcagatgaactccctgaagtctgaggatacagcagtgtattattgcgccaagaactggcgggacgccggcaccacttggtttgagaaaagcggctctgccggacagggaacccaagtgacagtgtcctccggtaccggcggaggcggatctggcggcggaggtagcggtggcggaggatctgaattcgacgtggtcatgacacagagcccttctagcctgtctgccagcgtgggcgacagagtgaccatcacctgtatggcctccgaggacatctacatccggctggcctggtatcagcagaagcctggaaacgcccctaagctgctgatctacgccgccacctctctggaaacaggcgtgccaagcagattttccggcagcggctctggcaccgatttcaccctgacaatatccagcctccagcctgaggacttcgccacctactactgccagcagtattggagcagcccctggacatttggcggaggcaccaaggtggaaatcaaactcgagatccagaaccctgatcctgccgtgtaccagctgcgggatagcaagagcagcgacaagagcgtgtgtctgttcaccgacttcgacagccagaccaacgtgtcccagagcaaggactccgacgtgtacatcaccgataagtgcgtgctggacatgcggagcatggacttcaagagcaactccgccgtggcctggtccaacaagtccgatttcgcctgcgccaacgccttcaacaacagcattatccccgaggacacattcttcccaagccccgagagcagctgcggctttaccagcgagagctaccagcagggcgtgctgagcgccaccatcctgtacgagatcctgctgggcaaggccaccctgtacgccgtgctggtgtctgccctggtgctgatggctatggtcaagcggaaggacagccggggacgcgccaagagaagcggatctggcgtgaagcagaccctgaatttcgacctgctgaagctggctggcgacgtggaatccaacccaggccctactagtatggactggatttggcgcatccttttccttgtcggcgctgctaccggcgcgcattccttcgaacaggttcagctgcaagagtctggccccggactggtcaagcctagccaaacactgagcctgacctgtaccgtgtccggctacagcatcaccagcgactacacctggaactggatcagacagcctcctggcaacggactggaatggatcggctacatcacctacagcggcagcaccagctacaaccccagcctgaaaagccgggtgctgatctccgtggacaccagcaagaatcaggtgtccctgaagctgagcagcgtgacagccgctgataccgccgtgtactactgtgccagactggggagaagatacacaatggactactggggccagggcaccaccgtgacagtttcttctacgcgtgaggacctgaagaacgtgttcccacctgaggtggccgtgttcgagcctagcgaggccgagatcagccacacccagaaagccaccctcgtgtgcctggctaccggcttctaccccgaccatgtggaactgtcttggtgggtcaacggcaaagaggtgcacagcggcgtgtgtaccgacccccagccactgaaagaacagcccgccctgaacgacagccggtactgcctgagcagcagactgagagtgtccgccaccttctggcagaacccccggaaccacttcagatgccaggtgcagttctacggcctgagcgagaacgacgagtggacccaggacagagccaagcccgtgacccagatcgtgtctgccgaagcctggggcagagccgattgcgacgtgaagctggtggaaaagagcttcgagacagacaccaacctgaacttccagaacctgagcgtgatcggcttcagaatcctgctgctgaaagtggccggctttaacctgctgatgaccctgcggctgtggtccagc

SEQ ID NO: 38632 - DNA, 2277 bp, synthetic construct
  source 1..2277: mol_type = other DNA
atggccttaccagtgaccgccttgctcctgccgctggccttgctgctccacgccgccaggccggaagttcagctgcttgagtctggcggaggactggttcaacctggcggaagcctgagactgtcttgtgccgccagcggcttcatcttcagcagctacgccatgagctgggtccgacaggctcctggaaagggccaagaatgggtttccggcgttagcggcacaggcgtgaacacctactacgccgatagcgtgaagggcagattcaccatcagccgggacaacagcaagaacaccctgtacctccagatgaacagcctgagagccgaggacaccgccgtgtactattgtgcctctggcaaaggctgggacagcggctcttggtacgaggactatagaggccagggcaccctggtcacagtttcttcaggtaccggcggaggcggatctggcggcggaggtagcggtggcggaggatctgaattcgacgtggtcatgacacagagcccttctagcctgtctgccagcgtgggcgacagagtgaccatcacctgtatggcctccgaggacatctacatccggctggcctggtatcagcagaagcctggaaacgcccctaagctgctgatctacgccgccacctctctggaaacaggcgtgccaagcagattttccggcagcggctctggcaccgatttcaccctgacaatatccagcctccagcctgaggacttcgccacctactactgccagcagtattggagcagcccctggacatttggcggaggcaccaaggtggaaatcaaactcgaggacctgaagaacgtgttcccacctgaggtggccgtgttcgagcctagcgaggccgagatcagccacacccagaaagccaccctcgtgtgcctggctaccggcttctaccccgaccatgtggaactgtcttggtgggtcaacggcaaagaggtgcacagcggcgtgtgtaccgacccccagccactgaaagaacagcccgccctgaacgacagccggtactgcctgagcagcagactgagagtgtccgccaccttctggcagaacccccggaaccacttcagatgccaggtgcagttctacggcctgagcgagaacgacgagtggacccaggacagagccaagcccgtgacccagatcgtgtctgccgaagcctggggcagagccgattgcgacgtgaagctggtggaaaagagcttcgagacagacaccaacctgaacttccagaacctgagcgtgatcggcttcagaatcctgctgctgaaagtggccggctttaacctgctgatgaccctgcggctgtggtccagcagggccaagcgatctggatctggagcaacaaacttctcactactcaaacaagcaggtgacgtggaggagaatcccgggcctactagtatggactggatttggcgcatccttttccttgtcggcgctgctaccggcgcgcattccttcgaacaggttcagctgcaagagtctggccccggactggtcaagcctagccaaacactgagcctgacctgtaccgtgtccggctacagcatcaccagcgactacacctggaactggatcagacagcctcctggcaacggactggaatggatcggctacatcacctacagcggcagcaccagctacaaccccagcctgaaaagccgggtgctgatctccgtggacaccagcaagaatcaggtgtccctgaagctgagcagcgtgacagccgctgataccgccgtgtactactgtgccagactggggagaagatacacaatggactactggggccagggcaccaccgtgacagtttcttctacgcgtatccagaaccctgatcctgccgtgtaccagctgcgggatagcaagagcagcgacaagagcgtgtgtctgttcaccgacttcgacagccagaccaacgtgtcccagagcaaggactccgacgtgtacatcaccgataagtgcgtgctggacatgcggagcatggacttcaagagcaactccgccgtggcctggtccaacaagtccgatttcgcctgcgccaacgccttcaacaacagcattatccccgaggacacattcttcccaagccccgagagcagctgcggctttaccagcgagagctaccagcagggcgtgctgagcgccaccatcctgtacgagatcctgctgggcaaggccaccctgtacgccgtgctggtgtctgccctggtgctgatggctatggtcaagcggaaggacagccgggga

SEQ ID NO: 38633 - DNA, 2289 bp, synthetic construct
  source 1..2289: mol_type = other DNA
atggccttaccagtgaccgccttgctcctgccgctggccttgctgctccacgccgccaggccggaagttcagctgcttgagtctggcggaggactggttcaacctggcggaagcctgagactgtcttgtgccgccagcggcttcatcttcagcagctacgccatgagctgggtccgacaggctcctggaaagggccaagaatgggtttccggcgttagcggcacaggcgtgaacacctactacgccgatagcgtgaagggcagattcaccatcagccgggacaacagcaagaacaccctgtacctccagatgaacagcctgagagccgaggacaccgccgtgtactattgtgcctctggcaaaggctgggacagcggctcttggtacgaggactatagaggccagggcaccctggtcacagtttcttcaggtaccggcggaggcggatctggcggcggaggtagcggtggcggaggatctgaattcgacgtggtcatgacacagagcccttctagcctgtctgccagcgtgggcgacagagtgaccatcacctgtatggcctccgaggacatctacatccggctggcctggtatcagcagaagcctggaaacgcccctaagctgctgatctacgccgccacctctctggaaacaggcgtgccaagcagattttccggcagcggctctggcaccgatttcaccctgacaatatccagcctccagcctgaggacttcgccacctactactgccagcagtattggagcagcccctggacatttggcggaggcaccaaggtggaaatcaaactcgagatccagaaccctgatcctgccgtgtaccagctgcgggatagcaagagcagcgacaagagcgtgtgtctgttcaccgacttcgacagccagaccaacgtgtcccagagcaaggactccgacgtgtacatcaccgataagtgcgtgctggacatgcggagcatggacttcaagagcaactccgccgtggcctggtccaacaagtccgatttcgcctgcgccaacgccttcaacaacagcattatccccgaggacacattcttcccaagccccgagagcagctgcggctttaccagcgagagctaccagcagggcgtgctgagcgccaccatcctgtacgagatcctgctgggcaaggccaccctgtacgccgtgctggtgtctgccctggtgctgatggctatggtcaagcggaaggacagccggggacgcgccaagagaagcggatctggcgtgaagcagaccctgaatttcgacctgctgaagctggctggcgacgtggaatccaacccaggccctactagtatggactggatttggcgcatccttttccttgtcggcgctgctaccggcgcgcattccttcgaacaggttcagctgcaagagtctggccccggactggtcaagcctagccaaacactgagcctgacctgtaccgtgtccggctacagcatcaccagcgactacacctggaactggatcagacagcctcctggcaacggactggaatggatcggctacatcacctacagcggcagcaccagctacaaccccagcctgaaaagccgggtgctgatctccgtggacaccagcaagaatcaggtgtccctgaagctgagcagcgtgacagccgctgataccgccgtgtactactgtgccagactggggagaagatacacaatggactactggggccagggcaccaccgtgacagtttcttctacgcgtgaggacctgaagaacgtgttcccacctgaggtggccgtgttcgagcctagcgaggccgagatcagccacacccagaaagccaccctcgtgtgcctggctaccggcttctaccccgaccatgtggaactgtcttggtgggtcaacggcaaagaggtgcacagcggcgtgtgtaccgacccccagccactgaaagaacagcccgccctgaacgacagccggtactgcctgagcagcagactgagagtgtccgccaccttctggcagaacccccggaaccacttcagatgccaggtgcagttctacggcctgagcgagaacgacgagtggacccaggacagagccaagcccgtgacccagatcgtgtctgccgaagcctggggcagagccgattgcgacgtgaagctggtggaaaagagcttcgagacagacaccaacctgaacttccagaacctgagcgtgatcggcttcagaatcctgctgctgaaagtggccggctttaacctgctgatgaccctgcggctgtggtccagc

SEQ ID NO: 38634 - DNA, 2181 bp, synthetic construct
  source 1..2181: mol_type = other DNA
atggccttaccagtgaccgccttgctcctgccgctggccttgctgctccacgccgccaggccgatgctgcccgctcctaagaatctggtggtgtccagaatcaccgaggacagcgccagactgtcttggacagctcctgatgccgccttcgacagcttccccatccggtacatcgagacactgatctggggcgaagccatctggctggatgtgcctggaagcgagagaagctacgacctgaccggactgaagcctggcacagagtatgccgtggtcatcaccggcgtgaaaggcggcagattctctagccctctggtggcctctttcaccaccggtaccggcggaggcggatctggcggcggaggtagcggtggcggaggatctgaattcgacgtggtcatgacacagagcccttctagcctgtctgccagcgtgggcgacagagtgaccatcacctgtatggcctccgaggacatctacatccggctggcctggtatcagcagaagcctggaaacgcccctaagctgctgatctacgccgccacctctctggaaacaggcgtgccaagcagattttccggcagcggctctggcaccgatttcaccctgacaatatccagcctccagcctgaggacttcgccacctactactgccagcagtattggagcagcccctggacatttggcggaggcaccaaggtggaaatcaaactcgaggacctgaagaacgtgttcccacctgaggtggccgtgttcgagcctagcgaggccgagatcagccacacccagaaagccaccctcgtgtgcctggctaccggcttctaccccgaccatgtggaactgtcttggtgggtcaacggcaaagaggtgcacagcggcgtgtgtaccgacccccagccactgaaagaacagcccgccctgaacgacagccggtactgcctgagcagcagactgagagtgtccgccaccttctggcagaacccccggaaccacttcagatgccaggtgcagttctacggcctgagcgagaacgacgagtggacccaggacagagccaagcccgtgacccagatcgtgtctgccgaagcctggggcagagccgattgcgacgtgaagctggtggaaaagagcttcgagacagacaccaacctgaacttccagaacctgagcgtgatcggcttcagaatcctgctgctgaaagtggccggctttaacctgctgatgaccctgcggctgtggtccagcagggccaagcgatctggatctggagcaacaaacttctcactactcaaacaagcaggtgacgtggaggagaatcccgggcctactagtatggactggatttggcgcatccttttccttgtcggcgctgctaccggcgcgcattccttcgaacaggttcagctgcaagagtctggccccggactggtcaagcctagccaaacactgagcctgacctgtaccgtgtccggctacagcatcaccagcgactacacctggaactggatcagacagcctcctggcaacggactggaatggatcggctacatcacctacagcggcagcaccagctacaaccccagcctgaaaagccgggtgctgatctccgtggacaccagcaagaatcaggtgtccctgaagctgagcagcgtgacagccgctgataccgccgtgtactactgtgccagactggggagaagatacacaatggactactggggccagggcaccaccgtgacagtttcttctacgcgtatccagaaccctgatcctgccgtgtaccagctgcgggatagcaagagcagcgacaagagcgtgtgtctgttcaccgacttcgacagccagaccaacgtgtcccagagcaaggactccgacgtgtacatcaccgataagtgcgtgctggacatgcggagcatggacttcaagagcaactccgccgtggcctggtccaacaagtccgatttcgcctgcgccaacgccttcaacaacagcattatccccgaggacacattcttcccaagccccgagagcagctgcggctttaccagcgagagctaccagcagggcgtgctgagcgccaccatcctgtacgagatcctgctgggcaaggccaccctgtacgccgtgctggtgtctgccctggtgctgatggctatggtcaagcggaaggacagccgggga

SEQ ID NO: 38635 - DNA, 2193 bp, synthetic construct
  source 1..2193: mol_type = other DNA
atggccttaccagtgaccgccttgctcctgccgctggccttgctgctccacgccgccaggccgatgctgcccgctcctaagaatctggtggtgtccagaatcaccgaggacagcgccagactgtcttggacagctcctgatgccgccttcgacagcttccccatccggtacatcgagacactgatctggggcgaagccatctggctggatgtgcctggaagcgagagaagctacgacctgaccggactgaagcctggcacagagtatgccgtggtcatcaccggcgtgaaaggcggcagattctctagccctctggtggcctctttcaccaccggtaccggcggaggcggatctggcggcggaggtagcggtggcggaggatctgaattcgacgtggtcatgacacagagcccttctagcctgtctgccagcgtgggcgacagagtgaccatcacctgtatggcctccgaggacatctacatccggctggcctggtatcagcagaagcctggaaacgcccctaagctgctgatctacgccgccacctctctggaaacaggcgtgccaagcagattttccggcagcggctctggcaccgatttcaccctgacaatatccagcctccagcctgaggacttcgccacctactactgccagcagtattggagcagcccctggacatttggcggaggcaccaaggtggaaatcaaactcgagatccagaaccctgatcctgccgtgtaccagctgcgggatagcaagagcagcgacaagagcgtgtgtctgttcaccgacttcgacagccagaccaacgtgtcccagagcaaggactccgacgtgtacatcaccgataagtgcgtgctggacatgcggagcatggacttcaagagcaactccgccgtggcctggtccaacaagtccgatttcgcctgcgccaacgccttcaacaacagcattatccccgaggacacattcttcccaagccccgagagcagctgcggctttaccagcgagagctaccagcagggcgtgctgagcgccaccatcctgtacgagatcctgctgggcaaggccaccctgtacgccgtgctggtgtctgccctggtgctgatggctatggtcaagcggaaggacagccggggacgcgccaagagaagcggatctggcgtgaagcagaccctgaatttcgacctgctgaagctggctggcgacgtggaatccaacccaggccctactagtatggactggatttggcgcatccttttccttgtcggcgctgctaccggcgcgcattccttcgaacaggttcagctgcaagagtctggccccggactggtcaagcctagccaaacactgagcctgacctgtaccgtgtccggctacagcatcaccagcgactacacctggaactggatcagacagcctcctggcaacggactggaatggatcggctacatcacctacagcggcagcaccagctacaaccccagcctgaaaagccgggtgctgatctccgtggacaccagcaagaatcaggtgtccctgaagctgagcagcgtgacagccgctgataccgccgtgtactactgtgccagactggggagaagatacacaatggactactggggccagggcaccaccgtgacagtttcttctacgcgtgaggacctgaagaacgtgttcccacctgaggtggccgtgttcgagcctagcgaggccgagatcagccacacccagaaagccaccctcgtgtgcctggctaccggcttctaccccgaccatgtggaactgtcttggtgggtcaacggcaaagaggtgcacagcggcgtgtgtaccgacccccagccactgaaagaacagcccgccctgaacgacagccggtactgcctgagcagcagactgagagtgtccgccaccttctggcagaacccccggaaccacttcagatgccaggtgcagttctacggcctgagcgagaacgacgagtggacccaggacagagccaagcccgtgacccagatcgtgtctgccgaagcctggggcagagccgattgcgacgtgaagctggtggaaaagagcttcgagacagacaccaacctgaacttccagaacctgagcgtgatcggcttcagaatcctgctgctgaaagtggccggctttaacctgctgatgaccctgcggctgtggtccagc

SEQ ID NO: 38636 - DNA, 2268 bp, synthetic construct
  source 1..2268: mol_type = other DNA
atggccttaccagtgaccgccttgctcctgccgctggccttgctgctccacgccgccaggccggaggtgcagctggttgaatctggcggaggactggttcagcctggcggatctctgagactgtcttgtgccgccagcggcttcaacatcaaggatacctgtatcggctgggttcgcagagcccctggcaaagaggaagaactggtcgccaaaatctgcaagtacagcggccacaccagatacgccgacagcgtgaagggcagattcaccatcagcgccgacaccagcaagaacaccgcctacctccagatgaacagcctgagagccgaggacaccgccgtgtactattgtgccgctgtgtccgtcagagatgggcactacaattactggggccagggcaccaccgtgaccgtttcttcaggtaccggcggaggcggatctggcggcggaggtagcggtggcggaggatctgaattcgacgtggtcatgacacagagcccttctagcctgtctgccagcgtgggcgacagagtgaccatcacctgtatggcctccgaggacatctacatccggctggcctggtatcagcagaagcctggaaacgcccctaagctgctgatctacgccgccacctctctggaaacaggcgtgccaagcagattttccggcagcggctctggcaccgatttcaccctgacaatatccagcctccagcctgaggacttcgccacctactactgccagcagtattggagcagcccctggacatttggcggaggcaccaaggtggaaatcaaactcgaggacctgaagaacgtgttcccacctgaggtggccgtgttcgagcctagcgaggccgagatcagccacacccagaaagccaccctcgtgtgcctggctaccggcttctaccccgaccatgtggaactgtcttggtgggtcaacggcaaagaggtgcacagcggcgtgtgtaccgacccccagccactgaaagaacagcccgccctgaacgacagccggtactgcctgagcagcagactgagagtgtccgccaccttctggcagaacccccggaaccacttcagatgccaggtgcagttctacggcctgagcgagaacgacgagtggacccaggacagagccaagcccgtgacccagatcgtgtctgccgaagcctggggcagagccgattgcgacgtgaagctggtggaaaagagcttcgagacagacaccaacctgaacttccagaacctgagcgtgatcggcttcagaatcctgctgctgaaagtggccggctttaacctgctgatgaccctgcggctgtggtccagcagggccaagcgatctggatctggagcaacaaacttctcactactcaaacaagcaggtgacgtggaggagaatcccgggcctactagtatggactggatttggcgcatccttttccttgtcggcgctgctaccggcgcgcattccttcgaacaggttcagctgcaagagtctggccccggactggtcaagcctagccaaacactgagcctgacctgtaccgtgtccggctacagcatcaccagcgactacacctggaactggatcagacagcctcctggcaacggactggaatggatcggctacatcacctacagcggcagcaccagctacaaccccagcctgaaaagccgggtgctgatctccgtggacaccagcaagaatcaggtgtccctgaagctgagcagcgtgacagccgctgataccgccgtgtactactgtgccagactggggagaagatacacaatggactactggggccagggcaccaccgtgacagtttcttctacgcgtatccagaaccctgatcctgccgtgtaccagctgcgggatagcaagagcagcgacaagagcgtgtgtctgttcaccgacttcgacagccagaccaacgtgtcccagagcaaggactccgacgtgtacatcaccgataagtgcgtgctggacatgcggagcatggacttcaagagcaactccgccgtggcctggtccaacaagtccgatttcgcctgcgccaacgccttcaacaacagcattatccccgaggacacattcttcccaagccccgagagcagctgcggctttaccagcgagagctaccagcagggcgtgctgagcgccaccatcctgtacgagatcctgctgggcaaggccaccctgtacgccgtgctggtgtctgccctggtgctgatggctatggtcaagcggaaggacagccgggga

SEQ ID NO: 38637 - DNA, 2280 bp, synthetic construct
  source 1..2280: mol_type = other DNA
atggccttaccagtgaccgccttgctcctgccgctggccttgctgctccacgccgccaggccggaggtgcagctggttgaatctggcggaggactggttcagcctggcggatctctgagactgtcttgtgccgccagcggcttcaacatcaaggatacctgtatcggctgggttcgcagagcccctggcaaagaggaagaactggtcgccaaaatctgcaagtacagcggccacaccagatacgccgacagcgtgaagggcagattcaccatcagcgccgacaccagcaagaacaccgcctacctccagatgaacagcctgagagccgaggacaccgccgtgtactattgtgccgctgtgtccgtcagagatgggcactacaattactggggccagggcaccaccgtgaccgtttcttcaggtaccggcggaggcggatctggcggcggaggtagcggtggcggaggatctgaattcgacgtggtcatgacacagagcccttctagcctgtctgccagcgtgggcgacagagtgaccatcacctgtatggcctccgaggacatctacatccggctggcctggtatcagcagaagcctggaaacgcccctaagctgctgatctacgccgccacctctctggaaacaggcgtgccaagcagattttccggcagcggctctggcaccgatttcaccctgacaatatccagcctccagcctgaggacttcgccacctactactgccagcagtattggagcagcccctggacatttggcggaggcaccaaggtggaaatcaaactcgagatccagaaccctgatcctgccgtgtaccagctgcgggatagcaagagcagcgacaagagcgtgtgtctgttcaccgacttcgacagccagaccaacgtgtcccagagcaaggactccgacgtgtacatcaccgataagtgcgtgctggacatgcggagcatggacttcaagagcaactccgccgtggcctggtccaacaagtccgatttcgcctgcgccaacgccttcaacaacagcattatccccgaggacacattcttcccaagccccgagagcagctgcggctttaccagcgagagctaccagcagggcgtgctgagcgccaccatcctgtacgagatcctgctgggcaaggccaccctgtacgccgtgctggtgtctgccctggtgctgatggctatggtcaagcggaaggacagccggggacgcgccaagagaagcggatctggcgtgaagcagaccctgaatttcgacctgctgaagctggctggcgacgtggaatccaacccaggccctactagtatggactggatttggcgcatccttttccttgtcggcgctgctaccggcgcgcattccttcgaacaggttcagctgcaagagtctggccccggactggtcaagcctagccaaacactgagcctgacctgtaccgtgtccggctacagcatcaccagcgactacacctggaactggatcagacagcctcctggcaacggactggaatggatcggctacatcacctacagcggcagcaccagctacaaccccagcctgaaaagccgggtgctgatctccgtggacaccagcaagaatcaggtgtccctgaagctgagcagcgtgacagccgctgataccgccgtgtactactgtgccagactggggagaagatacacaatggactactggggccagggcaccaccgtgacagtttcttctacgcgtgaggacctgaagaacgtgttcccacctgaggtggccgtgttcgagcctagcgaggccgagatcagccacacccagaaagccaccctcgtgtgcctggctaccggcttctaccccgaccatgtggaactgtcttggtgggtcaacggcaaagaggtgcacagcggcgtgtgtaccgacccccagccactgaaagaacagcccgccctgaacgacagccggtactgcctgagcagcagactgagagtgtccgccaccttctggcagaacccccggaaccacttcagatgccaggtgcagttctacggcctgagcgagaacgacgagtggacccaggacagagccaagcccgtgacccagatcgtgtctgccgaagcctggggcagagccgattgcgacgtgaagctggtggaaaagagcttcgagacagacaccaacctgaacttccagaacctgagcgtgatcggcttcagaatcctgctgctgaaagtggccggctttaacctgctgatgaccctgcggctgtggtccagc

SEQ ID NO: 38638 - DNA, 3384 bp, synthetic construct
  source 1..3384: mol_type = other DNA
atggccttaccagtgaccgccttgctcctgccgctggccttgctgctccacgccgccaggccggaagtgcagctggttgaatctggcggaggactggttcaggctggcggatctctgagactgtcttgtgccgccagcggcagaacctttagcatgggctggtttagacaggcccctggcaaagagagagagttcgtcgccgccatcacatactctggcggcagcccttactacgccgactctgtgaagggcagattcaccatcagccgggacaacgccaagaacaccgtgtacctccagatgaacagcctgaagcctgaggacaccgccgtgtactactgcgccgccaatccaacatacggcagcgactggaacgccgagaattggggccagggaacccaagtgacagtgtctagcggtaccggcggaggcggatctggcggcggaggtagcggtggcggaggatctgaattcgacgtggtcatgacacagagcccttctagcctgtctgccagcgtgggcgacagagtgaccatcacctgtatggcctccgaggacatctacatccggctggcctggtatcagcagaagcctggaaacgcccctaagctgctgatctacgccgccacctctctggaaacaggcgtgccaagcagattttccggcagcggctctggcaccgatttcaccctgacaatatccagcctccagcctgaggacttcgccacctactactgccagcagtattggagcagcccctggacatttggcggaggcaccaaggtggaaatcaaactcgaggacctgaagaacgtgttcccacctgaggtggccgtgttcgagcctagcgaggccgagatcagccacacccagaaagccaccctcgtgtgcctggctaccggcttctaccccgaccatgtggaactgtcttggtgggtcaacggcaaagaggtgcacagcggcgtgtgtaccgacccccagccactgaaagaacagcccgccctgaacgacagccggtactgcctgagcagcagactgagagtgtccgccaccttctggcagaacccccggaaccacttcagatgccaggtgcagttctacggcctgagcgagaacgacgagtggacccaggacagagccaagcccgtgacccagatcgtgtctgccgaagcctggggcagagccgattgcgacgtgaagctggtggaaaagagcttcgagacagacaccaacctgaacttccagaacctgagcgtgatcggcttcagaatcctgctgctgaaagtggccggctttaacctgctgatgaccctgcggctgtggtccagcagggccaagcgatctggatctggagcaacaaacttctcactactcaaacaagcaggtgacgtggaggagaatcccgggcctactagtgccaccatggactggatttggcgcatccttttccttgtcggcgctgctaccggcgcccattccgggcccgaagtgcaactggttgaatccggtggcggcctggtgcaagcaggcggatctctcagacttagctgtgccgcctccggcagaaccttcacaatgggatggtttaggcaggctccagggaaagagagagagttcgtcgccgccatctctctgtctcccacactggcctactacgccgactctgtgaaaggccggttcaccatctccagagataatgccaagaacaccgtggtgctgcaaatgaactctctgaaacccgaggatacagccctgtactattgtgccgctgaccggaagtccgtgatgagcatcagacccgattactggggacagggcacacaagtcacagtgtcctctggatccggcggcggaggatctggcggaggcggatctgggggcggaggctctttcgaacaggttcagctgcaagagtctggccccggactggtcaagcctagccaaacactgagcctgacctgtaccgtgtccggctacagcatcaccagcgactacacctggaactggatcagacagcctcctggcaacggactggaatggatcggctacatcacctacagcggcagcaccagctacaaccccagcctgaaaagccgggtgctgatctccgtggacaccagcaagaatcaggtgtccctgaagctgagcagcgtgacagccgctgataccgccgtgtactactgtgccagactggggagaagatacacaatggactactggggccagggcaccaccgtgacagtttcttctacgcgtatccagaaccctgatcctgccgtgtaccagctgcgggatagcaagagcagcgacaagagcgtgtgtctgttcaccgacttcgacagccagaccaacgtgtcccagagcaaggactccgacgtgtacatcaccgataagtgcgtgctggacatgcggagcatggacttcaagagcaactccgccgtggcctggtccaacaagtccgatttcgcctgcgccaacgccttcaacaacagcattatccccgaggacacattcttcccaagccccgagagcagctgcggctttaccagcgagagctaccagcagggcgtgctgagcgccaccatcctgtacgagatcctgctgggcaaggccaccctgtacgccgtgctggtgtctgccctggtgctgatggctatggtcaagcggaaggacagccggggacgcgccaagagaagcggatctggcgtgaagcagaccctgaatttcgacctgctgaagctggctggcgacgtggaatccaacccaggcccttctagaggccatatgaccgagtacaagcccacggtgcgcctcgccacccgcgacgacgtccccagggccgtacgcaccctcgccgccgcgttcgccgactaccccgccacgcgccacaccgtcgatccggaccgccacatcgagcgggtcaccgagctgcaagaactcttcctcacgcgcgtcgggctcgacatcggcaaggtgtgggtcgcggacgacggcgccgcggtggcggtctggaccacgccggagagcgtcgaagcgggggcggtgttcgccgagatcggcccgcgcatggccgagttgagcggttcccggctggccgcgcagcaacagatggaaggcctcctggcgccgcaccggcccaaggagcccgcgtggttcctggccaccgtcggcgtctcgcccgaccaccagggcaagggtctgggcagcgccgtcgtgctccccggagtggaggcggccgagcgcgccggggtgcccgccttcctggagacctccgcgccccgcaacctccccttctacgagcggctcggcttcaccgtcaccgccgacgtcgaggtgcccgaaggaccgcgcacctggtgcatgacccgcaagcccggtgcctga

SEQ ID NO: 38639 - DNA, 2298 bp, synthetic construct
  source 1..2298: mol_type = other DNA
atggccttaccagtgaccgccttgctcctgccgctggccttgctgctccacgccgccaggccggaagtgcagctggttgaatctggcggaggactggttcagcctggcggatctctgagactgtcttgtgccgcctctggcttcgccagcgactactatatcatcggctggttcagacaggcccctggcaaagagagagagggcgtcagctgtatcagcagcagatacgccaacaccaactacgccgacagcgtgaagggcagattcaccatcagccgggacaacgccaagaacaccgtgtacctccagatgaacagcctgaagcctgaggacaccgccgtgtactactgtgccgccgacaccagaagatacacctgtcctgacattgccaccatgcaccggaacttcgattcttggggccagggcacactggtcaccgtttcttctggtaccggcggaggcggatctggcggcggaggtagcggtggcggaggatctgaattcgacgtggtcatgacacagagcccttctagcctgtctgccagcgtgggcgacagagtgaccatcacctgtatggcctccgaggacatctacatccggctggcctggtatcagcagaagcctggaaacgcccctaagctgctgatctacgccgccacctctctggaaacaggcgtgccaagcagattttccggcagcggctctggcaccgatttcaccctgacaatatccagcctccagcctgaggacttcgccacctactactgccagcagtattggagcagcccctggacatttggcggaggcaccaaggtggaaatcaaactcgaggacctgaagaacgtgttcccacctgaggtggccgtgttcgagcctagcgaggccgagatcagccacacccagaaagccaccctcgtgtgcctggctaccggcttctaccccgaccatgtggaactgtcttggtgggtcaacggcaaagaggtgcacagcggcgtgtgtaccgacccccagccactgaaagaacagcccgccctgaacgacagccggtactgcctgagcagcagactgagagtgtccgccaccttctggcagaacccccggaaccacttcagatgccaggtgcagttctacggcctgagcgagaacgacgagtggacccaggacagagccaagcccgtgacccagatcgtgtctgccgaagcctggggcagagccgattgcgacgtgaagctggtggaaaagagcttcgagacagacaccaacctgaacttccagaacctgagcgtgatcggcttcagaatcctgctgctgaaagtggccggctttaacctgctgatgaccctgcggctgtggtccagcagggccaagcgatctggatctggagcaacaaacttctcactactcaaacaagcaggtgacgtggaggagaatcccgggcctactagtatggactggatttggcgcatccttttccttgtcggcgctgctaccggcgcgcattccttcgaacaggttcagctgcaagagtctggccccggactggtcaagcctagccaaacactgagcctgacctgtaccgtgtccggctacagcatcaccagcgactacacctggaactggatcagacagcctcctggcaacggactggaatggatcggctacatcacctacagcggcagcaccagctacaaccccagcctgaaaagccgggtgctgatctccgtggacaccagcaagaatcaggtgtccctgaagctgagcagcgtgacagccgctgataccgccgtgtactactgtgccagactggggagaagatacacaatggactactggggccagggcaccaccgtgacagtttcttctacgcgtatccagaaccctgatcctgccgtgtaccagctgcgggatagcaagagcagcgacaagagcgtgtgtctgttcaccgacttcgacagccagaccaacgtgtcccagagcaaggactccgacgtgtacatcaccgataagtgcgtgctggacatgcggagcatggacttcaagagcaactccgccgtggcctggtccaacaagtccgatttcgcctgcgccaacgccttcaacaacagcattatccccgaggacacattcttcccaagccccgagagcagctgcggctttaccagcgagagctaccagcagggcgtgctgagcgccaccatcctgtacgagatcctgctgggcaaggccaccctgtacgccgtgctggtgtctgccctggtgctgatggctatggtcaagcggaaggacagccggggataa

SEQ ID NO: 38640 - DNA, 2298 bp, synthetic construct
  source 1..2298: mol_type = other DNA
atggccttaccagtgaccgccttgctcctgccgctggccttgctgctccacgccgccaggccggaagtgcagctggttgaatctggcggaggactggttcagcctggcggatctctgagactgagctgtgaagccagcggcttcgccagcgacgattacatcatcggctggttcagacaggcccctggcaaagagagagagggcgtcagctgcatcagctctaagtacgccaacaccgtgtacaccgacagcgtgaagggcagattcagactgagcagaggcaccgccaagaataccgtgtacctccagatgagcgccctgaagcctgaggataccgccgtgtactactgcgctatggacagccgcagagtgacatgccctgagatcagcaccatgcaccggaacttcgattcttggggccagggcacactggtcacagtgtcatctggtaccggcggaggcggatctggcggcggaggtagcggtggcggaggatctgaattcgacgtggtcatgacacagagcccttctagcctgtctgccagcgtgggcgacagagtgaccatcacctgtatggcctccgaggacatctacatccggctggcctggtatcagcagaagcctggaaacgcccctaagctgctgatctacgccgccacctctctggaaacaggcgtgccaagcagattttccggcagcggctctggcaccgatttcaccctgacaatatccagcctccagcctgaggacttcgccacctactactgccagcagtattggagcagcccctggacatttggcggaggcaccaaggtggaaatcaaactcgaggacctgaagaacgtgttcccacctgaggtggccgtgttcgagcctagcgaggccgagatcagccacacccagaaagccaccctcgtgtgcctggctaccggcttctaccccgaccatgtggaactgtcttggtgggtcaacggcaaagaggtgcacagcggcgtgtgtaccgacccccagccactgaaagaacagcccgccctgaacgacagccggtactgcctgagcagcagactgagagtgtccgccaccttctggcagaacccccggaaccacttcagatgccaggtgcagttctacggcctgagcgagaacgacgagtggacccaggacagagccaagcccgtgacccagatcgtgtctgccgaagcctggggcagagccgattgcgacgtgaagctggtggaaaagagcttcgagacagacaccaacctgaacttccagaacctgagcgtgatcggcttcagaatcctgctgctgaaagtggccggctttaacctgctgatgaccctgcggctgtggtccagcagggccaagcgatctggatctggagcaacaaacttctcactactcaaacaagcaggtgacgtggaggagaatcccgggcctactagtatggactggatttggcgcatccttttccttgtcggcgctgctaccggcgcgcattccttcgaacaggttcagctgcaagagtctggccccggactggtcaagcctagccaaacactgagcctgacctgtaccgtgtccggctacagcatcaccagcgactacacctggaactggatcagacagcctcctggcaacggactggaatggatcggctacatcacctacagcggcagcaccagctacaaccccagcctgaaaagccgggtgctgatctccgtggacaccagcaagaatcaggtgtccctgaagctgagcagcgtgacagccgctgataccgccgtgtactactgtgccagactggggagaagatacacaatggactactggggccagggcaccaccgtgacagtttcttctacgcgtatccagaaccctgatcctgccgtgtaccagctgcgggatagcaagagcagcgacaagagcgtgtgtctgttcaccgacttcgacagccagaccaacgtgtcccagagcaaggactccgacgtgtacatcaccgataagtgcgtgctggacatgcggagcatggacttcaagagcaactccgccgtggcctggtccaacaagtccgatttcgcctgcgccaacgccttcaacaacagcattatccccgaggacacattcttcccaagccccgagagcagctgcggctttaccagcgagagctaccagcagggcgtgctgagcgccaccatcctgtacgagatcctgctgggcaaggccaccctgtacgccgtgctggtgtctgccctggtgctgatggctatggtcaagcggaaggacagccggggataa

SEQ ID NO: 38641 - DNA, 2295 bp, synthetic construct
  source 1..2295: mol_type = other DNA
atggccttaccagtgaccgccttgctcctgccgctggccttgctgctccacgccgccaggccggaagtgcagctggttgaatctggcggaggactggttcagcctggcggatctctgagactgtcttgtgccgcctctggcttcgccagcgactactatatcatcggctggttcagacaggcccctggcaaagagagagagggcgtcagctgtatcagcagcagatacgccaacaccaactacgccgacagcgtgaagggcagattcaccatcagccgggacaacgccaagaacaccgtgtacctccagatgaacagcctgaagcctgaggacaccgccgtgtactactgtgccgccgacaccagaagatacacctgtcctgacattgccaccatgcaccggaacttcgattcttggggccagggcacactggtcaccgtttcttctggtaccggcggaggcggatctggcggcggaggtagcggtggcggaggatctgaattcgacgtggtcatgacacagagcccttctagcctgtctgccagcgtgggcgacagagtgaccatcacctgtatggcctccgaggacatctacatccggctggcctggtatcagcagaagcctggaaacgcccctaagctgctgatctacgccgccacctctctggaaacaggcgtgccaagcagattttccggcagcggctctggcaccgatttcaccctgacaatatccagcctccagcctgaggacttcgccacctactactgccagcagtattggagcagcccctggacatttggcggaggcaccaaggtggaaatcaaactcgagatccagaaccctgatcctgccgtgtaccagctgcgggatagcaagagcagcgacaagagcgtgtgtctgttcaccgacttcgacagccagaccaacgtgtcccagagcaaggactccgacgtgtacatcaccgataagtgcgtgctggacatgcggagcatggacttcaagagcaactccgccgtggcctggtccaacaagtccgatttcgcctgcgccaacgccttcaacaacagcattatccccgaggacacattcttcccaagccccgagagcagctgcggctttaccagcgagagctaccagcagggcgtgctgagcgccaccatcctgtacgagatcctgctgggcaaggccaccctgtacgccgtgctggtgtctgccctggtgctgatggctatggtcaagcggaaggacagccggggaagggccaagcgatctggatctggagcaacaaacttctcactactcaaacaagcaggtgacgtggaggagaatcccgggcctactagtatggactggatttggcgcatccttttccttgtcggcgctgctaccggcgcgcattccttcgaacaggttcagctgcaagagtctggccccggactggtcaagcctagccaaacactgagcctgacctgtaccgtgtccggctacagcatcaccagcgactacacctggaactggatcagacagcctcctggcaacggactggaatggatcggctacatcacctacagcggcagcaccagctacaaccccagcctgaaaagccgggtgctgatctccgtggacaccagcaagaatcaggtgtccctgaagctgagcagcgtgacagccgctgataccgccgtgtactactgtgccagactggggagaagatacacaatggactactggggccagggcaccaccgtgacagtttcttctacgcgtgacctgaagaacgtgttcccacctgaggtggccgtgttcgagcctagcgaggccgagatcagccacacccagaaagccaccctcgtgtgcctggctaccggcttctaccccgaccatgtggaactgtcttggtgggtcaacggcaaagaggtgcacagcggcgtgtgtaccgacccccagccactgaaagaacagcccgccctgaacgacagccggtactgcctgagcagcagactgagagtgtccgccaccttctggcagaacccccggaaccacttcagatgccaggtgcagttctacggcctgagcgagaacgacgagtggacccaggacagagccaagcccgtgacccagatcgtgtctgccgaagcctggggcagagccgattgcgacgtgaagctggtggaaaagagcttcgagacagacaccaacctgaacttccagaacctgagcgtgatcggcttcagaatcctgctgctgaaagtggccggctttaacctgctgatgaccctgcggctgtggtccagc

SEQ ID NO: 38642 - DNA, 2295 bp, synthetic construct
  source 1..2295: mol_type = other DNA
atggccttaccagtgaccgccttgctcctgccgctggccttgctgctccacgccgccaggccggaagtgcagctggttgaatctggcggaggactggttcagcctggcggatctctgagactgagctgtgaagccagcggcttcgccagcgacgattacatcatcggctggttcagacaggcccctggcaaagagagagagggcgtcagctgcatcagctctaagtacgccaacaccgtgtacaccgacagcgtgaagggcagattcagactgagcagaggcaccgccaagaataccgtgtacctccagatgagcgccctgaagcctgaggataccgccgtgtactactgcgctatggacagccgcagagtgacatgccctgagatcagcaccatgcaccggaacttcgattcttggggccagggcacactggtcacagtgtcatctggtaccggcggaggcggatctggcggcggaggtagcggtggcggaggatctgaattcgacgtggtcatgacacagagcccttctagcctgtctgccagcgtgggcgacagagtgaccatcacctgtatggcctccgaggacatctacatccggctggcctggtatcagcagaagcctggaaacgcccctaagctgctgatctacgccgccacctctctggaaacaggcgtgccaagcagattttccggcagcggctctggcaccgatttcaccctgacaatatccagcctccagcctgaggacttcgccacctactactgccagcagtattggagcagcccctggacatttggcggaggcaccaaggtggaaatcaaactcgagatccagaaccctgatcctgccgtgtaccagctgcgggatagcaagagcagcgacaagagcgtgtgtctgttcaccgacttcgacagccagaccaacgtgtcccagagcaaggactccgacgtgtacatcaccgataagtgcgtgctggacatgcggagcatggacttcaagagcaactccgccgtggcctggtccaacaagtccgatttcgcctgcgccaacgccttcaacaacagcattatccccgaggacacattcttcccaagccccgagagcagctgcggctttaccagcgagagctaccagcagggcgtgctgagcgccaccatcctgtacgagatcctgctgggcaaggccaccctgtacgccgtgctggtgtctgccctggtgctgatggctatggtcaagcggaaggacagccggggaagggccaagcgatctggatctggagcaacaaacttctcactactcaaacaagcaggtgacgtggaggagaatcccgggcctactagtatggactggatttggcgcatccttttccttgtcggcgctgctaccggcgcgcattccttcgaacaggttcagctgcaagagtctggccccggactggtcaagcctagccaaacactgagcctgacctgtaccgtgtccggctacagcatcaccagcgactacacctggaactggatcagacagcctcctggcaacggactggaatggatcggctacatcacctacagcggcagcaccagctacaaccccagcctgaaaagccgggtgctgatctccgtggacaccagcaagaatcaggtgtccctgaagctgagcagcgtgacagccgctgataccgccgtgtactactgtgccagactggggagaagatacacaatggactactggggccagggcaccaccgtgacagtttcttctacgcgtgacctgaagaacgtgttcccacctgaggtggccgtgttcgagcctagcgaggccgagatcagccacacccagaaagccaccctcgtgtgcctggctaccggcttctaccccgaccatgtggaactgtcttggtgggtcaacggcaaagaggtgcacagcggcgtgtgtaccgacccccagccactgaaagaacagcccgccctgaacgacagccggtactgcctgagcagcagactgagagtgtccgccaccttctggcagaacccccggaaccacttcagatgccaggtgcagttctacggcctgagcgagaacgacgagtggacccaggacagagccaagcccgtgacccagatcgtgtctgccgaagcctggggcagagccgattgcgacgtgaagctggtggaaaagagcttcgagacagacaccaacctgaacttccagaacctgagcgtgatcggcttcagaatcctgctgctgaaagtggccggctttaacctgctgatgaccctgcggctgtggtccagc

SEQ ID NO: 38643 - DNA, 2268 bp, synthetic construct
  source 1..2268: mol_type = other DNA
atggccttaccagtgaccgccttgctcctgccgctggccttgctgctccacgccgccaggccgcaagtcaaactggaagaaagcggtggcggcctggtgcaacctggcgaatctctgagactgagctgtagcgccagcggctccatcttcaaggtgttcagagtgttcgccatgagctggtacaggcaaggccctggcaagcagagagagctggtcgcctctatcagcagcggcgagacaaccacatacgccgaatctgtgaaaggccggttcaccatcagccgggataatgccaagaataccgcctatctccagatggactccctgaagcctgaagatacagctgtgtactactgcaacgccgaccataccttcaccggcgatttttggggccagggaacccaagtgaccgtgtctagtggtaccggcggaggcggatctggcggcggaggtagcggtggcggaggatctgaattcgacgtggtcatgacacagagcccttctagcctgtctgccagcgtgggcgacagagtgaccatcacctgtatggcctccgaggacatctacatccggctggcctggtatcagcagaagcctggaaacgcccctaagctgctgatctacgccgccacctctctggaaacaggcgtgccaagcagattttccggcagcggctctggcaccgatttcaccctgacaatatccagcctccagcctgaggacttcgccacctactactgccagcagtattggagcagcccctggacatttggcggaggcaccaaggtggaaatcaaactcgagatccagaaccctgatcctgccgtgtaccagctgcgggatagcaagagcagcgacaagagcgtgtgtctgttcaccgacttcgacagccagaccaacgtgtcccagagcaaggactccgacgtgtacatcaccgataagtgcgtgctggacatgcggagcatggacttcaagagcaactccgccgtggcctggtccaacaagtccgatttcgcctgcgccaacgccttcaacaacagcattatccccgaggacacattcttcccaagccccgagagcagctgcggctttaccagcgagagctaccagcagggcgtgctgagcgccaccatcctgtacgagatcctgctgggcaaggccaccctgtacgccgtgctggtgtctgccctggtgctgatggctatggtcaagcggaaggacagccggggaagggccaagcgatctggatctggagcaacaaacttctcactactcaaacaagcaggtgacgtggaggagaatcccgggcctactagtatggactggatttggcgcatccttttccttgtcggcgctgctaccggcgcgcattccttcgaacaggttcagctgcaagagtctggccccggactggtcaagcctagccaaacactgagcctgacctgtaccgtgtccggctacagcatcaccagcgactacacctggaactggatcagacagcctcctggcaacggactggaatggatcggctacatcacctacagcggcagcaccagctacaaccccagcctgaaaagccgggtgctgatctccgtggacaccagcaagaatcaggtgtccctgaagctgagcagcgtgacagccgctgataccgccgtgtactactgtgccagactggggagaagatacacaatggactactggggccagggcaccaccgtgacagtttcttctacgcgtgacctgaagaacgtgttcccacctgaggtggccgtgttcgagcctagcgaggccgagatcagccacacccagaaagccaccctcgtgtgcctggctaccggcttctaccccgaccatgtggaactgtcttggtgggtcaacggcaaagaggtgcacagcggcgtgtgtaccgacccccagccactgaaagaacagcccgccctgaacgacagccggtactgcctgagcagcagactgagagtgtccgccaccttctggcagaacccccggaaccacttcagatgccaggtgcagttctacggcctgagcgagaacgacgagtggacccaggacagagccaagcccgtgacccagatcgtgtctgccgaagcctggggcagagccgattgcgacgtgaagctggtggaaaagagcttcgagacagacaccaacctgaacttccagaacctgagcgtgatcggcttcagaatcctgctgctgaaagtggccggctttaacctgctgatgaccctgcggctgtggtccagc

SEQ ID NO: 38644 - DNA, 2274 bp, synthetic construct
  source 1..2274: mol_type = other DNA
atggccttaccagtgaccgccttgctcctgccgctggccttgctgctccacgccgccaggccggacgtggtcatgacacagagcccttctagcctgtctgccagcgtgggcgacagagtgaccatcacctgtatggcctccgaggacatctacatccggctggcctggtatcagcagaagcctggaaacgcccctaagctgctgatctacgccgccacctctctggaaacaggcgtgccaagcagattttccggcagcggctctggcaccgatttcaccctgacaatatccagcctccagcctgaggacttcgccacctactactgccagcagtattggagcagcccctggacatttggcggaggcaccaaggtggaaatcaaactcgaggacctgaagaacgtgttcccacctgaggtggccgtgttcgagcctagcgaggccgagatcagccacacccagaaagccaccctcgtgtgcctggctaccggcttctaccccgaccatgtggaactgtcttggtgggtcaacggcaaagaggtgcacagcggcgtgtgtaccgacccccagccactgaaagaacagcccgccctgaacgacagccggtactgcctgagcagcagactgagagtgtccgccaccttctggcagaacccccggaaccacttcagatgccaggtgcagttctacggcctgagcgagaacgacgagtggacccaggacagagccaagcccgtgacccagatcgtgtctgccgaagcctggggcagagccgattgcgacgtgaagctggtggaaaagagcttcgagacagacaccaacctgaacttccagaacctgagcgtgatcggcttcagaatcctgctgctgaaagtggccggctttaacctgctgatgaccctgcggctgtggtccagcagggccaagcgatctggatctggagcaacaaacttctcactactcaaacaagcaggtgacgtggaggagaatcccgggcctactagtgccaccatggactggatttggcgcatccttttccttgtcggcgctgctaccggcgcccattccgggcccgaagtgcagctggttgaatctggcggaggactggttcaggctggcggatctctgagactgtcttgtgccgccagcggcagaacctttagcatgggctggtttagacaggcccctggcaaagagagagagttcgtcgccgccatcacatactctggcggcagcccttactacgccgactctgtgaagggcagattcaccatcagccgggacaacgccaagaacaccgtgtacctccagatgaacagcctgaagcctgaggacaccgccgtgtactactgcgccgccaatccaacatacggcagcgactggaacgccgagaattggggccagggaacccaagtgacagtgtctagcggatccggcggcggaggatctggcggaggcggatctgggggcggaggctctttcgaacaggttcagctgcaagagtctggccccggactggtcaagcctagccaaacactgagcctgacctgtaccgtgtccggctacagcatcaccagcgactacacctggaactggatcagacagcctcctggcaacggactggaatggatcggctacatcacctacagcggcagcaccagctacaaccccagcctgaaaagccgggtgctgatctccgtggacaccagcaagaatcaggtgtccctgaagctgagcagcgtgacagccgctgataccgccgtgtactactgtgccagactggggagaagatacacaatggactactggggccagggcaccaccgtgacagtttcttctacgcgtatccagaaccctgatcctgccgtgtaccagctgcgggatagcaagagcagcgacaagagcgtgtgtctgttcaccgacttcgacagccagaccaacgtgtcccagagcaaggactccgacgtgtacatcaccgataagtgcgtgctggacatgcggagcatggacttcaagagcaactccgccgtggcctggtccaacaagtccgatttcgcctgcgccaacgccttcaacaacagcattatccccgaggacacattcttcccaagccccgagagcagctgcggctttaccagcgagagctaccagcagggcgtgctgagcgccaccatcctgtacgagatcctgctgggcaaggccaccctgtacgccgtgctggtgtctgccctggtgctgatggctatggtcaagcggaaggacagccggggataa

SEQ ID NO: 38645 - DNA, 2277 bp, synthetic construct
  source 1..2277: mol_type = other DNA
atggccttaccagtgaccgccttgctcctgccgctggccttgctgctccacgccgccaggccggacgtggtcatgacacagagcccttctagcctgtctgccagcgtgggcgacagagtgaccatcacctgtatggcctccgaggacatctacatccggctggcctggtatcagcagaagcctggaaacgcccctaagctgctgatctacgccgccacctctctggaaacaggcgtgccaagcagattttccggcagcggctctggcaccgatttcaccctgacaatatccagcctccagcctgaggacttcgccacctactactgccagcagtattggagcagcccctggacatttggcggaggcaccaaggtggaaatcaaactcgaggacctgaagaacgtgttcccacctgaggtggccgtgttcgagcctagcgaggccgagatcagccacacccagaaagccaccctcgtgtgcctggctaccggcttctaccccgaccatgtggaactgtcttggtgggtcaacggcaaagaggtgcacagcggcgtgtgtaccgacccccagccactgaaagaacagcccgccctgaacgacagccggtactgcctgagcagcagactgagagtgtccgccaccttctggcagaacccccggaaccacttcagatgccaggtgcagttctacggcctgagcgagaacgacgagtggacccaggacagagccaagcccgtgacccagatcgtgtctgccgaagcctggggcagagccgattgcgacgtgaagctggtggaaaagagcttcgagacagacaccaacctgaacttccagaacctgagcgtgatcggcttcagaatcctgctgctgaaagtggccggctttaacctgctgatgaccctgcggctgtggtccagcagggccaagcgatctggatctggagcaacaaacttctcactactcaaacaagcaggtgacgtggaggagaatcccgggcctactagtgccaccatggactggatttggcgcatccttttccttgtcggcgctgctaccggcgcccattccgggcccgaagtgcaactggtggaatctgggggcggactggtgcagccaggcggaagtctgaggctgtcttgtgccgcctccggcagcatcttcggcttcaacgacatggcctggtatcggcaggctcccggaaaacagcgcgagctggtggctctgattagcagagtgggcgtgaccagcagcgccgactctgtgaagggcagattcacaatctccagagtgaacgccaaggatacagtgtacctccagatgaactctctgaaacctgaggatacagcagtgtactattgctacatggaccagcggctggacggcagcacactggcctactggggacagggaactcaagtgacagtgtctagcggatccggcggcggaggatctggcggaggcggatctgggggcggaggctctttcgaacaggttcagctgcaagagtctggccccggactggtcaagcctagccaaacactgagcctgacctgtaccgtgtccggctacagcatcaccagcgactacacctggaactggatcagacagcctcctggcaacggactggaatggatcggctacatcacctacagcggcagcaccagctacaaccccagcctgaaaagccgggtgctgatctccgtggacaccagcaagaatcaggtgtccctgaagctgagcagcgtgacagccgctgataccgccgtgtactactgtgccagactggggagaagatacacaatggactactggggccagggcaccaccgtgacagtttcttctacgcgtatccagaaccctgatcctgccgtgtaccagctgcgggatagcaagagcagcgacaagagcgtgtgtctgttcaccgacttcgacagccagaccaacgtgtcccagagcaaggactccgacgtgtacatcaccgataagtgcgtgctggacatgcggagcatggacttcaagagcaactccgccgtggcctggtccaacaagtccgatttcgcctgcgccaacgccttcaacaacagcattatccccgaggacacattcttcccaagccccgagagcagctgcggctttaccagcgagagctaccagcagggcgtgctgagcgccaccatcctgtacgagatcctgctgggcaaggccaccctgtacgccgtgctggtgtctgccctggtgctgatggctatggtcaagcggaaggacagccggggataa

SEQ ID NO: 38646 - DNA, 2265 bp, synthetic construct
  source 1..2265: mol_type = other DNA
atggccttaccagtgaccgccttgctcctgccgctggccttgctgctccacgccgccaggccggacgtggtcatgacacagagcccttctagcctgtctgccagcgtgggcgacagagtgaccatcacctgtatggcctccgaggacatctacatccggctggcctggtatcagcagaagcctggaaacgcccctaagctgctgatctacgccgccacctctctggaaacaggcgtgccaagcagattttccggcagcggctctggcaccgatttcaccctgacaatatccagcctccagcctgaggacttcgccacctactactgccagcagtattggagcagcccctggacatttggcggaggcaccaaggtggaaatcaaactcgaggacctgaagaacgtgttcccacctgaggtggccgtgttcgagcctagcgaggccgagatcagccacacccagaaagccaccctcgtgtgcctggctaccggcttctaccccgaccatgtggaactgtcttggtgggtcaacggcaaagaggtgcacagcggcgtgtgtaccgacccccagccactgaaagaacagcccgccctgaacgacagccggtactgcctgagcagcagactgagagtgtccgccaccttctggcagaacccccggaaccacttcagatgccaggtgcagttctacggcctgagcgagaacgacgagtggacccaggacagagccaagcccgtgacccagatcgtgtctgccgaagcctggggcagagccgattgcgacgtgaagctggtggaaaagagcttcgagacagacaccaacctgaacttccagaacctgagcgtgatcggcttcagaatcctgctgctgaaagtggccggctttaacctgctgatgaccctgcggctgtggtccagcagggccaagcgatctggatctggagcaacaaacttctcactactcaaacaagcaggtgacgtggaggagaatcccgggcctactagtgccaccatggactggatttggcgcatccttttccttgtcggcgctgctaccggcgcccattccgggcccgaggtgcagctggttgaatctggcggaggactggttcaggctggcggatctctgagactgtcttgtgccgccagcggctctgtgttcagcggcaatgtgatgggctggtacagacaggcccctggcaaagaaagagagtgggttgccgccattgccagcggcggcagcatctactacagagactctgtgaagggcagattcaccatcagccgggacaacgccaagaacaccgtgtacctccagatgaacagcctgaagcctgaggacaccgccgtgtactactgcaactctcaccctcctacactgccctattggggcctgggaacccaagtgacagtgtcctctggatccggcggcggaggatctggcggaggcggatctgggggcggaggctctttcgaacaggttcagctgcaagagtctggccccggactggtcaagcctagccaaacactgagcctgacctgtaccgtgtccggctacagcatcaccagcgactacacctggaactggatcagacagcctcctggcaacggactggaatggatcggctacatcacctacagcggcagcaccagctacaaccccagcctgaaaagccgggtgctgatctccgtggacaccagcaagaatcaggtgtccctgaagctgagcagcgtgacagccgctgataccgccgtgtactactgtgccagactggggagaagatacacaatggactactggggccagggcaccaccgtgacagtttcttctacgcgtatccagaaccctgatcctgccgtgtaccagctgcgggatagcaagagcagcgacaagagcgtgtgtctgttcaccgacttcgacagccagaccaacgtgtcccagagcaaggactccgacgtgtacatcaccgataagtgcgtgctggacatgcggagcatggacttcaagagcaactccgccgtggcctggtccaacaagtccgatttcgcctgcgccaacgccttcaacaacagcattatccccgaggacacattcttcccaagccccgagagcagctgcggctttaccagcgagagctaccagcagggcgtgctgagcgccaccatcctgtacgagatcctgctgggcaaggccaccctgtacgccgtgctggtgtctgccctggtgctgatggctatggtcaagcggaaggacagccggggataa

SEQ ID NO: 38647 - DNA, 2259 bp, synthetic construct
  source 1..2259: mol_type = other DNA
atggccttaccagtgaccgccttgctcctgccgctggccttgctgctccacgccgccaggccggacgtggtcatgacacagagcccttctagcctgtctgccagcgtgggcgacagagtgaccatcacctgtatggcctccgaggacatctacatccggctggcctggtatcagcagaagcctggaaacgcccctaagctgctgatctacgccgccacctctctggaaacaggcgtgccaagcagattttccggcagcggctctggcaccgatttcaccctgacaatatccagcctccagcctgaggacttcgccacctactactgccagcagtattggagcagcccctggacatttggcggaggcaccaaggtggaaatcaaactcgaggacctgaagaacgtgttcccacctgaggtggccgtgttcgagcctagcgaggccgagatcagccacacccagaaagccaccctcgtgtgcctggctaccggcttctaccccgaccatgtggaactgtcttggtgggtcaacggcaaagaggtgcacagcggcgtgtgtaccgacccccagccactgaaagaacagcccgccctgaacgacagccggtactgcctgagcagcagactgagagtgtccgccaccttctggcagaacccccggaaccacttcagatgccaggtgcagttctacggcctgagcgagaacgacgagtggacccaggacagagccaagcccgtgacccagatcgtgtctgccgaagcctggggcagagccgattgcgacgtgaagctggtggaaaagagcttcgagacagacaccaacctgaacttccagaacctgagcgtgatcggcttcagaatcctgctgctgaaagtggccggctttaacctgctgatgaccctgcggctgtggtccagcagggccaagcgatctggatctggagcaacaaacttctcactactcaaacaagcaggtgacgtggaggagaatcccgggcctactagtgccaccatggactggatttggcgcatccttttccttgtcggcgctgctaccggcgcccattccgggcccgaagttcagctgctggaatctggcggaggactcgttcaacctggcggctctctgagactgagctgtgccgcttctggcttcagcttctctagctacgccctgagctgggttcgacaagctcccggaaagggccttgaatgggtgtccagcatcggcgagaatgacggcaccacagactatgccgatgccgtgaaaggccggtttaccatcagcagagacaattccaagaacacgctctatctgcaaatgaactccctgcgcgtggaagatacagccgtgtattattgcgtgaaggacggcatccactggggacagggaaccctggttacagtgtctagcggatccggcggcggaggatctggcggaggcggatctgggggcggaggctctttcgaacaggttcagctgcaagagtctggccccggactggtcaagcctagccaaacactgagcctgacctgtaccgtgtccggctacagcatcaccagcgactacacctggaactggatcagacagcctcctggcaacggactggaatggatcggctacatcacctacagcggcagcaccagctacaaccccagcctgaaaagccgggtgctgatctccgtggacaccagcaagaatcaggtgtccctgaagctgagcagcgtgacagccgctgataccgccgtgtactactgtgccagactggggagaagatacacaatggactactggggccagggcaccaccgtgacagtttcttctacgcgtatccagaaccctgatcctgccgtgtaccagctgcgggatagcaagagcagcgacaagagcgtgtgtctgttcaccgacttcgacagccagaccaacgtgtcccagagcaaggactccgacgtgtacatcaccgataagtgcgtgctggacatgcggagcatggacttcaagagcaactccgccgtggcctggtccaacaagtccgatttcgcctgcgccaacgccttcaacaacagcattatccccgaggacacattcttcccaagccccgagagcagctgcggctttaccagcgagagctaccagcagggcgtgctgagcgccaccatcctgtacgagatcctgctgggcaaggccaccctgtacgccgtgctggtgtctgccctggtgctgatggctatggtcaagcggaaggacagccggggataa

SEQ ID NO: 38648 - DNA, 3366 bp, synthetic construct
  source 1..3366: mol_type = other DNA
atgggacccagactgctgttttgggctctgctgtgtctgctcggcacaggacctgttgaagctggcgtgacacagagccccacacacctgattaagaccagaggccagcaggccacactgagatgcagccctatcagcggccacaccagcgtgtactggtatcagcaggctctcggactgggcctccagttcctgctttggtacgacgagggcgaagagagaaaccggggcaacttccctcctcggttttccggcagacagttccccaactacagcagcgagctgaacgtgaacgccctggaactggaagatagcgccctgtacctgtgtgcctcttctcttggtggacctcgcggactggctggactgagaggggatgagcagtttttcggccctggcaccagactgaccgtgctggaaggtaccggcggaggcggatctggcggcggagaattcgacgtggtcatgacacagagcccttctagcctgtctgccagcgtgggcgacagagtgaccatcacctgtatggcctccgaggacatctacatccggctggcctggtatcagcagaagcctggaaacgcccctaagctgctgatctacgccgccacctctctggaaacaggcgtgccaagcagattttccggcagcggctctggcaccgatttcaccctgacaatatccagcctccagcctgaggacttcgccacctactactgccagcagtattggagcagcccctggacatttggcggaggcaccaaggtggaaatcaaactcgaggacctgaagaacgtgttcccacctgaggtggccgtgttcgagcctagcgaggccgagatcagccacacccagaaagccaccctcgtgtgcctggctaccggcttctaccccgaccatgtggaactgtcttggtgggtcaacggcaaagaggtgcacagcggcgtgtgtaccgacccccagccactgaaagaacagcccgccctgaacgacagccggtactgcctgagcagcagactgagagtgtccgccaccttctggcagaacccccggaaccacttcagatgccaggtgcagttctacggcctgagcgagaacgacgagtggacccaggacagagccaagcccgtgacccagatcgtgtctgccgaagcctggggcagagccgattgcgacgtgaagctggtggaaaagagcttcgagacagacaccaacctgaacttccagaacctgagcgtgatcggcttcagaatcctgctgctgaaagtggccggctttaacctgctgatgaccctgcggctgtggtccagcagggccaagcgatctggatctggagcaacaaacttctcactactcaaacaagcaggtgacgtggaggagaatcccgggcctactagtgccaccatggactggatttggcgcatccttttccttgtcggcgctgctaccggcgcccattccgggcccgaagtgcagctggttgaatctggcggaggactggttcaggctggcggatctctgagactgtcttgtgccgccagcggcagaacctttagcatgggctggtttagacaggcccctggcaaagagagagagttcgtcgccgccatcacatactctggcggcagcccttactacgccgactctgtgaagggcagattcaccatcagccgggacaacgccaagaacaccgtgtacctccagatgaacagcctgaagcctgaggacaccgccgtgtactactgcgccgccaatccaacatacggcagcgactggaacgccgagaattggggccagggaacccaagtgacagtgtctagcggatccggcggcggaggatctggcggaggcggatctgggggcggaggctctttcgaacaggttcagctgcaagagtctggccccggactggtcaagcctagccaaacactgagcctgacctgtaccgtgtccggctacagcatcaccagcgactacacctggaactggatcagacagcctcctggcaacggactggaatggatcggctacatcacctacagcggcagcaccagctacaaccccagcctgaaaagccgggtgctgatctccgtggacaccagcaagaatcaggtgtccctgaagctgagcagcgtgacagccgctgataccgccgtgtactactgtgccagactggggagaagatacacaatggactactggggccagggcaccaccgtgacagtttcttctacgcgtatccagaaccctgatcctgccgtgtaccagctgcgggatagcaagagcagcgacaagagcgtgtgtctgttcaccgacttcgacagccagaccaacgtgtcccagagcaaggactccgacgtgtacatcaccgataagtgcgtgctggacatgcggagcatggacttcaagagcaactccgccgtggcctggtccaacaagtccgatttcgcctgcgccaacgccttcaacaacagcattatccccgaggacacattcttcccaagccccgagagcagctgcggctttaccagcgagagctaccagcagggcgtgctgagcgccaccatcctgtacgagatcctgctgggcaaggccaccctgtacgccgtgctggtgtctgccctggtgctgatggctatggtcaagcggaaggacagccggggacgcgccaagagaagcggatctggcgtgaagcagaccctgaatttcgacctgctgaagctggctggcgacgtggaatccaacccaggcccttctagaggccatatgaccgagtacaagcccacggtgcgcctcgccacccgcgacgacgtccccagggccgtacgcaccctcgccgccgcgttcgccgactaccccgccacgcgccacaccgtcgatccggaccgccacatcgagcgggtcaccgagctgcaagaactcttcctcacgcgcgtcgggctcgacatcggcaaggtgtgggtcgcggacgacggcgccgcggtggcggtctggaccacgccggagagcgtcgaagcgggggcggtgttcgccgagatcggcccgcgcatggccgagttgagcggttcccggctggccgcgcagcaacagatggaaggcctcctggcgccgcaccggcccaaggagcccgcgtggttcctggccaccgtcggcgtctcgcccgaccaccagggcaagggtctgggcagcgccgtcgtgctccccggagtggaggcggccgagcgcgccggggtgcccgccttcctggagacctccgcgccccgcaacctccccttctacgagcggctcggcttcaccgtcaccgccgacgtcgaggtgcccgaaggaccgcgcacctggtgcatgacccgcaagcccggtgcctga

SEQ ID NO: 38649 - DNA, 3363 bp, synthetic construct
  source 1..3363: mol_type = other DNA
atgggacccagactgctgttttgggctctgctgtgtctgctcggcacaggacctgttgaagctggcgtgacacagagccccacacacctgattaagaccagaggccagcaggccacactgagatgcagccctatcagcggccacaccagcgtgtactggtatcagcaggctctcggactgggcctccagttcctgctttggtacgacgagggcgaagagagaaaccggggcaacttccctcctcggttttccggcagacagttccccaactacagcagcgagctgaacgtgaacgccctggaactggaagatagcgccctgtacctgtgtgccagctctctcggcggagatgaactgggagccgatggcaacgagcagttctttggccctggcaccagactgaccgtgctggaaggtaccggcggaggcggatctggcggcggaagcgaattcgacgtggtcatgacacagagcccttctagcctgtctgccagcgtgggcgacagagtgaccatcacctgtatggcctccgaggacatctacatccggctggcctggtatcagcagaagcctggaaacgcccctaagctgctgatctacgccgccacctctctggaaacaggcgtgccaagcagattttccggcagcggctctggcaccgatttcaccctgacaatatccagcctccagcctgaggacttcgccacctactactgccagcagtattggagcagcccctggacatttggcggaggcaccaaggtggaaatcaaactcgaggacctgaagaacgtgttcccacctgaggtggccgtgttcgagcctagcgaggccgagatcagccacacccagaaagccaccctcgtgtgcctggctaccggcttctaccccgaccatgtggaactgtcttggtgggtcaacggcaaagaggtgcacagcggcgtgtgtaccgacccccagccactgaaagaacagcccgccctgaacgacagccggtactgcctgagcagcagactgagagtgtccgccaccttctggcagaacccccggaaccacttcagatgccaggtgcagttctacggcctgagcgagaacgacgagtggacccaggacagagccaagcccgtgacccagatcgtgtctgccgaagcctggggcagagccgattgcgacgtgaagctggtggaaaagagcttcgagacagacaccaacctgaacttccagaacctgagcgtgatcggcttcagaatcctgctgctgaaagtggccggctttaacctgctgatgaccctgcggctgtggtccagcagggccaagcgatctggatctggagcaacaaacttctcactactcaaacaagcaggtgacgtggaggagaatcccgggcctactagtgccaccatggactggatttggcgcatccttttccttgtcggcgctgctaccggcgcccattccgggcccgaagtgcagctggttgaatctggcggaggactggttcaggctggcggatctctgagactgtcttgtgccgccagcggcagaacctttagcatgggctggtttagacaggcccctggcaaagagagagagttcgtcgccgccatcacatactctggcggcagcccttactacgccgactctgtgaagggcagattcaccatcagccgggacaacgccaagaacaccgtgtacctccagatgaacagcctgaagcctgaggacaccgccgtgtactactgcgccgccaatccaacatacggcagcgactggaacgccgagaattggggccagggaacccaagtgacagtgtctagcggatccggcggcggaggatctggcggaggcggatctgggggcggaggctctttcgaacaggttcagctgcaagagtctggccccggactggtcaagcctagccaaacactgagcctgacctgtaccgtgtccggctacagcatcaccagcgactacacctggaactggatcagacagcctcctggcaacggactggaatggatcggctacatcacctacagcggcagcaccagctacaaccccagcctgaaaagccgggtgctgatctccgtggacaccagcaagaatcaggtgtccctgaagctgagcagcgtgacagccgctgataccgccgtgtactactgtgccagactggggagaagatacacaatggactactggggccagggcaccaccgtgacagtttcttctacgcgtatccagaaccctgatcctgccgtgtaccagctgcgggatagcaagagcagcgacaagagcgtgtgtctgttcaccgacttcgacagccagaccaacgtgtcccagagcaaggactccgacgtgtacatcaccgataagtgcgtgctggacatgcggagcatggacttcaagagcaactccgccgtggcctggtccaacaagtccgatttcgcctgcgccaacgccttcaacaacagcattatccccgaggacacattcttcccaagccccgagagcagctgcggctttaccagcgagagctaccagcagggcgtgctgagcgccaccatcctgtacgagatcctgctgggcaaggccaccctgtacgccgtgctggtgtctgccctggtgctgatggctatggtcaagcggaaggacagccggggacgcgccaagagaagcggatctggcgtgaagcagaccctgaatttcgacctgctgaagctggctggcgacgtggaatccaacccaggcccttctagaggccatatgaccgagtacaagcccacggtgcgcctcgccacccgcgacgacgtccccagggccgtacgcaccctcgccgccgcgttcgccgactaccccgccacgcgccacaccgtcgatccggaccgccacatcgagcgggtcaccgagctgcaagaactcttcctcacgcgcgtcgggctcgacatcggcaaggtgtgggtcgcggacgacggcgccgcggtggcggtctggaccacgccggagagcgtcgaagcgggggcggtgttcgccgagatcggcccgcgcatggccgagttgagcggttcccggctggccgcgcagcaacagatggaaggcctcctggcgccgcaccggcccaaggagcccgcgtggttcctggccaccgtcggcgtctcgcccgaccaccagggcaagggtctgggcagcgccgtcgtgctccccggagtggaggcggccgagcgcgccggggtgcccgccttcctggagacctccgcgccccgcaacctccccttctacgagcggctcggcttcaccgtcaccgccgacgtcgaggtgcccgaaggaccgcgcacctggtgcatgacccgcaagcccggtgcctga

SEQ ID NO: 38650 - DNA, 2838 bp, synthetic construct
  source 1..2838: mol_type = other DNA
atggccttaccagtgaccgccttgctcctgccgctggccttgctgctccacgccgccaggccggacgtggtcatgacacagagcccttctagcctgtctgccagcgtgggcgacagagtgaccatcacctgtatggcctccgaggacatctacatccggctggcctggtatcagcagaagcctggaaacgcccctaagctgctgatctacgccgccacctctctggaaacaggcgtgccaagcagattttccggcagcggctctggcaccgatttcaccctgacaatatccagcctccagcctgaggacttcgccacctactactgccagcagtattggagcagcccctggacatttggcggaggcaccaaggtggaaatcaaactcgaggacctgaagaacgtgttcccacctgaggtggccgtgttcgagcctagcgaggccgagatcagccacacccagaaagccaccctcgtgtgcctggctaccggcttctaccccgaccatgtggaactgtcttggtgggtcaacggcaaagaggtgcacagcggcgtgtgtaccgacccccagccactgaaagaacagcccgccctgaacgacagccggtactgcctgagcagcagactgagagtgtccgccaccttctggcagaacccccggaaccacttcagatgccaggtgcagttctacggcctgagcgagaacgacgagtggacccaggacagagccaagcccgtgacccagatcgtgtctgccgaagcctggggcagagccgattgcgacgtgaagctggtggaaaagagcttcgagacagacaccaacctgaacttccagaacctgagcgtgatcggcttcagaatcctgctgctgaaagtggccggctttaacctgctgatgaccctgcggctgtggtccagcagggccaagcgatctggatctggagcaacaaacttctcactactcaaacaagcaggtgacgtggaggagaatcccgggcctactagtgccaccatggactggatttggcgcatccttttccttgtcggcgctgctaccggcgcccattccgggcccatgggaagctggcttgagttctaccacagactcaacgccattgacagcaggctgtgggcacttggcggaagcgaagctgaactcgccgcttttgaaaaagaaattgccgctttcgagtccgagcttcaggcttacaaaggcaaagggaatcctgaggtcgagagcctgagagatcacgctgcccacattagagagtggttgcaggcataccggcacaatggatccggcggcggaggatctggcggaggcggatctgggggcggaggctctttcgaacaggttcagctgcaagagtctggccccggactggtcaagcctagccaaacactgagcctgacctgtaccgtgtccggctacagcatcaccagcgactacacctggaactggatcagacagcctcctggcaacggactggaatggatcggctacatcacctacagcggcagcaccagctacaaccccagcctgaaaagccgggtgctgatctccgtggacaccagcaagaatcaggtgtccctgaagctgagcagcgtgacagccgctgataccgccgtgtactactgtgccagactggggagaagatacacaatggactactggggccagggcaccaccgtgacagtttcttctacgcgtatccagaaccctgatcctgccgtgtaccagctgcgggatagcaagagcagcgacaagagcgtgtgtctgttcaccgacttcgacagccagaccaacgtgtcccagagcaaggactccgacgtgtacatcaccgataagtgcgtgctggacatgcggagcatggacttcaagagcaactccgccgtggcctggtccaacaagtccgatttcgcctgcgccaacgccttcaacaacagcattatccccgaggacacattcttcccaagccccgagagcagctgcggctttaccagcgagagctaccagcagggcgtgctgagcgccaccatcctgtacgagatcctgctgggcaaggccaccctgtacgccgtgctggtgtctgccctggtgctgatggctatggtcaagcggaaggacagccggggacgcgccaagagaagcggatctggcgtgaagcagaccctgaatttcgacctgctgaagctggctggcgacgtggaatccaacccaggcccttctagaggccatatgaccgagtacaagcccacggtgcgcctcgccacccgcgacgacgtccccagggccgtacgcaccctcgccgccgcgttcgccgactaccccgccacgcgccacaccgtcgatccggaccgccacatcgagcgggtcaccgagctgcaagaactcttcctcacgcgcgtcgggctcgacatcggcaaggtgtgggtcgcggacgacggcgccgcggtggcggtctggaccacgccggagagcgtcgaagcgggggcggtgttcgccgagatcggcccgcgcatggccgagttgagcggttcccggctggccgcgcagcaacagatggaaggcctcctggcgccgcaccggcccaaggagcccgcgtggttcctggccaccgtcggcgtctcgcccgaccaccagggcaagggtctgggcagcgccgtcgtgctccccggagtggaggcggccgagcgcgccggggtgcccgccttcctggagacctccgcgccccgcaacctccccttctacgagcggctcggcttcaccgtcaccgccgacgtcgaggtgcccgaaggaccgcgcacctggtgcatgacccgcaagcccggtgcctga

SEQ ID NO: 38651 - DNA, 2838 bp, synthetic construct
  source 1..2838: mol_type = other DNA
atggccttaccagtgaccgccttgctcctgccgctggccttgctgctccacgccgccaggccggcatgcatgggcagttggttcgagttctacgaccggctgaatgccatcgacgccagactgtgggctctcggaggatctgaagctgagctggccgccttcgagaaagagatcgccgcctttgagagcgagctgcaagcctacaaaggcaagggcaaccccgaggtggaaaacctgagagtgcacgccgctgccatcagagaatggctccaggcttacagacacaacggtaccggcggaggcggatctggcggcggaggtagcggtggcggaggatctgaattcgacgtggtcatgacacagagcccttctagcctgtctgccagcgtgggcgacagagtgaccatcacctgtatggcctccgaggacatctacatccggctggcctggtatcagcagaagcctggaaacgcccctaagctgctgatctacgccgccacctctctggaaacaggcgtgccaagcagattttccggcagcggctctggcaccgatttcaccctgacaatatccagcctccagcctgaggacttcgccacctactactgccagcagtattggagcagcccctggacatttggcggaggcaccaaggtggaaatcaaactcgaggacctgaagaacgtgttcccacctgaggtggccgtgttcgagcctagcgaggccgagatcagccacacccagaaagccaccctcgtgtgcctggctaccggcttctaccccgaccatgtggaactgtcttggtgggtcaacggcaaagaggtgcacagcggcgtgtgtaccgacccccagccactgaaagaacagcccgccctgaacgacagccggtactgcctgagcagcagactgagagtgtccgccaccttctggcagaacccccggaaccacttcagatgccaggtgcagttctacggcctgagcgagaacgacgagtggacccaggacagagccaagcccgtgacccagatcgtgtctgccgaagcctggggcagagccgattgcgacgtgaagctggtggaaaagagcttcgagacagacaccaacctgaacttccagaacctgagcgtgatcggcttcagaatcctgctgctgaaagtggccggctttaacctgctgatgaccctgcggctgtggtccagcagggccaagcgatctggatctggagcaacaaacttctcactactcaaacaagcaggtgacgtggaggagaatcccgggcctactagtatggactggatttggcgcatccttttccttgtcggcgctgctaccggcgcgcattccttcgaacaggttcagctgcaagagtctggccccggactggtcaagcctagccaaacactgagcctgacctgtaccgtgtccggctacagcatcaccagcgactacacctggaactggatcagacagcctcctggcaacggactggaatggatcggctacatcacctacagcggcagcaccagctacaaccccagcctgaaaagccgggtgctgatctccgtggacaccagcaagaatcaggtgtccctgaagctgagcagcgtgacagccgctgataccgccgtgtactactgtgccagactggggagaagatacacaatggactactggggccagggcaccaccgtgacagtttcttctacgcgtatccagaaccctgatcctgccgtgtaccagctgcgggatagcaagagcagcgacaagagcgtgtgtctgttcaccgacttcgacagccagaccaacgtgtcccagagcaaggactccgacgtgtacatcaccgataagtgcgtgctggacatgcggagcatggacttcaagagcaactccgccgtggcctggtccaacaagtccgatttcgcctgcgccaacgccttcaacaacagcattatccccgaggacacattcttcccaagccccgagagcagctgcggctttaccagcgagagctaccagcagggcgtgctgagcgccaccatcctgtacgagatcctgctgggcaaggccaccctgtacgccgtgctggtgtctgccctggtgctgatggctatggtcaagcggaaggacagccggggacgcgccaagagaagcggatctggcgtgaagcagaccctgaatttcgacctgctgaagctggctggcgacgtggaatccaacccaggcccttctagaggccatatgaccgagtacaagcccacggtgcgcctcgccacccgcgacgacgtccccagggccgtacgcaccctcgccgccgcgttcgccgactaccccgccacgcgccacaccgtcgatccggaccgccacatcgagcgggtcaccgagctgcaagaactcttcctcacgcgcgtcgggctcgacatcggcaaggtgtgggtcgcggacgacggcgccgcggtggcggtctggaccacgccggagagcgtcgaagcgggggcggtgttcgccgagatcggcccgcgcatggccgagttgagcggttcccggctggccgcgcagcaacagatggaaggcctcctggcgccgcaccggcccaaggagcccgcgtggttcctggccaccgtcggcgtctcgcccgaccaccagggcaagggtctgggcagcgccgtcgtgctccccggagtggaggcggccgagcgcgccggggtgcccgccttcctggagacctccgcgccccgcaacctccccttctacgagcggctcggcttcaccgtcaccgccgacgtcgaggtgcccgaaggaccgcgcacctggtgcatgacccgcaagcccggtgcctga

SEQ ID NO: 38652 - DNA, 3189 bp, synthetic construct
  source 1..3189: mol_type = other DNA
atggccttaccagtgaccgccttgctcctgccgctggccttgctgctccacgccgccaggccggcatgcatggaccccgacctggaaatcagagccgccttcctgcggcagagaaacacagccctgagaacagaggtggccgagctggaacaagaggtgcagcggctggaaaacgaggtgtcccagtacgagacaagatacggccctctcggaggcggaaaaggtaccggcggaggcggatctggcggcggaggtagcggtggcggaggatctgaattcgacgtggtcatgacacagagcccttctagcctgtctgccagcgtgggcgacagagtgaccatcacctgtatggcctccgaggacatctacatccggctggcctggtatcagcagaagcctggaaacgcccctaagctgctgatctacgccgccacctctctggaaacaggcgtgccaagcagattttccggcagcggctctggcaccgatttcaccctgacaatatccagcctccagcctgaggacttcgccacctactactgccagcagtattggagcagcccctggacatttggcggaggcaccaaggtggaaatcaaactcgaggacctgaagaacgtgttcccacctgaggtggccgtgttcgagcctagcgaggccgagatcagccacacccagaaagccaccctcgtgtgcctggctaccggcttctaccccgaccatgtggaactgtcttggtgggtcaacggcaaagaggtgcacagcggcgtgtgtaccgacccccagccactgaaagaacagcccgccctgaacgacagccggtactgcctgagcagcagactgagagtgtccgccaccttctggcagaacccccggaaccacttcagatgccaggtgcagttctacggcctgagcgagaacgacgagtggacccaggacagagccaagcccgtgacccagatcgtgtctgccgaagcctggggcagagccgattgcgacgtgaagctggtggaaaagagcttcgagacagacaccaacctgaacttccagaacctgagcgtgatcggcttcagaatcctgctgctgaaagtggccggctttaacctgctgatgaccctgcggctgtggtccagcagggccaagcgatctggatctggagcaacaaacttctcactactcaaacaagcaggtgacgtggaggagaatcccgggcctactagtgccaccatggactggatttggcgcatccttttccttgtcggcgctgctaccggcgcccattccgggcccgaagtgcagctggttgaatctggcggaggactggttcaggctggcggatctctgagactgtcttgtgccgccagcggcagaacctttagcatgggctggtttagacaggcccctggcaaagagagagagttcgtcgccgccatcacatactctggcggcagcccttactacgccgactctgtgaagggcagattcaccatcagccgggacaacgccaagaacaccgtgtacctccagatgaacagcctgaagcctgaggacaccgccgtgtactactgcgccgccaatccaacatacggcagcgactggaacgccgagaattggggccagggaacccaagtgacagtgtctagcggatccggcggcggaggatctggcggaggcggatctgggggcggaggctctttcgaacaggttcagctgcaagagtctggccccggactggtcaagcctagccaaacactgagcctgacctgtaccgtgtccggctacagcatcaccagcgactacacctggaactggatcagacagcctcctggcaacggactggaatggatcggctacatcacctacagcggcagcaccagctacaaccccagcctgaaaagccgggtgctgatctccgtggacaccagcaagaatcaggtgtccctgaagctgagcagcgtgacagccgctgataccgccgtgtactactgtgccagactggggagaagatacacaatggactactggggccagggcaccaccgtgacagtttcttctacgcgtatccagaaccctgatcctgccgtgtaccagctgcgggatagcaagagcagcgacaagagcgtgtgtctgttcaccgacttcgacagccagaccaacgtgtcccagagcaaggactccgacgtgtacatcaccgataagtgcgtgctggacatgcggagcatggacttcaagagcaactccgccgtggcctggtccaacaagtccgatttcgcctgcgccaacgccttcaacaacagcattatccccgaggacacattcttcccaagccccgagagcagctgcggctttaccagcgagagctaccagcagggcgtgctgagcgccaccatcctgtacgagatcctgctgggcaaggccaccctgtacgccgtgctggtgtctgccctggtgctgatggctatggtcaagcggaaggacagccggggacgcgccaagagaagcggatctggcgtgaagcagaccctgaatttcgacctgctgaagctggctggcgacgtggaatccaacccaggcccttctagaggccatatgaccgagtacaagcccacggtgcgcctcgccacccgcgacgacgtccccagggccgtacgcaccctcgccgccgcgttcgccgactaccccgccacgcgccacaccgtcgatccggaccgccacatcgagcgggtcaccgagctgcaagaactcttcctcacgcgcgtcgggctcgacatcggcaaggtgtgggtcgcggacgacggcgccgcggtggcggtctggaccacgccggagagcgtcgaagcgggggcggtgttcgccgagatcggcccgcgcatggccgagttgagcggttcccggctggccgcgcagcaacagatggaaggcctcctggcgccgcaccggcccaaggagcccgcgtggttcctggccaccgtcggcgtctcgcccgaccaccagggcaagggtctgggcagcgccgtcgtgctccccggagtggaggcggccgagcgcgccggggtgcccgccttcctggagacctccgcgccccgcaacctccccttctacgagcggctcggcttcaccgtcaccgccgacgtcgaggtgcccgaaggaccgcgcacctggtgcatgacccgcaagcccggtgcctga

SEQ ID NO: 38653 - DNA, 2838 bp, synthetic construct
  source 1..2838: mol_type = other DNA
atggccttaccagtgaccgccttgctcctgccgctggccttgctgctccacgccgccaggccggacgtggtcatgacacagagcccttctagcctgtctgccagcgtgggcgacagagtgaccatcacctgtatggcctccgaggacatctacatccggctggcctggtatcagcagaagcctggaaacgcccctaagctgctgatctacgccgccacctctctggaaacaggcgtgccaagcagattttccggcagcggctctggcaccgatttcaccctgacaatatccagcctccagcctgaggacttcgccacctactactgccagcagtattggagcagcccctggacatttggcggaggcaccaaggtggaaatcaaactcgaggacctgaagaacgtgttcccacctgaggtggccgtgttcgagcctagcgaggccgagatcagccacacccagaaagccaccctcgtgtgcctggctaccggcttctaccccgaccatgtggaactgtcttggtgggtcaacggcaaagaggtgcacagcggcgtgtgtaccgacccccagccactgaaagaacagcccgccctgaacgacagccggtactgcctgagcagcagactgagagtgtccgccaccttctggcagaacccccggaaccacttcagatgccaggtgcagttctacggcctgagcgagaacgacgagtggacccaggacagagccaagcccgtgacccagatcgtgtctgccgaagcctggggcagagccgattgcgacgtgaagctggtggaaaagagcttcgagacagacaccaacctgaacttccagaacctgagcgtgatcggcttcagaatcctgctgctgaaagtggccggctttaacctgctgatgaccctgcggctgtggtccagcagggccaagcgatctggatctggagcaacaaacttctcactactcaaacaagcaggtgacgtggaggagaatcccgggcctactagtgccaccatggactggatttggcgcatccttttccttgtcggcgctgctaccggcgcccattccgggcccatgggatcttggagcgagttttacgatcggctgcacgccattcaccaccggctgtatgctctcggaggaagcgaagctgagctggccgcttttgaaaaagaaattgccgctttcgagtccgagcttcaggcttacaaaggcaaagggaatcctgaggtcgaggccctgagagataccgccgccttcatcagaacccggttgcaggcataccggcacaacggatccggcggcggaggatctggcggaggcggatctgggggcggaggctctttcgaacaggttcagctgcaagagtctggccccggactggtcaagcctagccaaacactgagcctgacctgtaccgtgtccggctacagcatcaccagcgactacacctggaactggatcagacagcctcctggcaacggactggaatggatcggctacatcacctacagcggcagcaccagctacaaccccagcctgaaaagccgggtgctgatctccgtggacaccagcaagaatcaggtgtccctgaagctgagcagcgtgacagccgctgataccgccgtgtactactgtgccagactggggagaagatacacaatggactactggggccagggcaccaccgtgacagtttcttctacgcgtatccagaaccctgatcctgccgtgtaccagctgcgggatagcaagagcagcgacaagagcgtgtgtctgttcaccgacttcgacagccagaccaacgtgtcccagagcaaggactccgacgtgtacatcaccgataagtgcgtgctggacatgcggagcatggacttcaagagcaactccgccgtggcctggtccaacaagtccgatttcgcctgcgccaacgccttcaacaacagcattatccccgaggacacattcttcccaagccccgagagcagctgcggctttaccagcgagagctaccagcagggcgtgctgagcgccaccatcctgtacgagatcctgctgggcaaggccaccctgtacgccgtgctggtgtctgccctggtgctgatggctatggtcaagcggaaggacagccggggacgcgccaagagaagcggatctggcgtgaagcagaccctgaatttcgacctgctgaagctggctggcgacgtggaatccaacccaggcccttctagaggccatatgaccgagtacaagcccacggtgcgcctcgccacccgcgacgacgtccccagggccgtacgcaccctcgccgccgcgttcgccgactaccccgccacgcgccacaccgtcgatccggaccgccacatcgagcgggtcaccgagctgcaagaactcttcctcacgcgcgtcgggctcgacatcggcaaggtgtgggtcgcggacgacggcgccgcggtggcggtctggaccacgccggagagcgtcgaagcgggggcggtgttcgccgagatcggcccgcgcatggccgagttgagcggttcccggctggccgcgcagcaacagatggaaggcctcctggcgccgcaccggcccaaggagcccgcgtggttcctggccaccgtcggcgtctcgcccgaccaccagggcaagggtctgggcagcgccgtcgtgctccccggagtggaggcggccgagcgcgccggggtgcccgccttcctggagacctccgcgccccgcaacctccccttctacgagcggctcggcttcaccgtcaccgccgacgtcgaggtgcccgaaggaccgcgcacctggtgcatgacccgcaagcccggtgcctga

SEQ ID NO: 38654 - DNA, 3468 bp, synthetic construct
  source 1..3468: mol_type = other DNA
atggccttaccagtgaccgccttgctcctgccgctggccttgctgctccacgccgccaggccggacgtggtcatgacacagagcccttctagcctgtctgccagcgtgggcgacagagtgaccatcacctgtatggcctccgaggacatctacatccggctggcctggtatcagcagaagcctggaaacgcccctaagctgctgatctacgccgccacctctctggaaacaggcgtgccaagcagattttccggcagcggctctggcaccgatttcaccctgacaatatccagcctccagcctgaggacttcgccacctactactgccagcagtattggagcagcccctggacatttggcggaggcaccaaggtggaaatcaaactcgaggacctgaagaacgtgttcccacctgaggtggccgtgttcgagcctagcgaggccgagatcagccacacccagaaagccaccctcgtgtgcctggctaccggcttctaccccgaccatgtggaactgtcttggtgggtcaacggcaaagaggtgcacagcggcgtgtgtaccgacccccagccactgaaagaacagcccgccctgaacgacagccggtactgcctgagcagcagactgagagtgtccgccaccttctggcagaacccccggaaccacttcagatgccaggtgcagttctacggcctgagcgagaacgacgagtggacccaggacagagccaagcccgtgacccagatcgtgtctgccgaagcctggggcagagccgattgcgacgtgaagctggtggaaaagagcttcgagacagacaccaacctgaacttccagaacctgagcgtgatcggcttcagaatcctgctgctgaaagtggccggctttaacctgctgatgaccctgcggctgtggtccagcagggccaagcgatctggatctggagcaacaaacttctcactactcaaacaagcaggtgacgtggaggagaatcccgggcctactagtaccatggactggatttggcgcatccttttccttgtcggcgctgctaccggcgcccattccctgttcaatcaagaggtgcagatccctctgaccgagagctactgtggcccctgtcctaagaactggatctgctacaagaacaactgctaccagttcttcgacgagagcaagaattggtacgagagccaggccagctgcatgagccagaatgccagcctgctgaaggtgtacagcaaagaggaccaggacctgctgaaactggtcaagagcgcccactggatgggccttgtgcacatccccaccaatggctcttggcagtgggaggacggcagcattctgagccctaacctgctgaccatcatcgagatgcagaagggcgactgcgccctgtacgccagcagctttaagggctacatcgagaattgcagcaccccgaacacctacatctgtatgcagagaaccgtttctggcggaggcggctctggaggaggcggaagtggcggcggaggcgacctctttaatcaagaagtccagattccactcaccgaatcctactgcggaccttgtccaaaaaattggatttgttataagaacaactgttatcaattctttgatgagtctaaaaattggtatgagtcccaggcttcctgcatgtctcagaacgcttctctgctgaaagtctactctaaagaagatcaggatctcctgaagctcgtcaagtctgcccattggatggggctcgtccacattcctaccaacggaagctggcaatgggaagatggctccatcctgtctccaaatctgctcacgattattgaaatgcagaaaggggattgtgctctctacgccagctccttcaagggatatattgagaactgtagcacgcccaatacttatatctgtatgcaacggaccgtgggatccggcggcggaggatctggcggaggcggatctgggggcggaggctctttcgaacaggttcagctgcaagagtctggccccggactggtcaagcctagccaaacactgagcctgacctgtaccgtgtccggctacagcatcaccagcgactacacctggaactggatcagacagcctcctggcaacggactggaatggatcggctacatcacctacagcggcagcaccagctacaaccccagcctgaaaagccgggtgctgatctccgtggacaccagcaagaatcaggtgtccctgaagctgagcagcgtgacagccgctgataccgccgtgtactactgtgccagactggggagaagatacacaatggactactggggccagggcaccaccgtgacagtttcttctacgcgtatccagaaccctgatcctgccgtgtaccagctgcgggatagcaagagcagcgacaagagcgtgtgtctgttcaccgacttcgacagccagaccaacgtgtcccagagcaaggactccgacgtgtacatcaccgataagtgcgtgctggacatgcggagcatggacttcaagagcaactccgccgtggcctggtccaacaagtccgatttcgcctgcgccaacgccttcaacaacagcattatccccgaggacacattcttcccaagccccgagagcagctgcggctttaccagcgagagctaccagcagggcgtgctgagcgccaccatcctgtacgagatcctgctgggcaaggccaccctgtacgccgtgctggtgtctgccctggtgctgatggctatggtcaagcggaaggacagccggggacgcgccaagagaagcggatctggcgtgaagcagaccctgaatttcgacctgctgaagctggctggcgacgtggaatccaacccaggcccttctagaggccatatgaccgagtacaagcccacggtgcgcctcgccacccgcgacgacgtccccagggccgtacgcaccctcgccgccgcgttcgccgactaccccgccacgcgccacaccgtcgatccggaccgccacatcgagcgggtcaccgagctgcaagaactcttcctcacgcgcgtcgggctcgacatcggcaaggtgtgggtcgcggacgacggcgccgcggtggcggtctggaccacgccggagagcgtcgaagcgggggcggtgttcgccgagatcggcccgcgcatggccgagttgagcggttcccggctggccgcgcagcaacagatggaaggcctcctggcgccgcaccggcccaaggagcccgcgtggttcctggccaccgtcggcgtctcgcccgaccaccagggcaagggtctgggcagcgccgtcgtgctccccggagtggaggcggccgagcgcgccggggtgcccgccttcctggagacctccgcgccccgcaacctccccttctacgagcggctcggcttcaccgtcaccgccgacgtcgaggtgcccgaaggaccgcgcacctggtgcatgacccgcaagcccggtgcctga

SEQ ID NO: 38655 - DNA, 1854 bp, synthetic construct; identical to SEQ ID NO: 5111
  source 1..1854: mol_type = other DNA

SEQ ID NO: 38656 - DNA, 1866 bp, synthetic construct; identical to SEQ ID NO: 5276
  source 1..1866: mol_type = other DNA

SEQ ID NO: 38657 - DNA, 2259 bp, synthetic construct; identical to SEQ ID NO: 5441
  source 1..2259: mol_type = other DNA

SEQ ID NO: 38658 - DNA, 2271 bp, synthetic construct; identical to SEQ ID NO: 5606
  source 1..2271: mol_type = other DNA

SEQ ID NO: 38659 - DNA, 2670 bp, synthetic construct; identical to SEQ ID NO: 5771
  source 1..2670: mol_type = other DNA

SEQ ID NO: 38660 - DNA, 2682 bp, synthetic construct; identical to SEQ ID NO: 5936
  source 1..2682: mol_type = other DNA

SEQ ID NO: 38661 - DNA, 2166 bp, synthetic construct; identical to SEQ ID NO: 6147
  source 1..2166: mol_type = other DNA

SEQ ID NO: 38662 - DNA, 2178 bp, synthetic construct; identical to SEQ ID NO: 6312
  source 1..2178: mol_type = other DNA

SEQ ID NO: 38663 - DNA, 2571 bp, synthetic construct; identical to SEQ ID NO: 6477
  source 1..2571: mol_type = other DNA

SEQ ID NO: 38664 - DNA, 2583 bp, synthetic construct; identical to SEQ ID NO: 6642
  source 1..2583: mol_type = other DNA

SEQ ID NO: 38665 - DNA, 2982 bp, synthetic construct; identical to SEQ ID NO: 6807
  source 1..2982: mol_type = other DNA

SEQ ID NO: 38666 - DNA, 2994 bp, synthetic construct; identical to SEQ ID NO: 6972
  source 1..2994: mol_type = other DNA

SEQ ID NO: 38667 - DNA, 2160 bp, synthetic construct; identical to SEQ ID NO: 7183
  source 1..2160: mol_type = other DNA

SEQ ID NO: 38668 - DNA, 2172 bp, synthetic construct; identical to SEQ ID NO: 7348
  source 1..2172: mol_type = other DNA

SEQ ID NO: 38669 - DNA, 2565 bp, synthetic construct; identical to SEQ ID NO: 7513
  source 1..2565: mol_type = other DNA

SEQ ID NO: 38670 - DNA, 2976 bp, synthetic construct; identical to SEQ ID NO: 7843
  source 1..2976: mol_type = other DNA

SEQ ID NO: 38671 - DNA, 1854 bp, synthetic construct
  source 1..1854: mol_type = other DNA
atggccttaccagtgaccgccttgctcctgccgctggccttgctgctccacgccgccaggccggacgtggtcatgacacagagcccttctagcctgtctgccagcgtgggcgacagagtgaccatcacctgtatggcctccgaggacatctacatccggctggcctggtatcagcagaagcctggaaacgcccctaagctgctgatctacgccgccacctctctggaaacaggcgtgccaagcagattttccggcagcggctctggcaccgatttcaccctgacaatatccagcctccagcctgaggacttcgccacctactactgccagcagtattggagcagcccctggacatttggcggaggcaccaaggtggaaatcaaactcgaggacctgaagaacgtgttcccacctgaggtggccgtgttcgagcctagcgaggccgagatcagccacacccagaaagccaccctcgtgtgcctggctaccggcttctaccccgaccatgtggaactgtcttggtgggtcaacggcaaagaggtgcacagcggcgtgtctaccgacccccagccactgaaagaacagcccgccctgaacgacagccggtactgcctgagcagcagactgagagtgtccgccaccttctggcagaacccccggaaccacttcagatgccaggtgcagttctacggcctgagcgagaacgacgagtggacccaggacagagccaagcccgtgacccagatcgtgtctgccgaagcctggggcagagccgattgcgacgtgaagctggtggaaaagagcttcgagacagacaccaacctgaacttccagaacctgagcgtgatcggcttcagaatcctgctgctgaaagtggccggctttaacctgctgatgaccctgcggctgtggtccagcagggccaagcgatctggatctggagcaacaaacttctcactactcaaacaagcaggtgacgtggaggagaatcccgggcctactagtatggactggatttggcgcatccttttccttgtcggcgctgctaccggcgcgcattccttcgaacaggttcagctgcaagagtctggccccggactggtcaagcctagccaaacactgagcctgacctgtaccgtgtccggctacagcatcaccagcgactacacctggaactggatcagacagcctcctggcaacggactggaatggatcggctacatcacctacagcggcagcaccagctacaaccccagcctgaaaagccgggtgctgatctccgtggacaccagcaagaatcaggtgtccctgaagctgagcagcgtgacagccgctgataccgccgtgtactactgtgccagactggggagaagatacacaatggactactggggccagggcaccaccgtgacagtttcttctacgcgtatccagaaccctgatcctgccgtgtaccagctgcgggatagcaagagcagcgacaagagcgtgtgtctgttcaccgacttcgacagccagaccaacgtgtcccagagcaaggactccgacgtgtacatcaccgataagaccgtgctggacatgcggagcatggacttcaagagcaactccgccgtggcctggtccaacaagtccgatttcgcctgcgccaacgccttcaacaacagcattatccccgaggacacattcttcccaagccccgagagcagctgcggctttaccagcgagagctaccagcagggcgtgctgagcgccaccatcctgtacgagatcctgctgggcaaggccaccctgtacgccgtgctggtgtctgccctggtgctgatggctatggtcaagcggaaggacagccgggga

SEQ ID NO: 38672 - DNA, 1854 bp, synthetic construct
  source 1..1854: mol_type = other DNA
atggccttaccagtgaccgccttgctcctgccgctggccttgctgctccacgccgccaggccggacgtggtcatgacacagagcccttctagcctgtctgccagcgtgggcgacagagtgaccatcacctgtatggcctccgaggacatctacatccggctggcctggtatcagcagaagcctggaaacgcccctaagctgctgatctacgccgccacctctctggaaacaggcgtgccaagcagattttccggcagcggctctggcaccgatttcaccctgacaatatccagcctccagcctgaggacttcgccacctactactgccagcagtattggagcagcccctggacatttggcggaggcaccaaggtggaaatcaaactcgaggacctgaagaacgtgttcccacctgaggtggccgtgttcgagcctagcgaggccgagatcagccacacccagaaagccaccctcgtgtgcctggctaccggcttctaccccgaccatgtggaactgtcttggtgggtcaacggcaaagaggtgcacagcggcgtgtctaccgacccccagccactgaaagaacagcccgccctgaacgacagccggtactgcctgagcagcagactgagagtgtccgccaccttctggcagaacccccggaaccacttcagatgccaggtgcagttctacggcctgagcgagaacgacgagtggacccaggacagagccaagcccgtgacccagatcgtgtctgccgaagcctggggcagagccgattgcggctttaccagcgagagctaccagcagggcgtgctgagcgccaccaacctgagcgtgatcggcttcagaatcctgctgctgaaagtggccggctttaacctgctgatgaccctgcggctgtggtccagcagggccaagcgatctggatctggagcaacaaacttctcactactcaaacaagcaggtgacgtggaggagaatcccgggcctactagtatggactggatttggcgcatccttttccttgtcggcgctgctaccggcgcgcattccttcgaacaggttcagctgcaagagtctggccccggactggtcaagcctagccaaacactgagcctgacctgtaccgtgtccggctacagcatcaccagcgactacacctggaactggatcagacagcctcctggcaacggactggaatggatcggctacatcacctacagcggcagcaccagctacaaccccagcctgaaaagccgggtgctgatctccgtggacaccagcaagaatcaggtgtccctgaagctgagcagcgtgacagccgctgataccgccgtgtactactgtgccagactggggagaagatacacaatggactactggggccagggcaccaccgtgacagtttcttctacgcgtatccagaaccctgatcctgccgtgtaccagctgcgggatagcaagagcagcgacaagagcgtgtgtctgttcaccgacttcgacagccagaccaacgtgtcccagagcaaggactccgacgtgtacatcaccgataagaccgtgctggacatgcggagcatggacttcaagagcaactccgccgtggcctggtccaacaagtccgatttcgcctgcgccaacgccttcaacaacagcattatccccgaggacacattcttcccaagccccgagagcagctgcgacgtgaagctggtggaaaagagcttcgagacagacaccaacctgaacttccagatcctgtacgagatcctgctgggcaaggccaccctgtacgccgtgctggtgtctgccctggtgctgatggctatggtcaagcggaaggacagccgggga

SEQ ID NO: 38673 - DNA, 2166 bp, synthetic construct
  source 1..2166: mol_type = other DNA
atggccttaccagtgaccgccttgctcctgccgctggccttgctgctccacgccgccaggccggacgtggtcatgacacagagcccttctagcctgtctgccagcgtgggcgacagagtgaccatcacctgtatggcctccgaggacatctacatccggctggcctggtatcagcagaagcctggaaacgcccctaagctgctgatctacgccgccacctctctggaaacaggcgtgccaagcagattttccggcagcggctctggcaccgatttcaccctgacaatatccagcctccagcctgaggacttcgccacctactactgccagcagtattggagcagcccctggacatttggcggaggcaccaaggtggaaatcaaactcgaggacctgaagaacgtgttcccacctgaggtggccgtgttcgagcctagcgaggccgagatcagccacacccagaaagccaccctcgtgtgcctggctaccggcttctaccccgaccatgtggaactgtcttggtgggtcaacggcaaagaggtgcacagcggcgtgtctaccgacccccagccactgaaagaacagcccgccctgaacgacagccggtactgcctgagcagcagactgagagtgtccgccaccttctggcagaacccccggaaccacttcagatgccaggtgcagttctacggcctgagcgagaacgacgagtggacccaggacagagccaagcccgtgacccagatcgtgtctgccgaagcctggggcagagccgatgatgtgattaagatccactggcaggaaaagaagtccaacaccatcctgggcagccaggaaggcaacaccatgaagaccaacgacacctacatgaagttcagctggctgaccgtgcccgagaagtccctggacaaagaacacagatgcatcgtgcggcacgaaaacaacaagaacggcgtggaccaggaaatcatcttcccacccatcaagaccgatgtgattacaatggaccccaaggacaactgctccaaggacgccaacgataccctgctgctccagctgaccaacaccagcgcctactacatgtacttgttgctgctgctgaagtccgtggtgtacttcgccatcatcacatgctgcctgctgatggctatggtcaagcggaaggacagccggggaagggccaagcgatctggatctggagcaacaaacttctcactactcaaacaagcaggtgacgtggaggagaatcccgggcctactagtatggactggatttggcgcatccttttccttgtcggcgctgctaccggcgcgcattccttcgaacaggttcagctgcaagagtctggccccggactggtcaagcctagccaaacactgagcctgacctgtaccgtgtccggctacagcatcaccagcgactacacctggaactggatcagacagcctcctggcaacggactggaatggatcggctacatcacctacagcggcagcaccagctacaaccccagcctgaaaagccgggtgctgatctccgtggacaccagcaagaatcaggtgtccctgaagctgagcagcgtgacagccgctgataccgccgtgtactactgtgccagactggggagaagatacacaatggactactggggccagggcaccaccgtgacagtttcttctacgcgtatccagaaccctgatcctgccgtgtaccagctgcgggatagcaagagcagcgacaagagcgtgtgtctgttcaccgacttcgacagccagaccaacgtgtcccagagcaaggactccgacgtgtacatcaccgataagaccgtgctggacatgcggagcatggacttcaagagcaactccgccgtggcctggtccaacaagtccgatttcgcctgcgccaacgccttcaacaacagcattatccccgaggacacattcttcccaagccccgagagcagcgactccaccgaccacgtgaagcccaaagagacagagaacaccaagcagcccagcaagagctgccacaagcccaaggccatcgtgcacaccgagaaagtgaacatgatgagcctgaccgtgctgggcctgcggatgctgttcgccaaaaccgtggccgtgaacttcctgctgaccgccaagctgttcttcctcctcaccgcc

SEQ ID NO: 38674 - DNA, 2160 bp, synthetic construct
  source 1..2160: mol_type = other DNA
atggccttaccagtgaccgccttgctcctgccgctggccttgctgctccacgccgccaggccggacgtggtcatgacacagagcccttctagcctgtctgccagcgtgggcgacagagtgaccatcacctgtatggcctccgaggacatctacatccggctggcctggtatcagcagaagcctggaaacgcccctaagctgctgatctacgccgccacctctctggaaacaggcgtgccaagcagattttccggcagcggctctggcaccgatttcaccctgacaatatccagcctccagcctgaggacttcgccacctactactgccagcagtattggagcagcccctggacatttggcggaggcaccaaggtggaaatcaaactcgaggacctgaagaacgtgttcccacctgaggtggccgtgttcgagcctagcgaggccgagatcagccacacccagaaagccaccctcgtgtgcctggctaccggcttctaccccgaccatgtggaactgtcttggtgggtcaacggcaaagaggtgcacagcggcgtgtctaccgacccccagccactgaaagaacagcccgccctgaacgacagccggtactgcctgagcagcagactgagagtgtccgccaccttctggcagaacccccggaaccacttcagatgccaggtgcagttctacggcctgagcgagaacgacgagtggacccaggacagagccaagcccgtgacccagatcgtgtctgccgaagcctggggcagagccgatgatgtgattaagatccactggcaggaaaagaagtccaacaccatcctgggcagccaggaaggcaacaccatgaagaccaacgacacctacatgaagttcagctggctgaccgtgcccgagaagtccctggacaaagaacacagatgcatcgtgcggcacgaaaacaacaagaacggcgtggaccaggaaatcatcttcccacccatcaagaccgatgtgattacaatggaccccaaggacaactgctccaaggacgccaacgataccctgctgctccagctgaccaacaccagcgcctactacatgtacttgttgctgctgctgaagtccgtggtgtacttcgccatcatcacatgctgcctgctgcggagaaccgccttctgctgcaacggcgagaagtctagggccaagcgatctggatctggagcaacaaacttctcactactcaaacaagcaggtgacgtggaggagaatcccgggcctactagtatggactggatttggcgcatccttttccttgtcggcgctgctaccggcgcgcattccttcgaacaggttcagctgcaagagtctggccccggactggtcaagcctagccaaacactgagcctgacctgtaccgtgtccggctacagcatcaccagcgactacacctggaactggatcagacagcctcctggcaacggactggaatggatcggctacatcacctacagcggcagcaccagctacaaccccagcctgaaaagccgggtgctgatctccgtggacaccagcaagaatcaggtgtccctgaagctgagcagcgtgacagccgctgataccgccgtgtactactgtgccagactggggagaagatacacaatggactactggggccagggcaccaccgtgacagtttcttctacgcgtatccagaaccctgatcctgccgtgtaccagctgcgggatagcaagagcagcgacaagagcgtgtgtctgttcaccgacttcgacagccagaccaacgtgtcccagagcaaggactccgacgtgtacatcaccgataagaccgtgctggacatgcggagcatggacttcaagagcaactccgccgtggcctggtccaacaagtccgatttcgcctgcgccaacgccttcaacaacagcattatccccgaggacacattcttcccaagccccgagagcagcgactccaccgaccacgtgaagcccaaagagacagagaacaccaagcagcccagcaagagctgccacaagcccaaggccatcgtgcacaccgagaaagtgaacatgatgagcctgaccgtgctgggcctgcggatgctgttcgccaaaaccgtggccgtgaacttcctgctgaccgccaagctgttcttcctc

SEQ ID NO: 38675 - DNA, 2592 bp, synthetic construct
  source 1..2592: mol_type = other DNA
atggccttaccagtgaccgccttgctcctgccgctggccttgctgctccacgccgccaggccgctcgaggaggacctgaagaacgtgttcccacctgaggtggccgtgttcgagcctagcgaggccgagatcagccacacccagaaagccaccctcgtgtgcctggctaccggcttctaccccgaccatgtggaactgtcttggtgggtcaacggcaaagaggtgcacagcggcgtgtgtaccgacccccagccactgaaagaacagcccgccctgaacgacagccggtactgcctgagcagcagactgagagtgtccgccaccttctggcagaacccccggaaccacttcagatgccaggtgcagttctacggcctgagcgagaacgacgagtggacccaggacagagccaagcccgtgacccagatcgtgtctgccgaagcctggggcagagccgattgcggctttaccagcgagagctaccagcagggcgtgctgagcgccaccaacctgagcgtgatcggcttcagaatcctgctgctgaaagtggccggctttaacctgctgatgaccctgcggctgtggtccagcagggccaagcgatctggatctggagcaacaaacttctcactactcaaacaagcaggtgacgtggaggagaatcccgggcctactagcatggccttaccagtgaccgccttgctcctgccgctggccttgctgctccacgccgccaggccggacgtggtcatgacacagagcccttctagcctgtctgccagcgtgggcgacagagtgaccatcacctgtatggcctccgaggacatctacatccggctggcctggtatcagcagaagcctggaaacgcccctaagctgctgatctacgccgccacctctctggaaacaggcgtgccaagcagattttccggcagcggctctggcaccgatttcaccctgacaatatccagcctccagcctgaggacttcgccacctactactgccagcagtattggagcagcccctggacatttggcggaggcaccaaggtggaaatcaaaggcggaggcggaagtggaggcggaggatctggcggcggaggctctcaggttcagctgcaagagtctggccccggactggtcaagcctagccaaacactgagcctgacctgtaccgtgtccggctacagcatcaccagcgactacacctggaactggatcagacagcctcctggcaacggactggaatggatcggctacatcacctacagcggcagcaccagctacaaccccagcctgaaaagccgggtgctgatctccgtggacaccagcaagaatcaggtgtccctgaagctgagcagcgtgacagccgctgataccgccgtgtactactgtgccagactggggagaagatacacaatggactactggggccagggcaccaccgtgacagtttcttctacgcgtatccagaaccctgatcctgccgtgtaccagctgcgggatagcaagagcagcgacaagagcgtgtgtctgttcaccgacttcgacagccagaccaacgtgtcccagagcaaggactccgacgtgtacatcaccgataagtgcgtgctggacatgcggagcatggacttcaagagcaactccgccgtggcctggtccaacaagtccgatttcgcctgcgccaacgccttcaacaacagcattatccccgaggacacattcttcccaagccccgagagcagctgcgacgtgaagctggtggaaaagagcttcgagacagacaccaacctgaacttccagatcctgtacgaggtgatcggcttcagaatcctgctgctgaaagtggccggctttaacctgctgatgaccctgcggctgtggtccagccgcgccaagagaagcggatctggcgtgaagcagaccctgaatttcgacctgctgaagctggctggcgacgtggaatccaacccaggcccttctagaggccatatgaccgagtacaagcccacggtgcgcctcgccacccgcgacgacgtccccagggccgtacgcaccctcgccgccgcgttcgccgactaccccgccacgcgccacaccgtcgatccggaccgccacatcgagcgggtcaccgagctgcaagaactcttcctcacgcgcgtcgggctcgacatcggcaaggtgtgggtcgcggacgacggcgccgcggtggcggtctggaccacgccggagagcgtcgaagcgggggcggtgttcgccgagatcggcccgcgcatggccgagttgagcggttcccggctggccgcgcagcaacagatggaaggcctcctggcgccgcaccggcccaaggagcccgcgtggttcctggccaccgtcggcgtctcgcccgaccaccagggcaagggtctgggcagcgccgtcgtgctccccggagtggaggcggccgagcgcgccggggtgcccgccttcctggagacctccgcgccccgcaacctccccttctacgagcggctcggcttcaccgtcaccgccgacgtcgaggtgcccgaaggaccgcgcacctggtgcatgacccgcaagcccggtgcctga

SEQ ID NO: 38676 - DNA, 2592 bp, synthetic construct
  source 1..2592: mol_type = other DNA
atggccttaccagtgaccgccttgctcctgccgctggccttgctgctccacgccgccaggccgctcgagatccagaaccctgatcctgccgtgtaccagctgcgggatagcaagagcagcgacaagagcgtgtgtctgttcaccgacttcgacagccagaccaacgtgtcccagagcaaggactccgacgtgtacatcaccgataagtgcgtgctggacatgcggagcatggacttcaagagcaactccgccgtggcctggtccaacaagtccgatttcgcctgcgccaacgccttcaacaacagcattatccccgaggacacattcttcccaagccccgagagcagctgcgacgtgaagctggtggaaaagagcttcgagacagacaccaacctgaacttccagatcctgtacgaggtgatcggcttcagaatcctgctgctgaaagtggccggctttaacctgctgatgaccctgcggctgtggtccagcagggccaagcgatctggatctggagcaacaaacttctcactactcaaacaagcaggtgacgtggaggagaatcccgggcctactagcatggccttaccagtgaccgccttgctcctgccgctggccttgctgctccacgccgccaggccggacgtggtcatgacacagagcccttctagcctgtctgccagcgtgggcgacagagtgaccatcacctgtatggcctccgaggacatctacatccggctggcctggtatcagcagaagcctggaaacgcccctaagctgctgatctacgccgccacctctctggaaacaggcgtgccaagcagattttccggcagcggctctggcaccgatttcaccctgacaatatccagcctccagcctgaggacttcgccacctactactgccagcagtattggagcagcccctggacatttggcggaggcaccaaggtggaaatcaaaggcggaggcggaagtggaggcggaggatctggcggcggaggctctcaggttcagctgcaagagtctggccccggactggtcaagcctagccaaacactgagcctgacctgtaccgtgtccggctacagcatcaccagcgactacacctggaactggatcagacagcctcctggcaacggactggaatggatcggctacatcacctacagcggcagcaccagctacaaccccagcctgaaaagccgggtgctgatctccgtggacaccagcaagaatcaggtgtccctgaagctgagcagcgtgacagccgctgataccgccgtgtactactgtgccagactggggagaagatacacaatggactactggggccagggcaccaccgtgacagtttcttctacgcgtgaggacctgaagaacgtgttcccacctgaggtggccgtgttcgagcctagcgaggccgagatcagccacacccagaaagccaccctcgtgtgcctggctaccggcttctaccccgaccatgtggaactgtcttggtgggtcaacggcaaagaggtgcacagcggcgtgtgtaccgacccccagccactgaaagaacagcccgccctgaacgacagccggtactgcctgagcagcagactgagagtgtccgccaccttctggcagaacccccggaaccacttcagatgccaggtgcagttctacggcctgagcgagaacgacgagtggacccaggacagagccaagcccgtgacccagatcgtgtctgccgaagcctggggcagagccgattgcggctttaccagcgagagctaccagcagggcgtgctgagcgccaccaacctgagcgtgatcggcttcagaatcctgctgctgaaagtggccggctttaacctgctgatgaccctgcggctgtggtccagccgcgccaagagaagcggatctggcgtgaagcagaccctgaatttcgacctgctgaagctggctggcgacgtggaatccaacccaggcccttctagaggccatatgaccgagtacaagcccacggtgcgcctcgccacccgcgacgacgtccccagggccgtacgcaccctcgccgccgcgttcgccgactaccccgccacgcgccacaccgtcgatccggaccgccacatcgagcgggtcaccgagctgcaagaactcttcctcacgcgcgtcgggctcgacatcggcaaggtgtgggtcgcggacgacggcgccgcggtggcggtctggaccacgccggagagcgtcgaagcgggggcggtgttcgccgagatcggcccgcgcatggccgagttgagcggttcccggctggccgcgcagcaacagatggaaggcctcctggcgccgcaccggcccaaggagcccgcgtggttcctggccaccgtcggcgtctcgcccgaccaccagggcaagggtctgggcagcgccgtcgtgctccccggagtggaggcggccgagcgcgccggggtgcccgccttcctggagacctccgcgccccgcaacctccccttctacgagcggctcggcttcaccgtcaccgccgacgtcgaggtgcccgaaggaccgcgcacctggtgcatgacccgcaagcccggtgcctga

SEQ ID NO: 38677 - DNA, 2592 bp, synthetic construct; identical to SEQ ID NO: 38675
  source 1..2592: mol_type = other DNA

SEQ ID NO: 38678 - DNA, 2916 bp, synthetic construct
  source 1..2916: mol_type = other DNA
atggccttaccagtgaccgccttgctcctgccgctggccttgctgctccacgccgccaggccgctcgaggaggacctgaagaacgtgttcccacctgaggtggccgtgttcgagcctagcgaggccgagatcagccacacccagaaagccaccctcgtgtgcctggctaccggcttctaccccgaccatgtggaactgtcttggtgggtcaacggcaaagaggtgcacagcggcgtgtctaccgacccccagccactgaaagaacagcccgccctgaacgacagccggtactgcctgagcagcagactgagagtgtccgccaccttctggcagaacccccggaaccacttcagatgccaggtgcagttctacggcctgagcgagaacgacgagtggacccaggacagagccaagcccgtgacccagatcgtgtctgccgaagcctggggcagagccgatgatgtgattaagatccactggcaggaaaagaagtccaacaccatcctgggcagccaggaaggcaacaccatgaagaccaacgacacctacatgaagttcagctggctgaccgtgcccgagaagtccctggacaaagaacacagatgcatcgtgcggcacgaaaacaacaagaacggcgtggaccaggaaatcatcttcccacccatcaagaccgatgtgattacaatggaccccaaggacaactgctccaaggacgccaacgataccctgctgctccagctgaccaacaccagcgcctactacatgtacttgttgctgctgctgaagtccgtggtgtacttcgccatcatcacatgctgcctgctgatggctatggtcaagcggaaggacagccggggaagggccaagcgatctggatctggagcaacaaacttctcactactcaaacaagcaggtgacgtggaggagaatcccgggcctactagcatggccttaccagtgaccgccttgctcctgccgctggccttgctgctccacgccgccaggccggacgtggtcatgacacagagcccttctagcctgtctgccagcgtgggcgacagagtgaccatcacctgtatggcctccgaggacatctacatccggctggcctggtatcagcagaagcctggaaacgcccctaagctgctgatctacgccgccacctctctggaaacaggcgtgccaagcagattttccggcagcggctctggcaccgatttcaccctgacaatatccagcctccagcctgaggacttcgccacctactactgccagcagtattggagcagcccctggacatttggcggaggcaccaaggtggaaatcaaaggcggaggcggaagtggaggcggaggatctggcggcggaggctctcaggttcagctgcaagagtctggccccggactggtcaagcctagccaaacactgagcctgacctgtaccgtgtccggctacagcatcaccagcgactacacctggaactggatcagacagcctcctggcaacggactggaatggatcggctacatcacctacagcggcagcaccagctacaaccccagcctgaaaagccgggtgctgatctccgtggacaccagcaagaatcaggtgtccctgaagctgagcagcgtgacagccgctgataccgccgtgtactactgtgccagactggggagaagatacacaatggactactggggccagggcaccaccgtgacagtttcttctacgcgtatccagaaccctgatcctgccgtgtaccagctgcgggatagcaagagcagcgacaagagcgtgtgtctgttcaccgacttcgacagccagaccaacgtgtcccagagcaaggactccgacgtgtacatcaccgataagaccgtgctggacatgcggagcatggacttcaagagcaactccgccgtggcctggtccaacaagtccgatttcgcctgcgccaacgccttcaacaacagcattatccccgaggacacattcttcccaagccccgagagcagcgactccaccgaccacgtgaagcccaaagagacagagaacaccaagcagcccagcaagagctgccacaagcccaaggccatcgtgcacaccgagaaagtgaacatgatgagcctgaccgtgctgggcctgcggatgctgttcgccaaaaccgtggccgtgaacttcctgctgaccgccaagctgttcttcctcctcaccgcccgcgccaagagaagcggatctggcgtgaagcagaccctgaatttcgacctgctgaagctggctggcgacgtggaatccaacccaggcccttctagaggccatatgaccgagtacaagcccacggtgcgcctcgccacccgcgacgacgtccccagggccgtacgcaccctcgccgccgcgttcgccgactaccccgccacgcgccacaccgtcgatccggaccgccacatcgagcgggtcaccgagctgcaagaactcttcctcacgcgcgtcgggctcgacatcggcaaggtgtgggtcgcggacgacggcgccgcggtggcggtctggaccacgccggagagcgtcgaagcgggggcggtgttcgccgagatcggcccgcgcatggccgagttgagcggttcccggctggccgcgcagcaacagatggaaggcctcctggcgccgcaccggcccaaggagcccgcgtggttcctggccaccgtcggcgtctcgcccgaccaccagggcaagggtctgggcagcgccgtcgtgctccccggagtggaggcggccgagcgcgccggggtgcccgccttcctggagacctccgcgccccgcaacctccccttctacgagcggctcggcttcaccgtcaccgccgacgtcgaggtgcccgaaggaccgcgcacctggtgcatgacccgcaagcccggtgcctga

SEQ ID NO: 38679 - DNA, 2916 bp, synthetic construct
  source 1..2916: mol_type = other DNA
atggccttaccagtgaccgccttgctcctgccgctggccttgctgctccacgccgccaggccgctcgagatccagaaccctgatcctgccgtgtaccagctgcgggatagcaagagcagcgacaagagcgtgtgtctgttcaccgacttcgacagccagaccaacgtgtcccagagcaaggactccgacgtgtacatcaccgataagaccgtgctggacatgcggagcatggacttcaagagcaactccgccgtggcctggtccaacaagtccgatttcgcctgcgccaacgccttcaacaacagcattatccccgaggacacattcttcccaagccccgagagcagcgactccaccgaccacgtgaagcccaaagagacagagaacaccaagcagcccagcaagagctgccacaagcccaaggccatcgtgcacaccgagaaagtgaacatgatgagcctgaccgtgctgggcctgcggatgctgttcgccaaaaccgtggccgtgaacttcctgctgaccgccaagctgttcttcctcctcaccgccagggccaagcgatctggatctggagcaacaaacttctcactactcaaacaagcaggtgacgtggaggagaatcccgggcctactagcatggccttaccagtgaccgccttgctcctgccgctggccttgctgctccacgccgccaggccggacgtggtcatgacacagagcccttctagcctgtctgccagcgtgggcgacagagtgaccatcacctgtatggcctccgaggacatctacatccggctggcctggtatcagcagaagcctggaaacgcccctaagctgctgatctacgccgccacctctctggaaacaggcgtgccaagcagattttccggcagcggctctggcaccgatttcaccctgacaatatccagcctccagcctgaggacttcgccacctactactgccagcagtattggagcagcccctggacatttggcggaggcaccaaggtggaaatcaaaggcggaggcggaagtggaggcggaggatctggcggcggaggctctcaggttcagctgcaagagtctggccccggactggtcaagcctagccaaacactgagcctgacctgtaccgtgtccggctacagcatcaccagcgactacacctggaactggatcagacagcctcctggcaacggactggaatggatcggctacatcacctacagcggcagcaccagctacaaccccagcctgaaaagccgggtgctgatctccgtggacaccagcaagaatcaggtgtccctgaagctgagcagcgtgacagccgctgataccgccgtgtactactgtgccagactggggagaagatacacaatggactactggggccagggcaccaccgtgacagtttcttctacgcgtgaggacctgaagaacgtgttcccacctgaggtggccgtgttcgagcctagcgaggccgagatcagccacacccagaaagccaccctcgtgtgcctggctaccggcttctaccccgaccatgtggaactgtcttggtgggtcaacggcaaagaggtgcacagcggcgtgtctaccgacccccagccactgaaagaacagcccgccctgaacgacagccggtactgcctgagcagcagactgagagtgtccgccaccttctggcagaacccccggaaccacttcagatgccaggtgcagttctacggcctgagcgagaacgacgagtggacccaggacagagccaagcccgtgacccagatcgtgtctgccgaagcctggggcagagccgatgatgtgattaagatccactggcaggaaaagaagtccaacaccatcctgggcagccaggaaggcaacaccatgaagaccaacgacacctacatgaagttcagctggctgaccgtgcccgagaagtccctggacaaagaacacagatgcatcgtgcggcacgaaaacaacaagaacggcgtggaccaggaaatcatcttcccacccatcaagaccgatgtgattacaatggaccccaaggacaactgctccaaggacgccaacgataccctgctgctccagctgaccaacaccagcgcctactacatgtacttgttgctgctgctgaagtccgtggtgtacttcgccatcatcacatgctgcctgctgatggctatggtcaagcggaaggacagccggggacgcgccaagagaagcggatctggcgtgaagcagaccctgaatttcgacctgctgaagctggctggcgacgtggaatccaacccaggcccttctagaggccatatgaccgagtacaagcccacggtgcgcctcgccacccgcgacgacgtccccagggccgtacgcaccctcgccgccgcgttcgccgactaccccgccacgcgccacaccgtcgatccggaccgccacatcgagcgggtcaccgagctgcaagaactcttcctcacgcgcgtcgggctcgacatcggcaaggtgtgggtcgcggacgacggcgccgcggtggcggtctggaccacgccggagagcgtcgaagcgggggcggtgttcgccgagatcggcccgcgcatggccgagttgagcggttcccggctggccgcgcagcaacagatggaaggcctcctggcgccgcaccggcccaaggagcccgcgtggttcctggccaccgtcggcgtctcgcccgaccaccagggcaagggtctgggcagcgccgtcgtgctccccggagtggaggcggccgagcgcgccggggtgcccgccttcctggagacctccgcgccccgcaacctccccttctacgagcggctcggcttcaccgtcaccgccgacgtcgaggtgcccgaaggaccgcgcacctggtgcatgacccgcaagcccggtgcctga

SEQ ID NO: 38680 - DNA, 2910 bp, synthetic construct
  source 1..2910: mol_type = other DNA
atggccttaccagtgaccgccttgctcctgccgctggccttgctgctccacgccgccaggccgctcgaggaggacctgaagaacgtgttcccacctgaggtggccgtgttcgagcctagcgaggccgagatcagccacacccagaaagccaccctcgtgtgcctggctaccggcttctaccccgaccatgtggaactgtcttggtgggtcaacggcaaagaggtgcacagcggcgtgtgtaccgacccccagccactgaaagaacagcccgccctgaacgacagccggtactgcctgagcagcagactgagagtgtccgccaccttctggcagaacccccggaaccacttcagatgccaggtgcagttctacggcctgagcgagaacgacgagtggacccaggacagagccaagcccgtgacccagatcgtgtctgccgaagcctggggcagagccgatgatgtgattaagatccactggcaggaaaagaagtccaacaccatcctgggcagccaggaaggcaacaccatgaagaccaacgacacctacatgaagttcagctggctgaccgtgcccgagaagtccctggacaaagaacacagatgcatcgtgcggcacgaaaacaacaagaacggcgtggaccaggaaatcatcttcccacccatcaagaccgatgtgattacaatggaccccaaggacaactgctccaaggacgccaacgataccctgctgctccagctgaccaacaccagcgcctactacatgtacttgttgctgctgctgaagtccgtggtgtacttcgccatcatcacatgctgcctgctgcggagaaccgccttctgctgcaacggcgagaagtctagggccaagcgatctggatctggagcaacaaacttctcactactcaaacaagcaggtgacgtggaggagaatcccgggcctactagcatggccttaccagtgaccgccttgctcctgccgctggccttgctgctccacgccgccaggccggacgtggtcatgacacagagcccttctagcctgtctgccagcgtgggcgacagagtgaccatcacctgtatggcctccgaggacatctacatccggctggcctggtatcagcagaagcctggaaacgcccctaagctgctgatctacgccgccacctctctggaaacaggcgtgccaagcagattttccggcagcggctctggcaccgatttcaccctgacaatatccagcctccagcctgaggacttcgccacctactactgccagcagtattggagcagcccctggacatttggcggaggcaccaaggtggaaatcaaaggcggaggcggaagtggaggcggaggatctggcggcggaggctctcaggttcagctgcaagagtctggccccggactggtcaagcctagccaaacactgagcctgacctgtaccgtgtccggctacagcatcaccagcgactacacctggaactggatcagacagcctcctggcaacggactggaatggatcggctacatcacctacagcggcagcaccagctacaaccccagcctgaaaagccgggtgctgatctccgtggacaccagcaagaatcaggtgtccctgaagctgagcagcgtgacagccgctgataccgccgtgtactactgtgccagactggggagaagatacacaatggactactggggccagggcaccaccgtgacagtttcttctacgcgtatccagaaccctgatcctgccgtgtaccagctgcgggatagcaagagcagcgacaagagcgtgtgtctgttcaccgacttcgacagccagaccaacgtgtcccagagcaaggactccgacgtgtacatcaccgataagtgcgtgctggacatgcggagcatggacttcaagagcaactccgccgtggcctggtccaacaagtccgatttcgcctgcgccaacgccttcaacaacagcattatccccgaggacacattcttcccaagccccgagagcagcgactccaccgaccacgtgaagcccaaagagacagagaacaccaagcagcccagcaagagctgccacaagcccaaggccatcgtgcacaccgagaaagtgaacatgatgagcctgaccgtgctgggcctgcggatgctgttcgccaaaaccgtggccgtgaacttcctgctgaccgccaagctgttcttcctccgcgccaagagaagcggatctggcgtgaagcagaccctgaatttcgacctgctgaagctggctggcgacgtggaatccaacccaggcccttctagaggccatatgaccgagtacaagcccacggtgcgcctcgccacccgcgacgacgtccccagggccgtacgcaccctcgccgccgcgttcgccgactaccccgccacgcgccacaccgtcgatccggaccgccacatcgagcgggtcaccgagctgcaagaactcttcctcacgcgcgtcgggctcgacatcggcaaggtgtgggtcgcggacgacggcgccgcggtggcggtctggaccacgccggagagcgtcgaagcgggggcggtgttcgccgagatcggcccgcgcatggccgagttgagcggttcccggctggccgcgcagcaacagatggaaggcctcctggcgccgcaccggcccaaggagcccgcgtggttcctggccaccgtcggcgtctcgcccgaccaccagggcaagggtctgggcagcgccgtcgtgctccccggagtggaggcggccgagcgcgccggggtgcccgccttcctggagacctccgcgccccgcaacctccccttctacgagcggctcggcttcaccgtcaccgccgacgtcgaggtgcccgaaggaccgcgcacctggtgcatgacccgcaagcccggtgcctga

SEQ ID NO: 38681 - DNA, 2910 bp, synthetic construct
  source 1..2910: mol_type = other DNA
atggccttaccagtgaccgccttgctcctgccgctggccttgctgctccacgccgccaggccgctcgagatccagaaccctgatcctgccgtgtaccagctgcgggatagcaagagcagcgacaagagcgtgtgtctgttcaccgacttcgacagccagaccaacgtgtcccagagcaaggactccgacgtgtacatcaccgataagtgcgtgctggacatgcggagcatggacttcaagagcaactccgccgtggcctggtccaacaagtccgatttcgcctgcgccaacgccttcaacaacagcattatccccgaggacacattcttcccaagccccgagagcagcgactccaccgaccacgtgaagcccaaagagacagagaacaccaagcagcccagcaagagctgccacaagcccaaggccatcgtgcacaccgagaaagtgaacatgatgagcctgaccgtgctgggcctgcggatgctgttcgccaaaaccgtggccgtgaacttcctgctgaccgccaagctgttcttcctcagggccaagcgatctggatctggagcaacaaacttctcactactcaaacaagcaggtgacgtggaggagaatcccgggcctactagcatggccttaccagtgaccgccttgctcctgccgctggccttgctgctccacgccgccaggccggacgtggtcatgacacagagcccttctagcctgtctgccagcgtgggcgacagagtgaccatcacctgtatggcctccgaggacatctacatccggctggcctggtatcagcagaagcctggaaacgcccctaagctgctgatctacgccgccacctctctggaaacaggcgtgccaagcagattttccggcagcggctctggcaccgatttcaccctgacaatatccagcctccagcctgaggacttcgccacctactactgccagcagtattggagcagcccctggacatttggcggaggcaccaaggtggaaatcaaaggcggaggcggaagtggaggcggaggatctggcggcggaggctctcaggttcagctgcaagagtctggccccggactggtcaagcctagccaaacactgagcctgacctgtaccgtgtccggctacagcatcaccagcgactacacctggaactggatcagacagcctcctggcaacggactggaatggatcggctacatcacctacagcggcagcaccagctacaaccccagcctgaaaagccgggtgctgatctccgtggacaccagcaagaatcaggtgtccctgaagctgagcagcgtgacagccgctgataccgccgtgtactactgtgccagactggggagaagatacacaatggactactggggccagggcaccaccgtgacagtttcttctacgcgtgaggacctgaagaacgtgttcccacctgaggtggccgtgttcgagcctagcgaggccgagatcagccacacccagaaagccaccctcgtgtgcctggctaccggcttctaccccgaccatgtggaactgtcttggtgggtcaacggcaaagaggtgcacagcggcgtgtgtaccgacccccagccactgaaagaacagcccgccctgaacgacagccggtactgcctgagcagcagactgagagtgtccgccaccttctggcagaacccccggaaccacttcagatgccaggtgcagttctacggcctgagcgagaacgacgagtggacccaggacagagccaagcccgtgacccagatcgtgtctgccgaagcctggggcagagccgatgatgtgattaagatccactggcaggaaaagaagtccaacaccatcctgggcagccaggaaggcaacaccatgaagaccaacgacacctacatgaagttcagctggctgaccgtgcccgagaagtccctggacaaagaacacagatgcatcgtgcggcacgaaaacaacaagaacggcgtggaccaggaaatcatcttcccacccatcaagaccgatgtgattacaatggaccccaaggacaactgctccaaggacgccaacgataccctgctgctccagctgaccaacaccagcgcctactacatgtacttgttgctgctgctgaagtccgtggtgtacttcgccatcatcacatgctgcctgctgcggagaaccgccttctgctgcaacggcgagaagtctcgcgccaagagaagcggatctggcgtgaagcagaccctgaatttcgacctgctgaagctggctggcgacgtggaatccaacccaggcccttctagaggccatatgaccgagtacaagcccacggtgcgcctcgccacccgcgacgacgtccccagggccgtacgcaccctcgccgccgcgttcgccgactaccccgccacgcgccacaccgtcgatccggaccgccacatcgagcgggtcaccgagctgcaagaactcttcctcacgcgcgtcgggctcgacatcggcaaggtgtgggtcgcggacgacggcgccgcggtggcggtctggaccacgccggagagcgtcgaagcgggggcggtgttcgccgagatcggcccgcgcatggccgagttgagcggttcccggctggccgcgcagcaacagatggaaggcctcctggcgccgcaccggcccaaggagcccgcgtggttcctggccaccgtcggcgtctcgcccgaccaccagggcaagggtctgggcagcgccgtcgtgctccccggagtggaggcggccgagcgcgccggggtgcccgccttcctggagacctccgcgccccgcaacctccccttctacgagcggctcggcttcaccgtcaccgccgacgtcgaggtgcccgaaggaccgcgcacctggtgcatgacccgcaagcccggtgcctga

SEQ ID NO: 38682 - DNA, 2910 bp, synthetic construct
  source 1..2910: mol_type = other DNA
atggccttaccagtgaccgccttgctcctgccgctggccttgctgctccacgccgccaggccgctcgaggaggacctgaagaacgtgttcccacctgaggtggccgtgttcgagcctagcgaggccgagatcagccacacccagaaagccaccctcgtgtgcctggctaccggcttctaccccgaccatgtggaactgtcttggtgggtcaacggcaaagaggtgcacagcggcgtgtctaccgacccccagccactgaaagaacagcccgccctgaacgacagccggtactgcctgagcagcagactgagagtgtccgccaccttctggcagaacccccggaaccacttcagatgccaggtgcagttctacggcctgagcgagaacgacgagtggacccaggacagagccaagcccgtgacccagatcgtgtctgccgaagcctggggcagagccgatgatgtgattaagatccactggcaggaaaagaagtccaacaccatcctgggcagccaggaaggcaacaccatgaagaccaacgacacctacatgaagttcagctggctgaccgtgcccgagaagtccctggacaaagaacacagatgcatcgtgcggcacgaaaacaacaagaacggcgtggaccaggaaatcatcttcccacccatcaagaccgatgtgattacaatggaccccaaggacaactgctccaaggacgccaacgataccctgctgctccagctgaccaacaccagcgcctactacatgtacttgttgctgctgctgaagtccgtggtgtacttcgccatcatcacatgctgcctgctgcggagaaccgccttctgctgcaacggcgagaagtctagggccaagcgatctggatctggagcaacaaacttctcactactcaaacaagcaggtgacgtggaggagaatcccgggcctactagcatggccttaccagtgaccgccttgctcctgccgctggccttgctgctccacgccgccaggccggacgtggtcatgacacagagcccttctagcctgtctgccagcgtgggcgacagagtgaccatcacctgtatggcctccgaggacatctacatccggctggcctggtatcagcagaagcctggaaacgcccctaagctgctgatctacgccgccacctctctggaaacaggcgtgccaagcagattttccggcagcggctctggcaccgatttcaccctgacaatatccagcctccagcctgaggacttcgccacctactactgccagcagtattggagcagcccctggacatttggcggaggcaccaaggtggaaatcaaaggcggaggcggaagtggaggcggaggatctggcggcggaggctctcaggttcagctgcaagagtctggccccggactggtcaagcctagccaaacactgagcctgacctgtaccgtgtccggctacagcatcaccagcgactacacctggaactggatcagacagcctcctggcaacggactggaatggatcggctacatcacctacagcggcagcaccagctacaaccccagcctgaaaagccgggtgctgatctccgtggacaccagcaagaatcaggtgtccctgaagctgagcagcgtgacagccgctgataccgccgtgtactactgtgccagactggggagaagatacacaatggactactggggccagggcaccaccgtgacagtttcttctacgcgtatccagaaccctgatcctgccgtgtaccagctgcgggatagcaagagcagcgacaagagcgtgtgtctgttcaccgacttcgacagccagaccaacgtgtcccagagcaaggactccgacgtgtacatcaccgataagaccgtgctggacatgcggagcatggacttcaagagcaactccgccgtggcctggtccaacaagtccgatttcgcctgcgccaacgccttcaacaacagcattatccccgaggacacattcttcccaagccccgagagcagcgactccaccgaccacgtgaagcccaaagagacagagaacaccaagcagcccagcaagagctgccacaagcccaaggccatcgtgcacaccgagaaagtgaacatgatgagcctgaccgtgctgggcctgcggatgctgttcgccaaaaccgtggccgtgaacttcctgctgaccgccaagctgttcttcctccgcgccaagagaagcggatctggcgtgaagcagaccctgaatttcgacctgctgaagctggctggcgacgtggaatccaacccaggcccttctagaggccatatgaccgagtacaagcccacggtgcgcctcgccacccgcgacgacgtccccagggccgtacgcaccctcgccgccgcgttcgccgactaccccgccacgcgccacaccgtcgatccggaccgccacatcgagcgggtcaccgagctgcaagaactcttcctcacgcgcgtcgggctcgacatcggcaaggtgtgggtcgcggacgacggcgccgcggtggcggtctggaccacgccggagagcgtcgaagcgggggcggtgttcgccgagatcggcccgcgcatggccgagttgagcggttcccggctggccgcgcagcaacagatggaaggcctcctggcgccgcaccggcccaaggagcccgcgtggttcctggccaccgtcggcgtctcgcccgaccaccagggcaagggtctgggcagcgccgtcgtgctccccggagtggaggcggccgagcgcgccggggtgcccgccttcctggagacctccgcgccccgcaacctccccttctacgagcggctcggcttcaccgtcaccgccgacgtcgaggtgcccgaaggaccgcgcacctggtgcatgacccgcaagcccggtgcctga

SEQ ID NO: 38683 - DNA, 2910 bp, synthetic construct
  source 1..2910: mol_type = other DNA
atggccttaccagtgaccgccttgctcctgccgctggccttgctgctccacgccgccaggccgctcgagatccagaaccctgatcctgccgtgtaccagctgcgggatagcaagagcagcgacaagagcgtgtgtctgttcaccgacttcgacagccagaccaacgtgtcccagagcaaggactccgacgtgtacatcaccgataagaccgtgctggacatgcggagcatggacttcaagagcaactccgccgtggcctggtccaacaagtccgatttcgcctgcgccaacgccttcaacaacagcattatccccgaggacacattcttcccaagccccgagagcagcgactccaccgaccacgtgaagcccaaagagacagagaacaccaagcagcccagcaagagctgccacaagcccaaggccatcgtgcacaccgagaaagtgaacatgatgagcctgaccgtgctgggcctgcggatgctgttcgccaaaaccgtggccgtgaacttcctgctgaccgccaagctgttcttcctcagggccaagcgatctggatctggagcaacaaacttctcactactcaaacaagcaggtgacgtggaggagaatcccgggcctactagcatggccttaccagtgaccgccttgctcctgccgctggccttgctgctccacgccgccaggccggacgtggtcatgacacagagcccttctagcctgtctgccagcgtgggcgacagagtgaccatcacctgtatggcctccgaggacatctacatccggctggcctggtatcagcagaagcctggaaacgcccctaagctgctgatctacgccgccacctctctggaaacaggcgtgccaagcagattttccggcagcggctctggcaccgatttcaccctgacaatatccagcctccagcctgaggacttcgccacctactactgccagcagtattggagcagcccctggacatttggcggaggcaccaaggtggaaatcaaaggcggaggcggaagtggaggcggaggatctggcggcggaggctctcaggttcagctgcaagagtctggccccggactggtcaagcctagccaaacactgagcctgacctgtaccgtgtccggctacagcatcaccagcgactacacctggaactggatcagacagcctcctggcaacggactggaatggatcggctacatcacctacagcggcagcaccagctacaaccccagcctgaaaagccgggtgctgatctccgtggacaccagcaagaatcaggtgtccctgaagctgagcagcgtgacagccgctgataccgccgtgtactactgtgccagactggggagaagatacacaatggactactggggccagggcaccaccgtgacagtttcttctacgcgtgaggacctgaagaacgtgttcccacctgaggtggccgtgttcgagcctagcgaggccgagatcagccacacccagaaagccaccctcgtgtgcctggctaccggcttctaccccgaccatgtggaactgtcttggtgggtcaacggcaaagaggtgcacagcggcgtgtctaccgacccccagccactgaaagaacagcccgccctgaacgacagccggtactgcctgagcagcagactgagagtgtccgccaccttctggcagaacccccggaaccacttcagatgccaggtgcagttctacggcctgagcgagaacgacgagtggacccaggacagagccaagcccgtgacccagatcgtgtctgccgaagcctggggcagagccgatgatgtgattaagatccactggcaggaaaagaagtccaacaccatcctgggcagccaggaaggcaacaccatgaagaccaacgacacctacatgaagttcagctggctgaccgtgcccgagaagtccctggacaaagaacacagatgcatcgtgcggcacgaaaacaacaagaacggcgtggaccaggaaatcatcttcccacccatcaagaccgatgtgattacaatggaccccaaggacaactgctccaaggacgccaacgataccctgctgctccagctgaccaacaccagcgcctactacatgtacttgttgctgctgctgaagtccgtggtgtacttcgccatcatcacatgctgcctgctgcggagaaccgccttctgctgcaacggcgagaagtctcgcgccaagagaagcggatctggcgtgaagcagaccctgaatttcgacctgctgaagctggctggcgacgtggaatccaacccaggcccttctagaggccatatgaccgagtacaagcccacggtgcgcctcgccacccgcgacgacgtccccagggccgtacgcaccctcgccgccgcgttcgccgactaccccgccacgcgccacaccgtcgatccggaccgccacatcgagcgggtcaccgagctgcaagaactcttcctcacgcgcgtcgggctcgacatcggcaaggtgtgggtcgcggacgacggcgccgcggtggcggtctggaccacgccggagagcgtcgaagcgggggcggtgttcgccgagatcggcccgcgcatggccgagttgagcggttcccggctggccgcgcagcaacagatggaaggcctcctggcgccgcaccggcccaaggagcccgcgtggttcctggccaccgtcggcgtctcgcccgaccaccagggcaagggtctgggcagcgccgtcgtgctccccggagtggaggcggccgagcgcgccggggtgcccgccttcctggagacctccgcgccccgcaacctccccttctacgagcggctcggcttcaccgtcaccgccgacgtcgaggtgcccgaaggaccgcgcacctggtgcatgacccgcaagcccggtgcctga

SEQ ID NO: 38684 - DNA, 2604 bp, synthetic construct
  source 1..2604: mol_type = other DNA
atggccttaccagtgaccgccttgctcctgccgctggccttgctgctccacgccgccaggccgctcgaggaggacctgaagaacgtgttcccacctgaggtggccgtgttcgagcctagcaaggccgagatcgcccacacccagaaagccaccctcgtgtgcctggctaccggcttctaccccgaccatgtggaactgtcttggtgggtcaacggcaaagaggtgcacagcggcgtgtgtaccgacccccagccactgaaagaacagcccgccctgaacgacagccggtactgcctgagcagcagactgagagtgtccgccaccttctggcagaacccccggaaccacttcagatgccaggtgcagttctacggcctgagcgagaacgacgagtggacccaggacagagccaagcccgtgacccagatcgtgtctgccgaagcctggggcagagccgattgcggcatcaccagcgccagctaccaccagggcgtgctgagcgccaccatcctgtacgagatcctgctgggcaaggccaccctgtacgccgtgctggtgtctgccctggtgctgatggctatggtcaagcggaaggacagccggggaagggccaagcgatctggatctggagcaacaaacttctcactactcaaacaagcaggtgacgtggaggagaatcccgggcctactagcatggccttaccagtgaccgccttgctcctgccgctggccttgctgctccacgccgccaggccggacgtggtcatgacacagagcccttctagcctgtctgccagcgtgggcgacagagtgaccatcacctgtatggcctccgaggacatctacatccggctggcctggtatcagcagaagcctggaaacgcccctaagctgctgatctacgccgccacctctctggaaacaggcgtgccaagcagattttccggcagcggctctggcaccgatttcaccctgacaatatccagcctccagcctgaggacttcgccacctactactgccagcagtattggagcagcccctggacatttggcggaggcaccaaggtggaaatcaaaggcggaggcggaagtggaggcggaggatctggcggcggaggctctcaggttcagctgcaagagtctggccccggactggtcaagcctagccaaacactgagcctgacctgtaccgtgtccggctacagcatcaccagcgactacacctggaactggatcagacagcctcctggcaacggactggaatggatcggctacatcacctacagcggcagcaccagctacaaccccagcctgaaaagccgggtgctgatctccgtggacaccagcaagaatcaggtgtccctgaagctgagcagcgtgacagccgctgataccgccgtgtactactgtgccagactggggagaagatacacaatggactactggggccagggcaccaccgtgacagtttcttctacgcgtatccagaaccctgatcctgccgtgtaccagctgcgggatagcaagagcagcgacaagagcgtgtgtctgttcaccgacttcgacagccagaccaacgtgtcccagagcaaggactccgacgtgtacatcaccgataagtgcgtgctggacatgcggagcatggacttcaagagcaactccgccgtggcctggtccaacaagtccgatttcgcctgcgccaacgccttcaacaacagcattatccccgaggacacattcttcccaagcagcgacgtgccctgcgacgtgaagctggtggaaaagagcttcgagacagacaccaacctgaacttccagaacctgagcgtgatcggcttcagaatcctgctgctgaaagtggccggctttaacctgctgatgaccctgcggctgtggtccagccgcgccaagagaagcggatctggcgtgaagcagaccctgaatttcgacctgctgaagctggctggcgacgtggaatccaacccaggcccttctagaggccatatgaccgagtacaagcccacggtgcgcctcgccacccgcgacgacgtccccagggccgtacgcaccctcgccgccgcgttcgccgactaccccgccacgcgccacaccgtcgatccggaccgccacatcgagcgggtcaccgagctgcaagaactcttcctcacgcgcgtcgggctcgacatcggcaaggtgtgggtcgcggacgacggcgccgcggtggcggtctggaccacgccggagagcgtcgaagcgggggcggtgttcgccgagatcggcccgcgcatggccgagttgagcggttcccggctggccgcgcagcaacagatggaaggcctcctggcgccgcaccggcccaaggagcccgcgtggttcctggccaccgtcggcgtctcgcccgaccaccagggcaagggtctgggcagcgccgtcgtgctccccggagtggaggcggccgagcgcgccggggtgcccgccttcctggagacctccgcgccccgcaacctccccttctacgagcggctcggcttcaccgtcaccgccgacgtcgaggtgcccgaaggaccgcgcacctggtgcatgacccgcaagcccggtgcctga

SEQ ID NO: 38685 - DNA, 2604 bp, synthetic construct
  source 1..2604: mol_type = other DNA
atggccttaccagtgaccgccttgctcctgccgctggccttgctgctccacgccgccaggccgctcgagatccagaaccctgatcctgccgtgtaccagctgcgggatagcaagagcagcgacaagagcgtgtgtctgttcaccgacttcgacagccagaccaacgtgtcccagagcaaggactccgacgtgtacatcaccgataagtgcgtgctggacatgcggagcatggacttcaagagcaactccgccgtggcctggtccaacaagtccgatttcgcctgcgccaacgccttcaacaacagcattatccccgaggacacattcttcccaagcagcgacgtgccctgcgacgtgaagctggtggaaaagagcttcgagacagacaccaacctgaacttccagaacctgagcgtgatcggcttcagaatcctgctgctgaaagtggccggctttaacctgctgatgaccctgcggctgtggtccagcagggccaagcgatctggatctggagcaacaaacttctcactactcaaacaagcaggtgacgtggaggagaatcccgggcctactagcatggccttaccagtgaccgccttgctcctgccgctggccttgctgctccacgccgccaggccggacgtggtcatgacacagagcccttctagcctgtctgccagcgtgggcgacagagtgaccatcacctgtatggcctccgaggacatctacatccggctggcctggtatcagcagaagcctggaaacgcccctaagctgctgatctacgccgccacctctctggaaacaggcgtgccaagcagattttccggcagcggctctggcaccgatttcaccctgacaatatccagcctccagcctgaggacttcgccacctactactgccagcagtattggagcagcccctggacatttggcggaggcaccaaggtggaaatcaaaggcggaggcggaagtggaggcggaggatctggcggcggaggctctcaggttcagctgcaagagtctggccccggactggtcaagcctagccaaacactgagcctgacctgtaccgtgtccggctacagcatcaccagcgactacacctggaactggatcagacagcctcctggcaacggactggaatggatcggctacatcacctacagcggcagcaccagctacaaccccagcctgaaaagccgggtgctgatctccgtggacaccagcaagaatcaggtgtccctgaagctgagcagcgtgacagccgctgataccgccgtgtactactgtgccagactggggagaagatacacaatggactactggggccagggcaccaccgtgacagtttcttctacgcgtgaggacctgaagaacgtgttcccacctgaggtggccgtgttcgagcctagcaaggccgagatcgcccacacccagaaagccaccctcgtgtgcctggctaccggcttctaccccgaccatgtggaactgtcttggtgggtcaacggcaaagaggtgcacagcggcgtgtgtaccgacccccagccactgaaagaacagcccgccctgaacgacagccggtactgcctgagcagcagactgagagtgtccgccaccttctggcagaacccccggaaccacttcagatgccaggtgcagttctacggcctgagcgagaacgacgagtggacccaggacagagccaagcccgtgacccagatcgtgtctgccgaagcctggggcagagccgattgcggcatcaccagcgccagctaccaccagggcgtgctgagcgccaccatcctgtacgagatcctgctgggcaaggccaccctgtacgccgtgctggtgtctgccctggtgctgatggctatggtcaagcggaaggacagccggggacgcgccaagagaagcggatctggcgtgaagcagaccctgaatttcgacctgctgaagctggctggcgacgtggaatccaacccaggcccttctagaggccatatgaccgagtacaagcccacggtgcgcctcgccacccgcgacgacgtccccagggccgtacgcaccctcgccgccgcgttcgccgactaccccgccacgcgccacaccgtcgatccggaccgccacatcgagcgggtcaccgagctgcaagaactcttcctcacgcgcgtcgggctcgacatcggcaaggtgtgggtcgcggacgacggcgccgcggtggcggtctggaccacgccggagagcgtcgaagcgggggcggtgttcgccgagatcggcccgcgcatggccgagttgagcggttcccggctggccgcgcagcaacagatggaaggcctcctggcgccgcaccggcccaaggagcccgcgtggttcctggccaccgtcggcgtctcgcccgaccaccagggcaagggtctgggcagcgccgtcgtgctccccggagtggaggcggccgagcgcgccggggtgcccgccttcctggagacctccgcgccccgcaacctccccttctacgagcggctcggcttcaccgtcaccgccgacgtcgaggtgcccgaaggaccgcgcacctggtgcatgacccgcaagcccggtgcctga

SEQ ID NO: 38686 - DNA, 2283 bp, synthetic construct
  source 1..2283: mol_type = other DNA
atggccttaccagtgaccgccttgctcctgccgctggccttgctgctccacgccgccaggccgctcgagcagagttttgggttgttggaccctaaattgtgctatctgttggacggaatcctgttcatttacggagtgatcctgaccgcattgttcctgcgggttaagttttccagatccgcagacgcacccgcttaccaacaagggcagaaccaactctacaatgaacttaatttggggcggagggaagagtacgacgttctggacaaaaggaggggacgagatcccgagatgggcggaaagcctcagcgaaggaagaatccgcaagaggggctttataacgaactccagaaagataaaatggcagaagcctatagtgagattgggatgaagggagaaaggaggaggggtaaaggtcacgatgggttgtaccaaggattgagcacagccactaaagatacctatgatgcgctccacatgcaggccctgccgccaagaagggccaagcgatctggatctggagcaacaaacttctcactactcaaacaagcaggtgacgtggaggagaatcccgggcctactagcatggccttaccagtgaccgccttgctcctgccgctggccttgctgctccacgccgccaggccggacgtggtcatgacacagagcccttctagcctgtctgccagcgtgggcgacagagtgaccatcacctgtatggcctccgaggacatctacatccggctggcctggtatcagcagaagcctggaaacgcccctaagctgctgatctacgccgccacctctctggaaacaggcgtgccaagcagattttccggcagcggctctggcaccgatttcaccctgacaatatccagcctccagcctgaggacttcgccacctactactgccagcagtattggagcagcccctggacatttggcggaggcaccaaggtggaaatcaaaggcggaggcggaagtggaggcggaggatctggcggcggaggctctcaggttcagctgcaagagtctggccccggactggtcaagcctagccaaacactgagcctgacctgtaccgtgtccggctacagcatcaccagcgactacacctggaactggatcagacagcctcctggcaacggactggaatggatcggctacatcacctacagcggcagcaccagctacaaccccagcctgaaaagccgggtgctgatctccgtggacaccagcaagaatcaggtgtccctgaagctgagcagcgtgacagccgctgataccgccgtgtactactgtgccagactggggagaagatacacaatggactactggggccagggcaccaccgtgacagtttcttctacgcgtgagctgggagagcctcagctgtgctatatcctggacgccatcctgtttctgtacggcatcgtgctgaccctgctgtactgccggctgaagatccaagtgcggaaggccgccatcaccagctacgagaaatccgacggcgtgtacaccggcctgagcaccagaaatcaagagacatacgagacactgaagcacgaaaagcctccacaacgcgccaagagaagcggatctggcgtgaagcagaccctgaatttcgacctgctgaagctggctggcgacgtggaatccaacccaggcccttctagaggccatatgaccgagtacaagcccacggtgcgcctcgccacccgcgacgacgtccccagggccgtacgcaccctcgccgccgcgttcgccgactaccccgccacgcgccacaccgtcgatccggaccgccacatcgagcgggtcaccgagctgcaagaactcttcctcacgcgcgtcgggctcgacatcggcaaggtgtgggtcgcggacgacggcgccgcggtggcggtctggaccacgccggagagcgtcgaagcgggggcggtgttcgccgagatcggcccgcgcatggccgagttgagcggttcccggctggccgcgcagcaacagatggaaggcctcctggcgccgcaccggcccaaggagcccgcgtggttcctggccaccgtcggcgtctcgcccgaccaccagggcaagggtctgggcagcgccgtcgtgctccccggagtggaggcggccgagcgcgccggggtgcccgccttcctggagacctccgcgccccgcaacctccccttctacgagcggctcggcttcaccgtcaccgccgacgtcgaggtgcccgaaggaccgcgcacctggtgcatgacccgcaagcccggtgcctga

SEQ ID NO: 38687 - DNA, 2916 bp, synthetic construct; identical to SEQ ID NO: 38678
  source 1..2916: mol_type = other DNA

SEQ ID NO: 38688 - DNA, 2916 bp, synthetic construct; identical to SEQ ID NO: 38679
  source 1..2916: mol_type = other DNA

SEQ ID NO: 38689 - DNA, 2913 bp, synthetic construct
  source 1..2913: mol_type = other DNA
atggccttaccagtgaccgccttgctcctgccgctggccttgctgctccacgccgccaggccgctcgaggaggaggacctgaagaacgtgttcccacctgaggtggccgtgttcgagcctagcgaggccgagatcagccacacccagaaagccaccctcgtgtgcctggctaccggcttctaccccgaccatgtggaactgtcttggtgggtcaacggcaaagaggtgcacagcggcgtgtgtaccgacccccagccactgaaagaacagcccgccctgaacgacagccggtactgcctgagcagcagactgagagtgtccgccaccttctggcagaacccccggaaccacttcagatgccaggtgcagttctacggcctgagcgagaacgacgagtggacccaggacagagccaagcccgtgacccagatcgtgtctgccgaagcctggggcagagccgatgatgtgattaagatccactggcaggaaaagaagtccaacaccatcctgggcagccaggaaggcaacaccatgaagaccaacgacacctacatgaagttcagctggctgaccgtgcccgagaagtccctggacaaagaacacagatgcatcgtgcggcacgaaaacaacaagaacggcgtggaccaggaaatcatcttcccacccatcaagaccgatgtgattacaatggaccccaaggacaactgctccaaggacgccaacgataccctgctgctccagctgaccaacaccagcgcctactacatgtacttgttgctgctgctgaagtccgtggtgtacttcgccatcatcacatgctgcctgctgcggagaaccgccttctgctgcaacggcgagaagtctagggccaagcgatctggatctggagcaacaaacttctcactactcaaacaagcaggtgacgtggaggagaatcccgggcctactagcatggccttaccagtgaccgccttgctcctgccgctggccttgctgctccacgccgccaggccggacgtggtcatgacacagagcccttctagcctgtctgccagcgtgggcgacagagtgaccatcacctgtatggcctccgaggacatctacatccggctggcctggtatcagcagaagcctggaaacgcccctaagctgctgatctacgccgccacctctctggaaacaggcgtgccaagcagattttccggcagcggctctggcaccgatttcaccctgacaatatccagcctccagcctgaggacttcgccacctactactgccagcagtattggagcagcccctggacatttggcggaggcaccaaggtggaaatcaaaggcggaggcggaagtggaggcggaggatctggcggcggaggctctcaggttcagctgcaagagtctggccccggactggtcaagcctagccaaacactgagcctgacctgtaccgtgtccggctacagcatcaccagcgactacacctggaactggatcagacagcctcctggcaacggactggaatggatcggctacatcacctacagcggcagcaccagctacaaccccagcctgaaaagccgggtgctgatctccgtggacaccagcaagaatcaggtgtccctgaagctgagcagcgtgacagccgctgataccgccgtgtactactgtgccagactggggagaagatacacaatggactactggggccagggcaccaccgtgacagtttcttctacgcgtatccagaaccctgatcctgccgtgtaccagctgcgggatagcaagagcagcgacaagagcgtgtgtctgttcaccgacttcgacagccagaccaacgtgtcccagagcaaggactccgacgtgtacatcaccgataagtgcgtgctggacatgcggagcatggacttcaagagcaactccgccgtggcctggtccaacaagtccgatttcgcctgcgccaacgccttcaacaacagcattatccccgaggacacattcttcccaagccccgagagcagcgactccaccgaccacgtgaagcccaaagagacagagaacaccaagcagcccagcaagagctgccacaagcccaaggccatcgtgcacaccgagaaagtgaacatgatgagcctgaccgtgctgggcctgcggatgctgttcgccaaaaccgtggccgtgaacttcctgctgaccgccaagctgttcttcctccgcgccaagagaagcggatctggcgtgaagcagaccctgaatttcgacctgctgaagctggctggcgacgtggaatccaacccaggcccttctagaggccatatgaccgagtacaagcccacggtgcgcctcgccacccgcgacgacgtccccagggccgtacgcaccctcgccgccgcgttcgccgactaccccgccacgcgccacaccgtcgatccggaccgccacatcgagcgggtcaccgagctgcaagaactcttcctcacgcgcgtcgggctcgacatcggcaaggtgtgggtcgcggacgacggcgccgcggtggcggtctggaccacgccggagagcgtcgaagcgggggcggtgttcgccgagatcggcccgcgcatggccgagttgagcggttcccggctggccgcgcagcaacagatggaaggcctcctggcgccgcaccggcccaaggagcccgcgtggttcctggccaccgtcggcgtctcgcccgaccaccagggcaagggtctgggcagcgccgtcgtgctccccggagtggaggcggccgagcgcgccggggtgcccgccttcctggagacctccgcgccccgcaacctccccttctacgagcggctcggcttcaccgtcaccgccgacgtcgaggtgcccgaaggaccgcgcacctggtgcatgacccgcaagcccggtgcctga

SEQ ID NO: 38690 - DNA, 2913 bp, synthetic construct
  source 1..2913: mol_type = other DNA
atggccttaccagtgaccgccttgctcctgccgctggccttgctgctccacgccgccaggccgctcgagatccagaaccctgatcctgccgtgtaccagctgcgggatagcaagagcagcgacaagagcgtgtgtctgttcaccgacttcgacagccagaccaacgtgtcccagagcaaggactccgacgtgtacatcaccgataagtgcgtgctggacatgcggagcatggacttcaagagcaactccgccgtggcctggtccaacaagtccgatttcgcctgcgccaacgccttcaacaacagcattatccccgaggacacattcttcccaagccccgagagcagcgactccaccgaccacgtgaagcccaaagagacagagaacaccaagcagcccagcaagagctgccacaagcccaaggccatcgtgcacaccgagaaagtgaacatgatgagcctgaccgtgctgggcctgcggatgctgttcgccaaaaccgtggccgtgaacttcctgctgaccgccaagctgttcttcctcagggccaagcgatctggatctggagcaacaaacttctcactactcaaacaagcaggtgacgtggaggagaatcccgggcctactagcatggccttaccagtgaccgccttgctcctgccgctggccttgctgctccacgccgccaggccggacgtggtcatgacacagagcccttctagcctgtctgccagcgtgggcgacagagtgaccatcacctgtatggcctccgaggacatctacatccggctggcctggtatcagcagaagcctggaaacgcccctaagctgctgatctacgccgccacctctctggaaacaggcgtgccaagcagattttccggcagcggctctggcaccgatttcaccctgacaatatccagcctccagcctgaggacttcgccacctactactgccagcagtattggagcagcccctggacatttggcggaggcaccaaggtggaaatcaaaggcggaggcggaagtggaggcggaggatctggcggcggaggctctcaggttcagctgcaagagtctggccccggactggtcaagcctagccaaacactgagcctgacctgtaccgtgtccggctacagcatcaccagcgactacacctggaactggatcagacagcctcctggcaacggactggaatggatcggctacatcacctacagcggcagcaccagctacaaccccagcctgaaaagccgggtgctgatctccgtggacaccagcaagaatcaggtgtccctgaagctgagcagcgtgacagccgctgataccgccgtgtactactgtgccagactggggagaagatacacaatggactactggggccagggcaccaccgtgacagtttcttctacgcgtgaggaggacctgaagaacgtgttcccacctgaggtggccgtgttcgagcctagcgaggccgagatcagccacacccagaaagccaccctcgtgtgcctggctaccggcttctaccccgaccatgtggaactgtcttggtgggtcaacggcaaagaggtgcacagcggcgtgtgtaccgacccccagccactgaaagaacagcccgccctgaacgacagccggtactgcctgagcagcagactgagagtgtccgccaccttctggcagaacccccggaaccacttcagatgccaggtgcagttctacggcctgagcgagaacgacgagtggacccaggacagagccaagcccgtgacccagatcgtgtctgccgaagcctggggcagagccgatgatgtgattaagatccactggcaggaaaagaagtccaacaccatcctgggcagccaggaaggcaacaccatgaagaccaacgacacctacatgaagttcagctggctgaccgtgcccgagaagtccctggacaaagaacacagatgcatcgtgcggcacgaaaacaacaagaacggcgtggaccaggaaatcatcttcccacccatcaagaccgatgtgattacaatggaccccaaggacaactgctccaaggacgccaacgataccctgctgctccagctgaccaacaccagcgcctactacatgtacttgttgctgctgctgaagtccgtggtgtacttcgccatcatcacatgctgcctgctgcggagaaccgccttctgctgcaacggcgagaagtctcgcgccaagagaagcggatctggcgtgaagcagaccctgaatttcgacctgctgaagctggctggcgacgtggaatccaacccaggcccttctagaggccatatgaccgagtacaagcccacggtgcgcctcgccacccgcgacgacgtccccagggccgtacgcaccctcgccgccgcgttcgccgactaccccgccacgcgccacaccgtcgatccggaccgccacatcgagcgggtcaccgagctgcaagaactcttcctcacgcgcgtcgggctcgacatcggcaaggtgtgggtcgcggacgacggcgccgcggtggcggtctggaccacgccggagagcgtcgaagcgggggcggtgttcgccgagatcggcccgcgcatggccgagttgagcggttcccggctggccgcgcagcaacagatggaaggcctcctggcgccgcaccggcccaaggagcccgcgtggttcctggccaccgtcggcgtctcgcccgaccaccagggcaagggtctgggcagcgccgtcgtgctccccggagtggaggcggccgagcgcgccggggtgcccgccttcctggagacctccgcgccccgcaacctccccttctacgagcggctcggcttcaccgtcaccgccgacgtcgaggtgcccgaaggaccgcgcacctggtgcatgacccgcaagcccggtgcctga

SEQ ID NO: 38691 - DNA, 2604 bp, synthetic construct
  source 1..2604: mol_type = other DNA
atggccttaccagtgaccgccttgctcctgccgctggccttgctgctccacgccgccaggccgctcgaggaggacctgaagaacgtgttcccacctgaggtggccgtgttcgagcctagcgaggccgagatcagccacacccagaaagccaccctcgtgtgcctggctaccggcttctaccccgaccatgtggaactgtcttggtgggtcaacggcaaagaggtgcacagcggcgtgtctaccgacccccagccactgaaagaacagcccgccctgaacgacagccggtactgcctgagcagcagactgagagtgtccgccaccttctggcagaacccccggaaccacttcagatgccaggtgcagttctacggcctgagcgagaacgacgagtggacccaggacagagccaagcccgtgacccagatcgtgtctgccgaagcctggggcagagccgattgcggctttaccagcgagagctaccagcagggcgtgctgagcgccaccaacctgagcgtgatcggcttcagaatcctgctgctgaaagtggccggctttaacctgctgatgaccctgcggctgtggtccagcagggccaagcgatctggatctggagcaacaaacttctcactactcaaacaagcaggtgacgtggaggagaatcccgggcctactagcatggccttaccagtgaccgccttgctcctgccgctggccttgctgctccacgccgccaggccggacgtggtcatgacacagagcccttctagcctgtctgccagcgtgggcgacagagtgaccatcacctgtatggcctccgaggacatctacatccggctggcctggtatcagcagaagcctggaaacgcccctaagctgctgatctacgccgccacctctctggaaacaggcgtgccaagcagattttccggcagcggctctggcaccgatttcaccctgacaatatccagcctccagcctgaggacttcgccacctactactgccagcagtattggagcagcccctggacatttggcggaggcaccaaggtggaaatcaaaggcggaggcggaagtggaggcggaggatctggcggcggaggctctcaggttcagctgcaagagtctggccccggactggtcaagcctagccaaacactgagcctgacctgtaccgtgtccggctacagcatcaccagcgactacacctggaactggatcagacagcctcctggcaacggactggaatggatcggctacatcacctacagcggcagcaccagctacaaccccagcctgaaaagccgggtgctgatctccgtggacaccagcaagaatcaggtgtccctgaagctgagcagcgtgacagccgctgataccgccgtgtactactgtgccagactggggagaagatacacaatggactactggggccagggcaccaccgtgacagtttcttctacgcgtatccagaaccctgatcctgccgtgtaccagctgcgggatagcaagagcagcgacaagagcgtgtgtctgttcaccgacttcgacagccagaccaacgtgtcccagagcaaggactccgacgtgtacatcaccgataagaccgtgctggacatgcggagcatggacttcaagagcaactccgccgtggcctggtccaacaagtccgatttcgcctgcgccaacgccttcaacaacagcattatccccgaggacacattcttcccaagccccgagagcagctgcgacgtgaagctggtggaaaagagcttcgagacagacaccaacctgaacttccagatcctgtacgagatcctgctgggcaaggccaccctgtacgccgtgctggtgtctgccctggtgctgatggctatggtcaagcggaaggacagccggggacgcgccaagagaagcggatctggcgtgaagcagaccctgaatttcgacctgctgaagctggctggcgacgtggaatccaacccaggcccttctagaggccatatgaccgagtacaagcccacggtgcgcctcgccacccgcgacgacgtccccagggccgtacgcaccctcgccgccgcgttcgccgactaccccgccacgcgccacaccgtcgatccggaccgccacatcgagcgggtcaccgagctgcaagaactcttcctcacgcgcgtcgggctcgacatcggcaaggtgtgggtcgcggacgacggcgccgcggtggcggtctggaccacgccggagagcgtcgaagcgggggcggtgttcgccgagatcggcccgcgcatggccgagttgagcggttcccggctggccgcgcagcaacagatggaaggcctcctggcgccgcaccggcccaaggagcccgcgtggttcctggccaccgtcggcgtctcgcccgaccaccagggcaagggtctgggcagcgccgtcgtgctccccggagtggaggcggccgagcgcgccggggtgcccgccttcctggagacctccgcgccccgcaacctccccttctacgagcggctcggcttcaccgtcaccgccgacgtcgaggtgcccgaaggaccgcgcacctggtgcatgacccgcaagcccggtgcctga

SEQ ID NO: 38692 - DNA, 2604 bp, synthetic construct
  source 1..2604: mol_type = other DNA
atggccttaccagtgaccgccttgctcctgccgctggccttgctgctccacgccgccaggccgctcgagatccagaaccctgatcctgccgtgtaccagctgcgggatagcaagagcagcgacaagagcgtgtgtctgttcaccgacttcgacagccagaccaacgtgtcccagagcaaggactccgacgtgtacatcaccgataagaccgtgctggacatgcggagcatggacttcaagagcaactccgccgtggcctggtccaacaagtccgatttcgcctgcgccaacgccttcaacaacagcattatccccgaggacacattcttcccaagccccgagagcagctgcgacgtgaagctggtggaaaagagcttcgagacagacaccaacctgaacttccagatcctgtacgagatcctgctgggcaaggccaccctgtacgccgtgctggtgtctgccctggtgctgatggctatggtcaagcggaaggacagccggggaagggccaagcgatctggatctggagcaacaaacttctcactactcaaacaagcaggtgacgtggaggagaatcccgggcctactagcatggccttaccagtgaccgccttgctcctgccgctggccttgctgctccacgccgccaggccggacgtggtcatgacacagagcccttctagcctgtctgccagcgtgggcgacagagtgaccatcacctgtatggcctccgaggacatctacatccggctggcctggtatcagcagaagcctggaaacgcccctaagctgctgatctacgccgccacctctctggaaacaggcgtgccaagcagattttccggcagcggctctggcaccgatttcaccctgacaatatccagcctccagcctgaggacttcgccacctactactgccagcagtattggagcagcccctggacatttggcggaggcaccaaggtggaaatcaaaggcggaggcggaagtggaggcggaggatctggcggcggaggctctcaggttcagctgcaagagtctggccccggactggtcaagcctagccaaacactgagcctgacctgtaccgtgtccggctacagcatcaccagcgactacacctggaactggatcagacagcctcctggcaacggactggaatggatcggctacatcacctacagcggcagcaccagctacaaccccagcctgaaaagccgggtgctgatctccgtggacaccagcaagaatcaggtgtccctgaagctgagcagcgtgacagccgctgataccgccgtgtactactgtgccagactggggagaagatacacaatggactactggggccagggcaccaccgtgacagtttcttctacgcgtgaggacctgaagaacgtgttcccacctgaggtggccgtgttcgagcctagcgaggccgagatcagccacacccagaaagccaccctcgtgtgcctggctaccggcttctaccccgaccatgtggaactgtcttggtgggtcaacggcaaagaggtgcacagcggcgtgtctaccgacccccagccactgaaagaacagcccgccctgaacgacagccggtactgcctgagcagcagactgagagtgtccgccaccttctggcagaacccccggaaccacttcagatgccaggtgcagttctacggcctgagcgagaacgacgagtggacccaggacagagccaagcccgtgacccagatcgtgtctgccgaagcctggggcagagccgattgcggctttaccagcgagagctaccagcagggcgtgctgagcgccaccaacctgagcgtgatcggcttcagaatcctgctgctgaaagtggccggctttaacctgctgatgaccctgcggctgtggtccagccgcgccaagagaagcggatctggcgtgaagcagaccctgaatttcgacctgctgaagctggctggcgacgtggaatccaacccaggcccttctagaggccatatgaccgagtacaagcccacggtgcgcctcgccacccgcgacgacgtccccagggccgtacgcaccctcgccgccgcgttcgccgactaccccgccacgcgccacaccgtcgatccggaccgccacatcgagcgggtcaccgagctgcaagaactcttcctcacgcgcgtcgggctcgacatcggcaaggtgtgggtcgcggacgacggcgccgcggtggcggtctggaccacgccggagagcgtcgaagcgggggcggtgttcgccgagatcggcccgcgcatggccgagttgagcggttcccggctggccgcgcagcaacagatggaaggcctcctggcgccgcaccggcccaaggagcccgcgtggttcctggccaccgtcggcgtctcgcccgaccaccagggcaagggtctgggcagcgccgtcgtgctccccggagtggaggcggccgagcgcgccggggtgcccgccttcctggagacctccgcgccccgcaacctccccttctacgagcggctcggcttcaccgtcaccgccgacgtcgaggtgcccgaaggaccgcgcacctggtgcatgacccgcaagcccggtgcctga

SEQ ID NO: 38693 - DNA, 2604 bp, synthetic construct
  source 1..2604: mol_type = other DNA
atggccttaccagtgaccgccttgctcctgccgctggccttgctgctccacgccgccaggccgctcgaggaggacctgaagaacgtgttcccacctgaggtggccgtgttcgagcctagcgaggccgagatcagccacacccagaaagccaccctcgtgtgcctggctaccggcttctaccccgaccatgtggaactgtcttggtgggtcaacggcaaagaggtgcacagcggcgtgtgtaccgacccccagccactgaaagaacagcccgccctgaacgacagccggtactgcctgagcagcagactgagagtgtccgccaccttctggcagaacccccggaaccacttcagatgccaggtgcagttctacggcctgagcgagaacgacgagtggacccaggacagagccaagcccgtgacccagatcgtgtctgccgaagcctggggcagagccgattgcgacgtgaagctggtggaaaagagcttcgagacagacaccaacctgaacttccagaacctgagcgtgatcggcttcagaatcctgctgctgaaagtggccggctttaacctgctgatgaccctgcggctgtggtccagcagggccaagcgatctggatctggagcaacaaacttctcactactcaaacaagcaggtgacgtggaggagaatcccgggcctactagcatggccttaccagtgaccgccttgctcctgccgctggccttgctgctccacgccgccaggccggacgtggtcatgacacagagcccttctagcctgtctgccagcgtgggcgacagagtgaccatcacctgtatggcctccgaggacatctacatccggctggcctggtatcagcagaagcctggaaacgcccctaagctgctgatctacgccgccacctctctggaaacaggcgtgccaagcagattttccggcagcggctctggcaccgatttcaccctgacaatatccagcctccagcctgaggacttcgccacctactactgccagcagtattggagcagcccctggacatttggcggaggcaccaaggtggaaatcaaaggcggaggcggaagtggaggcggaggatctggcggcggaggctctcaggttcagctgcaagagtctggccccggactggtcaagcctagccaaacactgagcctgacctgtaccgtgtccggctacagcatcaccagcgactacacctggaactggatcagacagcctcctggcaacggactggaatggatcggctacatcacctacagcggcagcaccagctacaaccccagcctgaaaagccgggtgctgatctccgtggacaccagcaagaatcaggtgtccctgaagctgagcagcgtgacagccgctgataccgccgtgtactactgtgccagactggggagaagatacacaatggactactggggccagggcaccaccgtgacagtttcttctacgcgtatccagaaccctgatcctgccgtgtaccagctgcgggatagcaagagcagcgacaagagcgtgtgtctgttcaccgacttcgacagccagaccaacgtgtcccagagcaaggactccgacgtgtacatcaccgataagtgcgtgctggacatgcggagcatggacttcaagagcaactccgccgtggcctggtccaacaagtccgatttcgcctgcgccaacgccttcaacaacagcattatccccgaggacacattcttcccaagccccgagagcagctgcggctttaccagcgagagctaccagcagggcgtgctgagcgccaccatcctgtacgagatcctgctgggcaaggccaccctgtacgccgtgctggtgtctgccctggtgctgatggctatggtcaagcggaaggacagccggggacgcgccaagagaagcggatctggcgtgaagcagaccctgaatttcgacctgctgaagctggctggcgacgtggaatccaacccaggcccttctagaggccatatgaccgagtacaagcccacggtgcgcctcgccacccgcgacgacgtccccagggccgtacgcaccctcgccgccgcgttcgccgactaccccgccacgcgccacaccgtcgatccggaccgccacatcgagcgggtcaccgagctgcaagaactcttcctcacgcgcgtcgggctcgacatcggcaaggtgtgggtcgcggacgacggcgccgcggtggcggtctggaccacgccggagagcgtcgaagcgggggcggtgttcgccgagatcggcccgcgcatggccgagttgagcggttcccggctggccgcgcagcaacagatggaaggcctcctggcgccgcaccggcccaaggagcccgcgtggttcctggccaccgtcggcgtctcgcccgaccaccagggcaagggtctgggcagcgccgtcgtgctccccggagtggaggcggccgagcgcgccggggtgcccgccttcctggagacctccgcgccccgcaacctccccttctacgagcggctcggcttcaccgtcaccgccgacgtcgaggtgcccgaaggaccgcgcacctggtgcatgacccgcaagcccggtgcctga

SEQ ID NO: 38694 - DNA, 2604 bp, synthetic construct
  source 1..2604: mol_type = other DNA
atggccttaccagtgaccgccttgctcctgccgctggccttgctgctccacgccgccaggccgctcgaggaggacctgaagaacgtgttcccacctgaggtggccgtgttcgagcctagcgaggccgagatcagccacacccagaaagccaccctcgtgtgcctggctaccggcttctaccccgaccatgtggaactgtcttggtgggtcaacggcaaagaggtgcacagcggcgtgtctaccgacccccagccactgaaagaacagcccgccctgaacgacagccggtactgcctgagcagcagactgagagtgtccgccaccttctggcagaacccccggaaccacttcagatgccaggtgcagttctacggcctgagcgagaacgacgagtggacccaggacagagccaagcccgtgacccagatcgtgtctgccgaagcctggggcagagccgattgcgacgtgaagctggtggaaaagagcttcgagacagacaccaacctgaacttccagaacctgagcgtgatcggcttcagaatcctgctgctgaaagtggccggctttaacctgctgatgaccctgcggctgtggtccagcagggccaagcgatctggatctggagcaacaaacttctcactactcaaacaagcaggtgacgtggaggagaatcccgggcctactagcatggccttaccagtgaccgccttgctcctgccgctggccttgctgctccacgccgccaggccggacgtggtcatgacacagagcccttctagcctgtctgccagcgtgggcgacagagtgaccatcacctgtatggcctccgaggacatctacatccggctggcctggtatcagcagaagcctggaaacgcccctaagctgctgatctacgccgccacctctctggaaacaggcgtgccaagcagattttccggcagcggctctggcaccgatttcaccctgacaatatccagcctccagcctgaggacttcgccacctactactgccagcagtattggagcagcccctggacatttggcggaggcaccaaggtggaaatcaaaggcggaggcggaagtggaggcggaggatctggcggcggaggctctcaggttcagctgcaagagtctggccccggactggtcaagcctagccaaacactgagcctgacctgtaccgtgtccggctacagcatcaccagcgactacacctggaactggatcagacagcctcctggcaacggactggaatggatcggctacatcacctacagcggcagcaccagctacaaccccagcctgaaaagccgggtgctgatctccgtggacaccagcaagaatcaggtgtccctgaagctgagcagcgtgacagccgctgataccgccgtgtactactgtgccagactggggagaagatacacaatggactactggggccagggcaccaccgtgacagtttcttctacgcgtatccagaaccctgatcctgccgtgtaccagctgcgggatagcaagagcagcgacaagagcgtgtgtctgttcaccgacttcgacagccagaccaacgtgtcccagagcaaggactccgacgtgtacatcaccgataagaccgtgctggacatgcggagcatggacttcaagagcaactccgccgtggcctggtccaacaagtccgatttcgcctgcgccaacgccttcaacaacagcattatccccgaggacacattcttcccaagccccgagagcagctgcggctttaccagcgagagctaccagcagggcgtgctgagcgccaccatcctgtacgagatcctgctgggcaaggccaccctgtacgccgtgctggtgtctgccctggtgctgatggctatggtcaagcggaaggacagccggggacgcgccaagagaagcggatctggcgtgaagcagaccctgaatttcgacctgctgaagctggctggcgacgtggaatccaacccaggcccttctagaggccatatgaccgagtacaagcccacggtgcgcctcgccacccgcgacgacgtccccagggccgtacgcaccctcgccgccgcgttcgccgactaccccgccacgcgccacaccgtcgatccggaccgccacatcgagcgggtcaccgagctgcaagaactcttcctcacgcgcgtcgggctcgacatcggcaaggtgtgggtcgcggacgacggcgccgcggtggcggtctggaccacgccggagagcgtcgaagcgggggcggtgttcgccgagatcggcccgcgcatggccgagttgagcggttcccggctggccgcgcagcaacagatggaaggcctcctggcgccgcaccggcccaaggagcccgcgtggttcctggccaccgtcggcgtctcgcccgaccaccagggcaagggtctgggcagcgccgtcgtgctccccggagtggaggcggccgagcgcgccggggtgcccgccttcctggagacctccgcgccccgcaacctccccttctacgagcggctcggcttcaccgtcaccgccgacgtcgaggtgcccgaaggaccgcgcacctggtgcatgacccgcaagcccggtgcctga

SEQ ID NO: 38695 - DNA, 2913 bp, synthetic construct
  source 1..2913: mol_type = other DNA
atggccttaccagtgaccgccttgctcctgccgctggccttgctgctccacgccgccaggccgctcgaggaggaggacctgaagaacgtgttcccacctgaggtggccgtgttcgagcctagcgaggccgagatcagccacacccagaaagccaccctcgtgtgcctggctaccggcttctaccccgaccatgtggaactgtcttggtgggtcaacggcaaagaggtgcacagcggcgtgtctaccgacccccagccactgaaagaacagcccgccctgaacgacagccggtactgcctgagcagcagactgagagtgtccgccaccttctggcagaacccccggaaccacttcagatgccaggtgcagttctacggcctgagcgagaacgacgagtggacccaggacagagccaagcccgtgacccagatcgtgtctgccgaagcctggggcagagccgatgatgtgattaagatccactggcaggaaaagaagtccaacaccatcctgggcagccaggaaggcaacaccatgaagaccaacgacacctacatgaagttcagctggctgaccgtgcccgagaagtccctggacaaagaacacagatgcatcgtgcggcacgaaaacaacaagaacggcgtggaccaggaaatcatcttcccacccatcaagaccgatgtgattacaatggaccccaaggacaactgctccaaggacgccaacgataccctgctgctccagctgaccaacaccagcgcctactacatgtacttgttgctgctgctgaagtccgtggtgtacttcgccatcatcacatgctgcctgctgcggagaaccgccttctgctgcaacggcgagaagtctagggccaagcgatctggatctggagcaacaaacttctcactactcaaacaagcaggtgacgtggaggagaatcccgggcctactagcatggccttaccagtgaccgccttgctcctgccgctggccttgctgctccacgccgccaggccggacgtggtcatgacacagagcccttctagcctgtctgccagcgtgggcgacagagtgaccatcacctgtatggcctccgaggacatctacatccggctggcctggtatcagcagaagcctggaaacgcccctaagctgctgatctacgccgccacctctctggaaacaggcgtgccaagcagattttccggcagcggctctggcaccgatttcaccctgacaatatccagcctccagcctgaggacttcgccacctactactgccagcagtattggagcagcccctggacatttggcggaggcaccaaggtggaaatcaaaggcggaggcggaagtggaggcggaggatctggcggcggaggctctcaggttcagctgcaagagtctggccccggactggtcaagcctagccaaacactgagcctgacctgtaccgtgtccggctacagcatcaccagcgactacacctggaactggatcagacagcctcctggcaacggactggaatggatcggctacatcacctacagcggcagcaccagctacaaccccagcctgaaaagccgggtgctgatctccgtggacaccagcaagaatcaggtgtccctgaagctgagcagcgtgacagccgctgataccgccgtgtactactgtgccagactggggagaagatacacaatggactactggggccagggcaccaccgtgacagtttcttctacgcgtatccagaaccctgatcctgccgtgtaccagctgcgggatagcaagagcagcgacaagagcgtgtgtctgttcaccgacttcgacagccagaccaacgtgtcccagagcaaggactccgacgtgtacatcaccgataagaccgtgctggacatgcggagcatggacttcaagagcaactccgccgtggcctggtccaacaagtccgatttcgcctgcgccaacgccttcaacaacagcattatccccgaggacacattcttcccaagccccgagagcagcgactccaccgaccacgtgaagcccaaagagacagagaacaccaagcagcccagcaagagctgccacaagcccaaggccatcgtgcacaccgagaaagtgaacatgatgagcctgaccgtgctgggcctgcggatgctgttcgccaaaaccgtggccgtgaacttcctgctgaccgccaagctgttcttcctccgcgccaagagaagcggatctggcgtgaagcagaccctgaatttcgacctgctgaagctggctggcgacgtggaatccaacccaggcccttctagaggccatatgaccgagtacaagcccacggtgcgcctcgccacccgcgacgacgtccccagggccgtacgcaccctcgccgccgcgttcgccgactaccccgccacgcgccacaccgtcgatccggaccgccacatcgagcgggtcaccgagctgcaagaactcttcctcacgcgcgtcgggctcgacatcggcaaggtgtgggtcgcggacgacggcgccgcggtggcggtctggaccacgccggagagcgtcgaagcgggggcggtgttcgccgagatcggcccgcgcatggccgagttgagcggttcccggctggccgcgcagcaacagatggaaggcctcctggcgccgcaccggcccaaggagcccgcgtggttcctggccaccgtcggcgtctcgcccgaccaccagggcaagggtctgggcagcgccgtcgtgctccccggagtggaggcggccgagcgcgccggggtgcccgccttcctggagacctccgcgccccgcaacctccccttctacgagcggctcggcttcaccgtcaccgccgacgtcgaggtgcccgaaggaccgcgcacctggtgcatgacccgcaagcccggtgcctga

SEQ ID NO: 38696 - DNA, 2604 bp, synthetic construct
  source 1..2604: mol_type = other DNA
atggccttaccagtgaccgccttgctcctgccgctggccttgctgctccacgccgccaggccgctcgaggaggacctgaagaacgtgttcccacctgaggtggccgtgttcgagcctagcgaggccgagatcagccacacccagaaagccaccctcgtgtgcctggctaccggcttctaccccgaccatgtggaactgtcttggtgggtcaacggcaaagaggtgcacagcggcgtgtgtaccgacccccagccactgaaagaacagcccgccctgaacgacagccggtactgcctgagcagcagactgagagtgtccgccaccttctggcagaacccccggaaccacttcagatgccaggtgcagttctacggcctgagcgagaacgacgagtggacccaggacagagccaagcccgtgacccagatcgtgtctgccgaagcctggggcagagccgattgcggctttaccagcgagagctaccagcagggcgtgctgagcgccaccaacctgagcgtgatcggcttcagaatcctgctgctgaaagtggccggctttaacctgctgatgaccctgcggctgtggtccagcagggccaagcgatctggatctggagcaacaaacttctcactactcaaacaagcaggtgacgtggaggagaatcccgggcctactagcatggccttaccagtgaccgccttgctcctgccgctggccttgctgctccacgccgccaggccggacgtggtcatgacacagagcccttctagcctgtctgccagcgtgggcgacagagtgaccatcacctgtatggcctccgaggacatctacatccggctggcctggtatcagcagaagcctggaaacgcccctaagctgctgatctacgccgccacctctctggaaacaggcgtgccaagcagattttccggcagcggctctggcaccgatttcaccctgacaatatccagcctccagcctgaggacttcgccacctactactgccagcagtattggagcagcccctggacatttggcggaggcaccaaggtggaaatcaaaggcggaggcggaagtggaggcggaggatctggcggcggaggctctcaggttcagctgcaagagtctggccccggactggtcaagcctagccaaacactgagcctgacctgtaccgtgtccggctacagcatcaccagcgactacacctggaactggatcagacagcctcctggcaacggactggaatggatcggctacatcacctacagcggcagcaccagctacaaccccagcctgaaaagccgggtgctgatctccgtggacaccagcaagaatcaggtgtccctgaagctgagcagcgtgacagccgctgataccgccgtgtactactgtgccagactggggagaagatacacaatggactactggggccagggcaccaccgtgacagtttcttctacgcgtatccagaaccctgatcctgccgtgtaccagctgcgggatagcaagagcagcgacaagagcgtgtgtctgttcaccgacttcgacagccagaccaacgtgtcccagagcaaggactccgacgtgtacatcaccgataagtgcgtgctggacatgcggagcatggacttcaagagcaactccgccgtggcctggtccaacaagtccgatttcgcctgcgccaacgccttcaacaacagcattatccccgaggacacattcttcccaagccccgagagcagctgcgacgtgaagctggtggaaaagagcttcgagacagacaccaacctgaacttccagatcctgtacgagatcctgctgggcaaggccaccctgtacgccgtgctggtgtctgccctggtgctgatggctatggtcaagcggaaggacagccggggacgcgccaagagaagcggatctggcgtgaagcagaccctgaatttcgacctgctgaagctggctggcgacgtggaatccaacccaggcccttctagaggccatatgaccgagtacaagcccacggtgcgcctcgccacccgcgacgacgtccccagggccgtacgcaccctcgccgccgcgttcgccgactaccccgccacgcgccacaccgtcgatccggaccgccacatcgagcgggtcaccgagctgcaagaactcttcctcacgcgcgtcgggctcgacatcggcaaggtgtgggtcgcggacgacggcgccgcggtggcggtctggaccacgccggagagcgtcgaagcgggggcggtgttcgccgagatcggcccgcgcatggccgagttgagcggttcccggctggccgcgcagcaacagatggaaggcctcctggcgccgcaccggcccaaggagcccgcgtggttcctggccaccgtcggcgtctcgcccgaccaccagggcaagggtctgggcagcgccgtcgtgctccccggagtggaggcggccgagcgcgccggggtgcccgccttcctggagacctccgcgccccgcaacctccccttctacgagcggctcggcttcaccgtcaccgccgacgtcgaggtgcccgaaggaccgcgcacctggtgcatgacccgcaagcccggtgcctga

SEQ ID NO: 38697 - DNA, 2691 bp, synthetic construct
  source 1..2691: mol_type = other DNA
atggccttaccagtgaccgccttgctcctgccgctggccttgctgctccacgccgccaggccgctcgaggaggaggacctgaagaacgtgttcccacctgaggtggccgtgttcgagcctagcgaggccgagatcagccacacccagaaagccaccctcgtgtgcctggctaccggcttctaccccgaccatgtggaactgtcttggtgggtcaacggcaaagaggtgcacagcggcgtgtgtaccgacccccagccactgaaagaacagcccgccctgaacgacagccggtactgcctgagcagcagactgagagtgtccgccaccttctggcagaacccccggaaccacttcagatgccaggtgcagttctacggcctgagcgagaacgacgagtggacccaggacagagccaagcccgtgacccagatcgtgtctgccgaagcctggggcagagccgattgcggctttaccagcgagagctaccagcagggcgtgctgagcgccaccaacctgagcgtgatcggcttcagaatcctgctgctgaaagtggccggctttaacctgctgatgaccctgcggctgtggtccagcagggccaagcgatctggatctggagcaacaaacttctcactactcaaacaagcaggtgacgtggaggagaatcccgggcctactagcatggccttaccagtgaccgccttgctcctgccgctggccttgctgctccacgccgccaggccggacgtggtcatgacacagagcccttctagcctgtctgccagcgtgggcgacagagtgaccatcacctgtatggcctccgaggacatctacatccggctggcctggtatcagcagaagcctggaaacgcccctaagctgctgatctacgccgccacctctctggaaacaggcgtgccaagcagattttccggcagcggctctggcaccgatttcaccctgacaatatccagcctccagcctgaggacttcgccacctactactgccagcagtattggagcagcccctggacatttggcggaggcaccaaggtggaaatcaaaggcggaggcggaagtggaggcggaggatctggcggcggaggctctcaggttcagctgcaagagtctggccccggactggtcaagcctagccaaacactgagcctgacctgtaccgtgtccggctacagcatcaccagcgactacacctggaactggatcagacagcctcctggcaacggactggaatggatcggctacatcacctacagcggcagcaccagctacaaccccagcctgaaaagccgggtgctgatctccgtggacaccagcaagaatcaggtgtccctgaagctgagcagcgtgacagccgctgataccgccgtgtactactgtgccagactggggagaagatacacaatggactactggggccagggcaccaccgtgacagtttcttctacgcgtggacagcctaaggccaatcctaccgtgacactgttccctccaagcagcgaagaactccaggccaacaaggccacacttgtgtgcctgatctccgacttctaccctggggctgtgacagtggcttggaaggccgatggatctcctgtgaaagccggcgtggaaaccaccaagccatccaagcagagcaacaacaaatacgccgccagctcctacctgagcctgacacctgagcagtggaagtcccacagatcctacagctgccaagtgacccacgaaggcagcaccgtggaaaagacagtggcccctacagagtgcagccccatcaagaccgatgtgattacaatggaccccaaggacaactgctccaaggacgccaacgataccctgctgctccagctgaccaacaccagcgcctactacatgtacttgttgctgctgctgaagtccgtggtgtacttcgccatcatcacatgctgcctgctgcggagaaccgccttctgctgcaacggcgagaagtctcgcgccaagagaagcggatctggcgtgaagcagaccctgaatttcgacctgctgaagctggctggcgacgtggaatccaacccaggcccttctagaggccatatgaccgagtacaagcccacggtgcgcctcgccacccgcgacgacgtccccagggccgtacgcaccctcgccgccgcgttcgccgactaccccgccacgcgccacaccgtcgatccggaccgccacatcgagcgggtcaccgagctgcaagaactcttcctcacgcgcgtcgggctcgacatcggcaaggtgtgggtcgcggacgacggcgccgcggtggcggtctggaccacgccggagagcgtcgaagcgggggcggtgttcgccgagatcggcccgcgcatggccgagttgagcggttcccggctggccgcgcagcaacagatggaaggcctcctggcgccgcaccggcccaaggagcccgcgtggttcctggccaccgtcggcgtctcgcccgaccaccagggcaagggtctgggcagcgccgtcgtgctccccggagtggaggcggccgagcgcgccggggtgcccgccttcctggagacctccgcgccccgcaacctccccttctacgagcggctcggcttcaccgtcaccgccgacgtcgaggtgcccgaaggaccgcgcacctggtgcatgacccgcaagcccggtgcctga

SEQ ID NO: 38698 - DNA, 2691 bp, synthetic construct
  source 1..2691: mol_type = other DNA
atggccttaccagtgaccgccttgctcctgccgctggccttgctgctccacgccgccaggccgctcgagggacagcctaaggccaatcctaccgtgacactgttccctccaagcagcgaagaactccaggccaacaaggccacacttgtgtgcctgatctccgacttctaccctggggctgtgacagtggcttggaaggccgatggatctcctgtgaaagccggcgtggaaaccaccaagccatccaagcagagcaacaacaaatacgccgccagctcctacctgagcctgacacctgagcagtggaagtcccacagatcctacagctgccaagtgacccacgaaggcagcaccgtggaaaagacagtggcccctacagagtgcagccccatcaagaccgatgtgattacaatggaccccaaggacaactgctccaaggacgccaacgataccctgctgctccagctgaccaacaccagcgcctactacatgtacttgttgctgctgctgaagtccgtggtgtacttcgccatcatcacatgctgcctgctgcggagaaccgccttctgctgcaacggcgagaagtctagggccaagcgatctggatctggagcaacaaacttctcactactcaaacaagcaggtgacgtggaggagaatcccgggcctactagcatggccttaccagtgaccgccttgctcctgccgctggccttgctgctccacgccgccaggccggacgtggtcatgacacagagcccttctagcctgtctgccagcgtgggcgacagagtgaccatcacctgtatggcctccgaggacatctacatccggctggcctggtatcagcagaagcctggaaacgcccctaagctgctgatctacgccgccacctctctggaaacaggcgtgccaagcagattttccggcagcggctctggcaccgatttcaccctgacaatatccagcctccagcctgaggacttcgccacctactactgccagcagtattggagcagcccctggacatttggcggaggcaccaaggtggaaatcaaaggcggaggcggaagtggaggcggaggatctggcggcggaggctctcaggttcagctgcaagagtctggccccggactggtcaagcctagccaaacactgagcctgacctgtaccgtgtccggctacagcatcaccagcgactacacctggaactggatcagacagcctcctggcaacggactggaatggatcggctacatcacctacagcggcagcaccagctacaaccccagcctgaaaagccgggtgctgatctccgtggacaccagcaagaatcaggtgtccctgaagctgagcagcgtgacagccgctgataccgccgtgtactactgtgccagactggggagaagatacacaatggactactggggccagggcaccaccgtgacagtttcttctacgcgtgaggaggacctgaagaacgtgttcccacctgaggtggccgtgttcgagcctagcgaggccgagatcagccacacccagaaagccaccctcgtgtgcctggctaccggcttctaccccgaccatgtggaactgtcttggtgggtcaacggcaaagaggtgcacagcggcgtgtgtaccgacccccagccactgaaagaacagcccgccctgaacgacagccggtactgcctgagcagcagactgagagtgtccgccaccttctggcagaacccccggaaccacttcagatgccaggtgcagttctacggcctgagcgagaacgacgagtggacccaggacagagccaagcccgtgacccagatcgtgtctgccgaagcctggggcagagccgattgcggctttaccagcgagagctaccagcagggcgtgctgagcgccaccaacctgagcgtgatcggcttcagaatcctgctgctgaaagtggccggctttaacctgctgatgaccctgcggctgtggtccagccgcgccaagagaagcggatctggcgtgaagcagaccctgaatttcgacctgctgaagctggctggcgacgtggaatccaacccaggcccttctagaggccatatgaccgagtacaagcccacggtgcgcctcgccacccgcgacgacgtccccagggccgtacgcaccctcgccgccgcgttcgccgactaccccgccacgcgccacaccgtcgatccggaccgccacatcgagcgggtcaccgagctgcaagaactcttcctcacgcgcgtcgggctcgacatcggcaaggtgtgggtcgcggacgacggcgccgcggtggcggtctggaccacgccggagagcgtcgaagcgggggcggtgttcgccgagatcggcccgcgcatggccgagttgagcggttcccggctggccgcgcagcaacagatggaaggcctcctggcgccgcaccggcccaaggagcccgcgtggttcctggccaccgtcggcgtctcgcccgaccaccagggcaagggtctgggcagcgccgtcgtgctccccggagtggaggcggccgagcgcgccggggtgcccgccttcctggagacctccgcgccccgcaacctccccttctacgagcggctcggcttcaccgtcaccgccgacgtcgaggtgcccgaaggaccgcgcacctggtgcatgacccgcaagcccggtgcctga

SEQ ID NO: 38699 - DNA, 2682 bp, synthetic construct
  source 1..2682: mol_type = other DNA
atggccttaccagtgaccgccttgctcctgccgctggccttgctgctccacgccgccaggccgctcgaggaggcctctacaaagggaccctccgtgtttcctctggctcccagcagcaagtctacaagcggaggaacagccgctctgggctgcctggtcaaggattactttcccgagcctgtgaccgtgtcctggaatagcggagcactgacaagcggcgtgcacacctttccagccgtgctgcaaagcagcggcctgtactctctgagcagcgtggtcacagtgcctagctctagcctgggcacccagacctacatctgcaatgtgaaccacaagcctagcaacaccaaggtggacaagagagtggaacccaagagctgtcccatcaagaccgatgtgattacaatggaccccaaggacaactgctccaaggacgccaacgataccctgctgctccagctgaccaacaccagcgcctactacatgtacttgttgctgctgctgaagtccgtggtgtacttcgccatcatcacatgctgcctgctgcggagaaccgccttctgctgcaacggcgagaagtctagggccaagcgatctggatctggagcaacaaacttctcactactcaaacaagcaggtgacgtggaggagaatcccgggcctactagcatggccttaccagtgaccgccttgctcctgccgctggccttgctgctccacgccgccaggccggacgtggtcatgacacagagcccttctagcctgtctgccagcgtgggcgacagagtgaccatcacctgtatggcctccgaggacatctacatccggctggcctggtatcagcagaagcctggaaacgcccctaagctgctgatctacgccgccacctctctggaaacaggcgtgccaagcagattttccggcagcggctctggcaccgatttcaccctgacaatatccagcctccagcctgaggacttcgccacctactactgccagcagtattggagcagcccctggacatttggcggaggcaccaaggtggaaatcaaaggcggaggcggaagtggaggcggaggatctggcggcggaggctctcaggttcagctgcaagagtctggccccggactggtcaagcctagccaaacactgagcctgacctgtaccgtgtccggctacagcatcaccagcgactacacctggaactggatcagacagcctcctggcaacggactggaatggatcggctacatcacctacagcggcagcaccagctacaaccccagcctgaaaagccgggtgctgatctccgtggacaccagcaagaatcaggtgtccctgaagctgagcagcgtgacagccgctgataccgccgtgtactactgtgccagactggggagaagatacacaatggactactggggccagggcaccaccgtgacagtttcttctacgcgtggacagcctaaggccaatcctaccgtgacactgttccctccaagcagcgaagaactccaggccaacaaggccacacttgtgtgcctgatctccgacttctaccctggggctgtgacagtggcttggaaggccgatggatctcctgtgaaagccggcgtggaaaccaccaagccatccaagcagagcaacaacaaatacgccgccagctcctacctgagcctgacacctgagcagtggaagtcccacagatcctacagctgccaagtgacccacgaaggcagcaccgtggaaaagacagtggcccctacagagtgcagcgaagtgaaaaccgactccaccgaccacgtgaagcccaaagagacagagaacaccaagcagcccagcaagagctgccacaagcccaaggccatcgtgcacaccgagaaagtgaacatgatgagcctgaccgtgctgggcctgcggatgctgttcgccaaaaccgtggccgtgaacttcctgctgaccgccaagctgttcttcctccgcgccaagagaagcggatctggcgtgaagcagaccctgaatttcgacctgctgaagctggctggcgacgtggaatccaacccaggcccttctagaggccatatgaccgagtacaagcccacggtgcgcctcgccacccgcgacgacgtccccagggccgtacgcaccctcgccgccgcgttcgccgactaccccgccacgcgccacaccgtcgatccggaccgccacatcgagcgggtcaccgagctgcaagaactcttcctcacgcgcgtcgggctcgacatcggcaaggtgtgggtcgcggacgacggcgccgcggtggcggtctggaccacgccggagagcgtcgaagcgggggcggtgttcgccgagatcggcccgcgcatggccgagttgagcggttcccggctggccgcgcagcaacagatggaaggcctcctggcgccgcaccggcccaaggagcccgcgtggttcctggccaccgtcggcgtctcgcccgaccaccagggcaagggtctgggcagcgccgtcgtgctccccggagtggaggcggccgagcgcgccggggtgcccgccttcctggagacctccgcgccccgcaacctccccttctacgagcggctcggcttcaccgtcaccgccgacgtcgaggtgcccgaaggaccgcgcacctggtgcatgacccgcaagcccggtgcctga

SEQ ID NO: 38700 - DNA, 2616 bp, synthetic construct
  source 1..2616: mol_type = other DNA
atggccttaccagtgaccgccttgctcctgccgctggccttgctgctccacgccgccaggccgctcgaggaggcctctacaaagggaccctccgtgtttcctctggctcccagcagcaagtctacaagcggaggaacagccgctctgggctgcctggtcaaggattactttcccgagcctgtgaccgtgtcctggaatagcggagcactgacaagcggcgtgcacacctttccagccgtgctgcaaagcagcggcctgtactctctgagcagcgtggtcacagtgcctagctctagcctgggcacccagacctacatctgcaatgtgaaccacaagcctagcaacaccaaggtggacaagagagtggaacccaagagctgtggcagagccgattgcggctttaccagcgagagctaccagcagggcgtgctgagcgccaccatcctgtacgagatcctgctgggcaaggccaccctgtacgccgtgctggtgtctgccctggtgctgatggctatggtcaagcggaaggacagccggggaagggccaagcgatctggatctggagcaacaaacttctcactactcaaacaagcaggtgacgtggaggagaatcccgggcctactagcatggccttaccagtgaccgccttgctcctgccgctggccttgctgctccacgccgccaggccggacgtggtcatgacacagagcccttctagcctgtctgccagcgtgggcgacagagtgaccatcacctgtatggcctccgaggacatctacatccggctggcctggtatcagcagaagcctggaaacgcccctaagctgctgatctacgccgccacctctctggaaacaggcgtgccaagcagattttccggcagcggctctggcaccgatttcaccctgacaatatccagcctccagcctgaggacttcgccacctactactgccagcagtattggagcagcccctggacatttggcggaggcaccaaggtggaaatcaaaggcggaggcggaagtggaggcggaggatctggcggcggaggctctcaggttcagctgcaagagtctggccccggactggtcaagcctagccaaacactgagcctgacctgtaccgtgtccggctacagcatcaccagcgactacacctggaactggatcagacagcctcctggcaacggactggaatggatcggctacatcacctacagcggcagcaccagctacaaccccagcctgaaaagccgggtgctgatctccgtggacaccagcaagaatcaggtgtccctgaagctgagcagcgtgacagccgctgataccgccgtgtactactgtgccagactggggagaagatacacaatggactactggggccagggcaccaccgtgacagtttcttctacgcgtggacagcctaaggccaatcctaccgtgacactgttccctccaagcagcgaagaactccaggccaacaaggccacacttgtgtgcctgatctccgacttctaccctggggctgtgacagtggcttggaaggccgatggatctcctgtgaaagccggcgtggaaaccaccaagccatccaagcagagcaacaacaaatacgccgccagctcctacctgagcctgacacctgagcagtggaagtcccacagatcctacagctgccaagtgacccacgaaggcagcaccgtggaaaagacagtggcccctacagagtgcagcatccccgaggacacattcttcccaagccccgagagcagctgcgacgtgaagctggtggaaaagagcttcgagacagacaccaacctgaacttccagaacctgagcgtgatcggcttcagaatcctgctgctgaaagtggccggctttaacctgctgatgaccctgcggctgtggtccagccgcgccaagagaagcggatctggcgtgaagcagaccctgaatttcgacctgctgaagctggctggcgacgtggaatccaacccaggcccttctagaggccatatgaccgagtacaagcccacggtgcgcctcgccacccgcgacgacgtccccagggccgtacgcaccctcgccgccgcgttcgccgactaccccgccacgcgccacaccgtcgatccggaccgccacatcgagcgggtcaccgagctgcaagaactcttcctcacgcgcgtcgggctcgacatcggcaaggtgtgggtcgcggacgacggcgccgcggtggcggtctggaccacgccggagagcgtcgaagcgggggcggtgttcgccgagatcggcccgcgcatggccgagttgagcggttcccggctggccgcgcagcaacagatggaaggcctcctggcgccgcaccggcccaaggagcccgcgtggttcctggccaccgtcggcgtctcgcccgaccaccagggcaagggtctgggcagcgccgtcgtgctccccggagtggaggcggccgagcgcgccggggtgcccgccttcctggagacctccgcgccccgcaacctccccttctacgagcggctcggcttcaccgtcaccgccgacgtcgaggtgcccgaaggaccgcgcacctggtgcatgacccgcaagcccggtgcctga

SEQ ID NO: 38701 - DNA, 2616 bp, synthetic construct
  source 1..2616: mol_type = other DNA
atggccttaccagtgaccgccttgctcctgccgctggccttgctgctccacgccgccaggccgctcgaggaggcctctacaaagggaccctccgtgtttcctctggctcccagcagcaagtctacaagcggaggaacagccgctctgggctgcctggtcaaggattactttcccgagcctgtgaccgtgtcctggaatagcggagcactgacaagcggcgtgcacacctttccagccgtgctgcaaagcagcggcctgtactctctgagcagcgtggtcacagtgcctagctctagcctgggcacccagacctacatctgcaatgtgaaccacaagcctagcaacaccaaggtggacaagagagtggaacccaagagctgtatccccgaggacacattcttcccaagccccgagagcagctgcgacgtgaagctggtggaaaagagcttcgagacagacaccaacctgaacttccagaacctgagcgtgatcggcttcagaatcctgctgctgaaagtggccggctttaacctgctgatgaccctgcggctgtggtccagcagggccaagcgatctggatctggagcaacaaacttctcactactcaaacaagcaggtgacgtggaggagaatcccgggcctactagcatggccttaccagtgaccgccttgctcctgccgctggccttgctgctccacgccgccaggccggacgtggtcatgacacagagcccttctagcctgtctgccagcgtgggcgacagagtgaccatcacctgtatggcctccgaggacatctacatccggctggcctggtatcagcagaagcctggaaacgcccctaagctgctgatctacgccgccacctctctggaaacaggcgtgccaagcagattttccggcagcggctctggcaccgatttcaccctgacaatatccagcctccagcctgaggacttcgccacctactactgccagcagtattggagcagcccctggacatttggcggaggcaccaaggtggaaatcaaaggcggaggcggaagtggaggcggaggatctggcggcggaggctctcaggttcagctgcaagagtctggccccggactggtcaagcctagccaaacactgagcctgacctgtaccgtgtccggctacagcatcaccagcgactacacctggaactggatcagacagcctcctggcaacggactggaatggatcggctacatcacctacagcggcagcaccagctacaaccccagcctgaaaagccgggtgctgatctccgtggacaccagcaagaatcaggtgtccctgaagctgagcagcgtgacagccgctgataccgccgtgtactactgtgccagactggggagaagatacacaatggactactggggccagggcaccaccgtgacagtttcttctacgcgtggacagcctaaggccaatcctaccgtgacactgttccctccaagcagcgaagaactccaggccaacaaggccacacttgtgtgcctgatctccgacttctaccctggggctgtgacagtggcttggaaggccgatggatctcctgtgaaagccggcgtggaaaccaccaagccatccaagcagagcaacaacaaatacgccgccagctcctacctgagcctgacacctgagcagtggaagtcccacagatcctacagctgccaagtgacccacgaaggcagcaccgtggaaaagacagtggcccctacagagtgcagcggcagagccgattgcggctttaccagcgagagctaccagcagggcgtgctgagcgccaccatcctgtacgagatcctgctgggcaaggccaccctgtacgccgtgctggtgtctgccctggtgctgatggctatggtcaagcggaaggacagccggggacgcgccaagagaagcggatctggcgtgaagcagaccctgaatttcgacctgctgaagctggctggcgacgtggaatccaacccaggcccttctagaggccatatgaccgagtacaagcccacggtgcgcctcgccacccgcgacgacgtccccagggccgtacgcaccctcgccgccgcgttcgccgactaccccgccacgcgccacaccgtcgatccggaccgccacatcgagcgggtcaccgagctgcaagaactcttcctcacgcgcgtcgggctcgacatcggcaaggtgtgggtcgcggacgacggcgccgcggtggcggtctggaccacgccggagagcgtcgaagcgggggcggtgttcgccgagatcggcccgcgcatggccgagttgagcggttcccggctggccgcgcagcaacagatggaaggcctcctggcgccgcaccggcccaaggagcccgcgtggttcctggccaccgtcggcgtctcgcccgaccaccagggcaagggtctgggcagcgccgtcgtgctccccggagtggaggcggccgagcgcgccggggtgcccgccttcctggagacctccgcgccccgcaacctccccttctacgagcggctcggcttcaccgtcaccgccgacgtcgaggtgcccgaaggaccgcgcacctggtgcatgacccgcaagcccggtgcctga

SEQ ID NO: 38702 - DNA, 1854 bp, synthetic construct
  source 1..1854: mol_type = other DNA
atggccttaccagtgaccgccttgctcctgccgctggccttgctgctccacgccgccaggccggacgtggtcatgacacagagcccttctagcctgtctgccagcgtgggcgacagagtgaccatcacctgtatggcctccgaggacatctacatccggctggcctggtatcagcagaagcctggaaacgcccctaagctgctgatctacgccgccacctctctggaaacaggcgtgccaagcagattttccggcagcggctctggcaccgatttcaccctgacaatatccagcctccagcctgaggacttcgccacctactactgccagcagtattggagcagcccctggacatttggcggaggcaccaaggtggaaatcaaactcgaggacctgaagaacgtgttcccacctgaggtggccgtgttcgagcctagcgaggccgagatcagccacacccagaaagccaccctcgtgtgcctggctaccggcttctaccccgaccatgtggaactgtcttggtgggtcaacggcaaagaggtgcacagcggcgtgtgtaccgacccccagccactgaaagaacagcccgccctgaacgacagccggtactgcctgagcagcagactgagagtgtccgccaccttctggcagaacccccggaaccacttcagatgccaggtgcagttctacggcctgagcgagaacgacgagtggacccaggacagagccaagcccgtgacccagatcgtgtctgccgaagcctggggcagagccgatagcggctttaccagcgagagctaccagcagggcgtgctgagcgccaccatcctgtacgagatcctgctgggcaaggccaccctgtacgccgtgctggtgtctgccctggtgctgatggctatggtcaagcggaaggacagccggggaagggccaagcgatctggatctggagcaacaaacttctcactactcaaacaagcaggtgacgtggaggagaatcccgggcctactagtatggactggatttggcgcatccttttccttgtcggcgctgctaccggcgcgcattccttcgaacaggttcagctgcaagagtctggccccggactggtcaagcctagccaaacactgagcctgacctgtaccgtgtccggctacagcatcaccagcgactacacctggaactggatcagacagcctcctggcaacggactggaatggatcggctacatcacctacagcggcagcaccagctacaaccccagcctgaaaagccgggtgctgatctccgtggacaccagcaagaatcaggtgtccctgaagctgagcagcgtgacagccgctgataccgccgtgtactactgtgccagactggggagaagatacacaatggactactggggccagggcaccaccgtgacagtttcttctacgcgtatccagaaccctgatcctgccgtgtaccagctgcgggatagcaagagcagcgacaagagcgtgtgtctgttcaccgacttcgacagccagaccaacgtgtcccagagcaaggactccgacgtgtacatcaccgataagtgcgtgctggacatgcggagcatggacttcaagagcaactccgccgtggcctggtccaacaagtccgatttcgcctgcgccaacgccttcaacaacagcattatccccgaggacacattcttcccaagccccgagagcagcagcgacgtgaagctggtggaaaagagcttcgagacagacaccaacctgaacttccagaacctgagcgtgatcggcttcagaatcctgctgctgaaagtggccggctttaacctgctgatgaccctgcggctgtggtccagc

SEQ ID NO: 38703 - DNA, 2694 bp, synthetic construct
  source 1..2694: mol_type = other DNA
atggccttaccagtgaccgccttgctcctgccgctggccttgctgctccacgccgccaggccggaggttcagctgcttgagtctggcggaggactggttcaacctggcggaagcctgagactgtcttgtgccgcctctggcagaaccttcagcatgggctggtatagacaggcccctggcaagggcctcgaatttgtgtctgccatcacatacagcggcggcagcccttactacgccgattctgtgaagggcagattcaccatcagccgggacaacagcaagaacaccgtgtacctccagatgaacagcctgagagccgaggacaccgccgtgtactactgtgccgccaatccaacctacggcagcgactggaatgccgagaattggggccagggcacactggtcacagtgtctagtggtaccggcggaggcggatctggcggcggaggtagcggtggcggaggatctgaattcgacgtggtcatgacacagagcccttctagcctgtctgccagcgtgggcgacagagtgaccatcacctgtatggcctccgaggacatctacatccggctggcctggtatcagcagaagcctggaaacgcccctaagctgctgatctacgccgccacctctctggaaacaggcgtgccaagcagattttccggcagcggctctggcaccgatttcaccctgacaatatccagcctccagcctgaggacttcgccacctactactgccagcagtattggagcagcccctggacatttggcggaggcaccaaggtggaaatcaaactcgagatccagaaccctgatcctgccgtgtaccagctgcgggatagcaagagcagcgacaagagcgtgtgtctgttcaccgacttcgacagccagaccaacgtgtcccagagcaaggactccgacgtgtacatcaccgataagtgcgtgctggacatgcggagcatggacttcaagagcaactccgccgtggcctggtccaacaagtccgatttcgcctgcgccaacgccttcaacaacagcattatccccgaggacacattcttcccaagcagcgacgtgccctgcgacgtgaagctggtggaaaagagcttcgagacagacaccaacctgaacttccagaacctgagcgtgatcggcttcagaatcctgctgctgaaagtggccggctttaacctgctgatgaccctgcggctgtggtccagccgcgccaagagaagcggatctggcgtgaagcagaccctgaatttcgacctgctgaagctggctggcgacgtggaatccaacccaggccctactagtaccatggactggatttggcgcatccttttccttgtcggcgctgctaccggcacccattccgggcccgaagtgcaactggttgaatccggtggcggcctggtgcaacccggcggatctctcagacttagctgtgccgcctccggcagaaccttcacaatgggatggtacaggcaggctccagggaaagagagagagttcgtcgccgccatctctctgtctcccacactggcctactacgccgactctgtgaaaggccggttcaccatctccagagataatagcaagaacaccgtggtgctgcaaatgaactctctgagagccgaggatacagccctgtactattgtgccgctgaccggaagtccgtgatgagcatcagacccgattactggggacagggcacactggtcacagtgtctagtggatccggcggcggaggatctggcggaggcggatctgggggcggaggctctttcgaacaggttcagctgcaagagtctggccccggactggtcaagcctagccaaacactgagcctgacctgtaccgtgtccggctacagcatcaccagcgactacacctggaactggatcagacagcctcctggcaacggactggaatggatcggctacatcacctacagcggcagcaccagctacaaccccagcctgaaaagccgggtgctgatctccgtggacaccagcaagaatcaggtgtccctgaagctgagcagcgtgacagccgctgataccgccgtgtactactgtgccagactggggagaagatacacaatggactactggggccagggcaccaccgtgacagtttcttctacgcgtgaggacctgaagaacgtgttcccacctgaggtggccgtgttcgagcctagcaaggccgagatcgcccacacccagaaagccaccctcgtgtgcctggctaccggcttctaccccgaccatgtggaactgtcttggtgggtcaacggcaaagaggtgcacagcggcgtgtgtaccgacccccagccactgaaagaacagcccgccctgaacgacagccggtactgcctgagcagcagactgagagtgtccgccaccttctggcagaacccccggaaccacttcagatgccaggtgcagttctacggcctgagcgagaacgacgagtggacccaggacagagccaagcccgtgacccagatcgtgtctgccgaagcctggggcagagccgattgcggcatcaccagcgccagctaccaccagggcgtgctgagcgccaccatcctgtacgagatcctgctgggcaaggccaccctgtacgccgtgctggtgtctgccctggtgctgatggctatggtcaagcggaaggacagccggggataa

SEQ ID NO: 38704 - DNA, 2694 bp, synthetic construct
  source 1..2694: mol_type = other DNA
atggccttaccagtgaccgccttgctcctgccgctggccttgctgctccacgccgccaggccggaagtgcagctggttgaatctggcggaggactggttcaggctggcggatctctgagactgtcttgtgccgccagcggcagaacctttagcatgggctggtttagacaggcccctggcaaagagagagagttcgtcgccgccatcacatactctggcggcagcccttactacgccgactctgtgaagggcagattcaccatcagccgggacaacgccaagaacaccgtgtacctccagatgaacagcctgaagcctgaggacaccgccgtgtactactgcgccgccaatccaacatacggcagcgactggaacgccgagaattggggccagggaacccaagtgacagtgtctagcggtaccggcggaggcggatctggcggcggaggtagcggtggcggaggatctgaattcgacgtggtcatgacacagagcccttctagcctgtctgccagcgtgggcgacagagtgaccatcacctgtatggcctccgaggacatctacatccggctggcctggtatcagcagaagcctggaaacgcccctaagctgctgatctacgccgccacctctctggaaacaggcgtgccaagcagattttccggcagcggctctggcaccgatttcaccctgacaatatccagcctccagcctgaggacttcgccacctactactgccagcagtattggagcagcccctggacatttggcggaggcaccaaggtggaaatcaaactcgagatccagaaccctgatcctgccgtgtaccagctgcgggatagcaagagcagcgacaagagcgtgtgtctgttcaccgacttcgacagccagaccaacgtgtcccagagcaaggactccgacgtgtacatcaccgataagtgcgtgctggacatgcggagcatggacttcaagagcaactccgccgtggcctggtccaacaagtccgatttcgcctgcgccaacgccttcaacaacagcattatccccgaggacacattcttcccaagcagcgacgtgccctgcgacgtgaagctggtggaaaagagcttcgagacagacaccaacctgaacttccagaacctgagcgtgatcggcttcagaatcctgctgctgaaagtggccggctttaacctgctgatgaccctgcggctgtggtccagccgcgccaagagaagcggatctggcgtgaagcagaccctgaatttcgacctgctgaagctggctggcgacgtggaatccaacccaggccctactagtaccatggactggatttggcgcatccttttccttgtcggcgctgctaccggcgcccattccgggcccgaagtgcaactggttgaatccggtggcggcctggtgcaacccggcggatctctcagacttagctgtgccgcctccggcagaaccttcacaatgggatggtacaggcaggctccagggaaagagagagagttcgtcgccgccatctctctgtctcccacactggcctactacgccgactctgtgaaaggccggttcaccatctccagagataatagcaagaacaccgtggtgctgcaaatgaactctctgagagccgaggatacagccctgtactattgtgccgctgaccggaagtccgtgatgagcatcagacccgattactggggacagggcacactggtcacagtgtctagtggatccggcggcggaggatctggcggaggcggatctgggggcggaggctctttcgaacaggttcagctgcaagagtctggccccggactggtcaagcctagccaaacactgagcctgacctgtaccgtgtccggctacagcatcaccagcgactacacctggaactggatcagacagcctcctggcaacggactggaatggatcggctacatcacctacagcggcagcaccagctacaaccccagcctgaaaagccgggtgctgatctccgtggacaccagcaagaatcaggtgtccctgaagctgagcagcgtgacagccgctgataccgccgtgtactactgtgccagactggggagaagatacacaatggactactggggccagggcaccaccgtgacagtttcttctacgcgtgaggacctgaagaacgtgttcccacctgaggtggccgtgttcgagcctagcaaggccgagatcgcccacacccagaaagccaccctcgtgtgcctggctaccggcttctaccccgaccatgtggaactgtcttggtgggtcaacggcaaagaggtgcacagcggcgtgtgtaccgacccccagccactgaaagaacagcccgccctgaacgacagccggtactgcctgagcagcagactgagagtgtccgccaccttctggcagaacccccggaaccacttcagatgccaggtgcagttctacggcctgagcgagaacgacgagtggacccaggacagagccaagcccgtgacccagatcgtgtctgccgaagcctggggcagagccgattgcggcatcaccagcgccagctaccaccagggcgtgctgagcgccaccatcctgtacgagatcctgctgggcaaggccaccctgtacgccgtgctggtgtctgccctggtgctgatggctatggtcaagcggaaggacagccggggataa

SEQ ID NO: 38705 - DNA, 2685 bp, synthetic construct
  source 1..2685: mol_type = other DNA
atggccttaccagtgaccgccttgctcctgccgctggccttgctgctccacgccgccaggccggaagtgcagctggttgaatctggcggaggactggttcaggctggcggatctctgagactgtcttgtgccgccagcggcagaacctttagcatgggctggtttagacaggcccctggcaaagagagagagttcgtcgccgccatcacatactctggcggcagcccttactacgccgactctgtgaagggcagattcaccatcagccgggacaacgccaagaacaccgtgtacctccagatgaacagcctgaagcctgaggacaccgccgtgtactactgcgccgccaatccaacatacggcagcgactggaacgccgagaattggggccagggaacccaagtgacagtgtctagcggtaccggcggaggcggatctggcggcggaggtagcggtggcggaggatctgaattcgacgtggtcatgacacagagcccttctagcctgtctgccagcgtgggcgacagagtgaccatcacctgtatggcctccgaggacatctacatccggctggcctggtatcagcagaagcctggaaacgcccctaagctgctgatctacgccgccacctctctggaaacaggcgtgccaagcagattttccggcagcggctctggcaccgatttcaccctgacaatatccagcctccagcctgaggacttcgccacctactactgccagcagtattggagcagcccctggacatttggcggaggcaccaaggtggaaatcaaactcgaggacctgaagaacgtgttcccacctgaggtggccgtgttcgagcctagcgaggccgagatcagccacacccagaaagccaccctcgtgtgcctggctaccggcttctaccccgaccatgtggaactgtcttggtgggtcaacggcaaagaggtgcacagcggcgtgtgtaccgacccccagccactgaaagaacagcccgccctgaacgacagccggtactgcctgagcagcagactgagagtgtccgccaccttctggcagaacccccggaaccacttcagatgccaggtgcagttctacggcctgagcgagaacgacgagtggacccaggacagagccaagcccgtgacccagatcgtgtctgccgaagcctggggcagagccgattgcggctttaccagcgagagctaccagcagggcgtgctgagcgccaccatcctgtacgagatcctgctgggcaaggccaccctgtacgccgtgctggtgtctgccctggtgctgatggctatggtcaagcggaaggacagccggggaagggccaagcgatctggatctggagcaacaaacttctcactactcaaacaagcaggtgacgtggaggagaatcccgggcctactagtgccaccatggactggatttggcgcatccttttccttgtcggcgctgctaccggcgcccattccgggcccgaagtgcaactggttgaatccggtggcggcctggtgcaagcaggcggatctctcagacttagctgtgccgcctccggcagaaccttcacaatgggatggtttaggcaggctccagggaaagagagagagttcgtcgccgccatctctctgtctcccacactggcctactacgccgactctgtgaaaggccggttcaccatctccagagataatgccaagaacaccgtggtgctgcaaatgaactctctgaaacccgaggatacagccctgtactattgtgccgctgaccggaagtccgtgatgagcatcagacccgattactggggacagggcacacaagtcacagtgtcctctggatccggcggcggaggatctggcggaggcggatctgggggcggaggctctttcgaacaggttcagctgcaagagtctggccccggactggtcaagcctagccaaacactgagcctgacctgtaccgtgtccggctacagcatcaccagcgactacacctggaactggatcagacagcctcctggcaacggactggaatggatcggctacatcacctacagcggcagcaccagctacaaccccagcctgaaaagccgggtgctgatctccgtggacaccagcaagaatcaggtgtccctgaagctgagcagcgtgacagccgctgataccgccgtgtactactgtgccagactggggagaagatacacaatggactactggggccagggcaccaccgtgacagtttcttctacgcgtatccagaaccctgatcctgccgtgtaccagctgcgggatagcaagagcagcgacaagagcgtgtgtctgttcaccgacttcgacagccagaccaacgtgtcccagagcaaggactccgacgtgtacatcaccgataagtgcgtgctggacatgcggagcatggacttcaagagcaactccgccgtggcctggtccaacaagtccgatttcgcctgcgccaacgccttcaacaacagcattatccccgaggacacattcttcccaagccccgagagcagctgcgacgtgaagctggtggaaaagagcttcgagacagacaccaacctgaacttccagaacctgagcgtgatcggcttcagaatcctgctgctgaaagtggccggctttaacctgctgatgaccctgcggctgtggtccagctaa

SEQ ID NO: 38706 - DNA, 2298 bp, synthetic construct
  source 1..2298: mol_type = other DNA
atggccttaccagtgaccgccttgctcctgccgctggccttgctgctccacgccgccaggccggaagtgcagctggttgaatctggcggaggactggttcagcctggcggatctctgagactgagctgtgaagccagcggcttcgccagcgacgattacatcatcggctggttcagacaggcccctggcaaagagagagagggcgtcagctgcatcagctctaagtacgccaacaccgtgtacaccgacagcgtgaagggcagattcagactgagcagaggcaccgccaagaataccgtgtacctccagatgagcgccctgaagcctgaggataccgccgtgtactactgcgctatggacagccgcagagtgacatgccctgagatcagcaccatgcaccggaacttcgattcttggggccagggcacactggtcacagtgtcatctggtaccggcggaggcggatctggcggcggaggtagcggtggcggaggatctgaattcgacgtggtcatgacacagagcccttctagcctgtctgccagcgtgggcgacagagtgaccatcacctgtatggcctccgaggacatctacatccggctggcctggtatcagcagaagcctggaaacgcccctaagctgctgatctacgccgccacctctctggaaacaggcgtgccaagcagattttccggcagcggctctggcaccgatttcaccctgacaatatccagcctccagcctgaggacttcgccacctactactgccagcagtattggagcagcccctggacatttggcggaggcaccaaggtggaaatcaaactcgaggacctgaagaacgtgttcccacctgaggtggccgtgttcgagcctagcaaggccgagatcgcccacacccagaaagccaccctcgtgtgcctggctaccggcttctaccccgaccatgtggaactgtcttggtgggtcaacggcaaagaggtgcacagcggcgtgtgtaccgacccccagccactgaaagaacagcccgccctgaacgacagccggtactgcctgagcagcagactgagagtgtccgccaccttctggcagaacccccggaaccacttcagatgccaggtgcagttctacggcctgagcgagaacgacgagtggacccaggacagagccaagcccgtgacccagatcgtgtctgccgaagcctggggcagagccgattgcggcatcaccagcgccagctaccaccagggcgtgctgagcgccaccatcctgtacgagatcctgctgggcaaggccaccctgtacgccgtgctggtgtctgccctggtgctgatggctatggtcaagcggaaggacagccggggaagggccaagcgatctggatctggagcaacaaacttctcactactcaaacaagcaggtgacgtggaggagaatcccgggcctactagtatggactggatttggcgcatccttttccttgtcggcgctgctaccggcgcgcattccttcgaacaggttcagctgcaagagtctggccccggactggtcaagcctagccaaacactgagcctgacctgtaccgtgtccggctacagcatcaccagcgactacacctggaactggatcagacagcctcctggcaacggactggaatggatcggctacatcacctacagcggcagcaccagctacaaccccagcctgaaaagccgggtgctgatctccgtggacaccagcaagaatcaggtgtccctgaagctgagcagcgtgacagccgctgataccgccgtgtactactgtgccagactggggagaagatacacaatggactactggggccagggcaccaccgtgacagtttcttctacgcgtatccagaaccctgatcctgccgtgtaccagctgcgggatagcaagagcagcgacaagagcgtgtgtctgttcaccgacttcgacagccagaccaacgtgtcccagagcaaggactccgacgtgtacatcaccgataagtgcgtgctggacatgcggagcatggacttcaagagcaactccgccgtggcctggtccaacaagtccgatttcgcctgcgccaacgccttcaacaacagcattatccccgaggacacattcttcccaagcagcgacgtgccctgcgacgtgaagctggtggaaaagagcttcgagacagacaccaacctgaacttccagaacctgagcgtgatcggcttcagaatcctgctgctgaaagtggccggctttaacctgctgatgaccctgcggctgtggtccagctaa

SEQ ID NO: 38707 - DNA, 2271 bp, synthetic construct
  source 1..2271: mol_type = other DNA
atggccttaccagtgaccgccttgctcctgccgctggccttgctgctccacgccgccaggccggacgtggtcatgacacagagcccttctagcctgtctgccagcgtgggcgacagagtgaccatcacctgtatggcctccgaggacatctacatccggctggcctggtatcagcagaagcctggaaacgcccctaagctgctgatctacgccgccacctctctggaaacaggcgtgccaagcagattttccggcagcggctctggcaccgatttcaccctgacaatatccagcctccagcctgaggacttcgccacctactactgccagcagtattggagcagcccctggacatttggcggaggcaccaaggtggaaatcaaactcgaggacctgaagaacgtgttcccacctgaggtggccgtgttcgagcctagcgaggccgagatcagccacacccagaaagccaccctcgtgtgcctggctaccggcttctaccccgaccatgtggaactgtcttggtgggtcaacggcaaagaggtgcacagcggcgtgtgtaccgacccccagccactgaaagaacagcccgccctgaacgacagccggtactgcctgagcagcagactgagagtgtccgccaccttctggcagaacccccggaaccacttcagatgccaggtgcagttctacggcctgagcgagaacgacgagtggacccaggacagagccaagcccgtgacccagatcgtgtctgccgaagcctggggcagagccgattgcggctttaccagcgagagctaccagcagggcgtgctgagcgccaccatcctgtacgagatcctgctgggcaaggccaccctgtacgccgtgctggtgtctgccctggtgctgatggctatggtcaagcggaaggacagccggggaagggccaagcgatctggatctggagcaacaaacttctcactactcaaacaagcaggtgacgtggaggagaatcccgggcctactagtaccatggactggatttggcgcatccttttccttgtcggcgctgctaccggcgcccattccgggcccgaagtgcaactggttgaatccggtggcggcctggtgcaacccggcggatctctcagacttagctgtgccgcctccggcagaaccttcacaatgggatggtacaggcaggctccagggaaagagagagagttcgtcgccgccatctctctgtctcccacactggcctactacgccgactctgtgaaaggccggttcaccatctccagagataatagcaagaacaccgtggtgctgcaaatgaactctctgagagccgaggatacagccctgtactattgtgccgctgaccggaagtccgtgatgagcatcagacccgattactggggacagggcacactggtcacagtgtctagtggatccggcggcggaggatctggcggaggcggatctgggggcggaggctctttcgaacaggttcagctgcaagagtctggccccggactggtcaagcctagccaaacactgagcctgacctgtaccgtgtccggctacagcatcaccagcgactacacctggaactggatcagacagcctcctggcaacggactggaatggatcggctacatcacctacagcggcagcaccagctacaaccccagcctgaaaagccgggtgctgatctccgtggacaccagcaagaatcaggtgtccctgaagctgagcagcgtgacagccgctgataccgccgtgtactactgtgccagactggggagaagatacacaatggactactggggccagggcaccaccgtgacagtttcttctacgcgtatccagaaccctgatcctgccgtgtaccagctgcgggatagcaagagcagcgacaagagcgtgtgtctgttcaccgacttcgacagccagaccaacgtgtcccagagcaaggactccgacgtgtacatcaccgataagtgcgtgctggacatgcggagcatggacttcaagagcaactccgccgtggcctggtccaacaagtccgatttcgcctgcgccaacgccttcaacaacagcattatccccgaggacacattcttcccaagccccgagagcagctgcgacgtgaagctggtggaaaagagcttcgagacagacaccaacctgaacttccagaacctgagcgtgatcggcttcagaatcctgctgctgaaagtggccggctttaacctgctgatgaccctgcggctgtggtccagctaa

SEQ ID NO: 38708 - DNA, 2289 bp, synthetic construct
  source 1..2289: mol_type = other DNA
atggccttaccagtgaccgccttgctcctgccgctggccttgctgctccacgccgccaggccggacgtggtcatgacacagagcccttctagcctgtctgccagcgtgggcgacagagtgaccatcacctgtatggcctccgaggacatctacatccggctggcctggtatcagcagaagcctggaaacgcccctaagctgctgatctacgccgccacctctctggaaacaggcgtgccaagcagattttccggcagcggctctggcaccgatttcaccctgacaatatccagcctccagcctgaggacttcgccacctactactgccagcagtattggagcagcccctggacatttggcggaggcaccaaggtggaaatcaaactcgaggacctgaagaacgtgttcccacctgaggtggccgtgttcgagcctagcgaggccgagatcagccacacccagaaagccaccctcgtgtgcctggctaccggcttctaccccgaccatgtggaactgtcttggtgggtcaacggcaaagaggtgcacagcggcgtgtgtaccgacccccagccactgaaagaacagcccgccctgaacgacagccggtactgcctgagcagcagactgagagtgtccgccaccttctggcagaacccccggaaccacttcagatgccaggtgcagttctacggcctgagcgagaacgacgagtggacccaggacagagccaagcccgtgacccagatcgtgtctgccgaagcctggggcagagccgattgcggctttaccagcgagagctaccagcagggcgtgctgagcgccaccatcctgtacgagatcctgctgggcaaggccaccctgtacgccgtgctggtgtctgccctggtgctgatggctatggtcaagcggaaggacagccggggaagggccaagcgatctggatctggagcaacaaacttctcactactcaaacaagcaggtgacgtggaggagaatcccgggcctactagtaccatggactggatttggcgcatccttttccttgtcggcgctgctaccggcgcccattccgggccccaggtgcagctggttgaatctggcggaggactggttcagcctggcggatctctgagactgtcttgtgccgccagcggcaacatcaacagcagaaactgcatgggctggttcagacaggcccctggcaagggaagagaaggcgtggcagctatcggccaagtgaccggcagaacctactacgtggacagcgtgaagggcagattcaccatcagcctggacaacagcaagaacaccctgtacctccagatgaacagcctgagagccgaggacaccgccgtgtactattgtgctgctgcccctggctgtctgctgtctgcacttagaagcgccgactacagaaactggggccagggcacactggtcaccgtttcttctggatccggcggcggaggatctggcggaggcggatctgggggcggaggctctttcgaacaggttcagctgcaagagtctggccccggactggtcaagcctagccaaacactgagcctgacctgtaccgtgtccggctacagcatcaccagcgactacacctggaactggatcagacagcctcctggcaacggactggaatggatcggctacatcacctacagcggcagcaccagctacaaccccagcctgaaaagccgggtgctgatctccgtggacaccagcaagaatcaggtgtccctgaagctgagcagcgtgacagccgctgataccgccgtgtactactgtgccagactggggagaagatacacaatggactactggggccagggcaccaccgtgacagtttcttctacgcgtatccagaaccctgatcctgccgtgtaccagctgcgggatagcaagagcagcgacaagagcgtgtgtctgttcaccgacttcgacagccagaccaacgtgtcccagagcaaggactccgacgtgtacatcaccgataagtgcgtgctggacatgcggagcatggacttcaagagcaactccgccgtggcctggtccaacaagtccgatttcgcctgcgccaacgccttcaacaacagcattatccccgaggacacattcttcccaagccccgagagcagctgcgacgtgaagctggtggaaaagagcttcgagacagacaccaacctgaacttccagaacctgagcgtgatcggcttcagaatcctgctgctgaaagtggccggctttaacctgctgatgaccctgcggctgtggtccagc

SEQ ID NO: 38709 - DNA, 2292 bp, synthetic construct
  source 1..2292: mol_type = other DNA
atggccttaccagtgaccgccttgctcctgccgctggccttgctgctccacgccgccaggccggacgtggtcatgacacagagcccttctagcctgtctgccagcgtgggcgacagagtgaccatcacctgtatggcctccgaggacatctacatccggctggcctggtatcagcagaagcctggaaacgcccctaagctgctgatctacgccgccacctctctggaaacaggcgtgccaagcagattttccggcagcggctctggcaccgatttcaccctgacaatatccagcctccagcctgaggacttcgccacctactactgccagcagtattggagcagcccctggacatttggcggaggcaccaaggtggaaatcaaactcgaggacctgaagaacgtgttcccacctgaggtggccgtgttcgagcctagcgaggccgagatcagccacacccagaaagccaccctcgtgtgcctggctaccggcttctaccccgaccatgtggaactgtcttggtgggtcaacggcaaagaggtgcacagcggcgtgtgtaccgacccccagccactgaaagaacagcccgccctgaacgacagccggtactgcctgagcagcagactgagagtgtccgccaccttctggcagaacccccggaaccacttcagatgccaggtgcagttctacggcctgagcgagaacgacgagtggacccaggacagagccaagcccgtgacccagatcgtgtctgccgaagcctggggcagagccgattgcggctttaccagcgagagctaccagcagggcgtgctgagcgccaccatcctgtacgagatcctgctgggcaaggccaccctgtacgccgtgctggtgtctgccctggtgctgatggctatggtcaagcggaaggacagccggggaagggccaagcgatctggatctggagcaacaaacttctcactactcaaacaagcaggtgacgtggaggagaatcccgggcctactagtaccatggactggatttggcgcatccttttccttgtcggcgctgctaccggcgcccattccgggccccaggtgcagctggttgaatctggcggaggatctgttcaggctggcggctctctgagactgtcttgtggcgcttccggcaacatcagcagcagaaactgcatgggctggttcagacaggcccctggcaaagagagagaaggcgttgccgccatcggacaagtgaccggcagatcctactacgtggacagcgtgaagggcagattcaccatcagcctggacaacgccaagaacaccctgtacctccagatgaacacactgaagcccgaggacaccgccatgtactactgtgctgctgcccctggctgtctgctgtctgcacttagaagcgccgactacagaaactggggccagggaacccaagtgacagtgtctagtggatccggcggcggaggatctggcggaggcggatctgggggcggaggctctttcgaacaggttcagctgcaagagtctggccccggactggtcaagcctagccaaacactgagcctgacctgtaccgtgtccggctacagcatcaccagcgactacacctggaactggatcagacagcctcctggcaacggactggaatggatcggctacatcacctacagcggcagcaccagctacaaccccagcctgaaaagccgggtgctgatctccgtggacaccagcaagaatcaggtgtccctgaagctgagcagcgtgacagccgctgataccgccgtgtactactgtgccagactggggagaagatacacaatggactactggggccagggcaccaccgtgacagtttcttctacgcgtatccagaaccctgatcctgccgtgtaccagctgcgggatagcaagagcagcgacaagagcgtgtgtctgttcaccgacttcgacagccagaccaacgtgtcccagagcaaggactccgacgtgtacatcaccgataagtgcgtgctggacatgcggagcatggacttcaagagcaactccgccgtggcctggtccaacaagtccgatttcgcctgcgccaacgccttcaacaacagcattatccccgaggacacattcttcccaagccccgagagcagctgcgacgtgaagctggtggaaaagagcttcgagacagacaccaacctgaacttccagaacctgagcgtgatcggcttcagaatcctgctgctgaaagtggccggctttaacctgctgatgaccctgcggctgtggtccagctaa

SEQ ID NO: 38710 - DNA, 2715 bp, synthetic construct
  source 1..2715: mol_type = other DNA
atggccttaccagtgaccgccttgctcctgccgctggccttgctgctccacgccgccaggccggaagtgcagctggttgaatctggcggaggactggttcaggctggcggatctctgagactgtcttgtgccgccagcggcagaacctttagcatgggctggtttagacaggcccctggcaaagagagagagttcgtcgccgccatcacatactctggcggcagcccttactacgccgactctgtgaagggcagattcaccatcagccgggacaacgccaagaacaccgtgtacctccagatgaacagcctgaagcctgaggacaccgccgtgtactactgcgccgccaatccaacatacggcagcgactggaacgccgagaattggggccagggaacccaagtgacagtgtctagcggtaccggcggaggcggatctggcggcggaggtagcggtggcggaggatctgaattcgacgtggtcatgacacagagcccttctagcctgtctgccagcgtgggcgacagagtgaccatcacctgtatggcctccgaggacatctacatccggctggcctggtatcagcagaagcctggaaacgcccctaagctgctgatctacgccgccacctctctggaaacaggcgtgccaagcagattttccggcagcggctctggcaccgatttcaccctgacaatatccagcctccagcctgaggacttcgccacctactactgccagcagtattggagcagcccctggacatttggcggaggcaccaaggtggaaatcaaactcgagatccagaaccctgatcctgccgtgtaccagctgcgggatagcaagagcagcgacaagagcgtgtgtctgttcaccgacttcgacagccagaccaacgtgtcccagagcaaggactccgacgtgtacatcaccgataagtgcgtgctggacatgcggagcatggacttcaagagcaactccgccgtggcctggtccaacaagtccgatttcgcctgcgccaacgccttcaacaacagcattatccccgaggacacattcttcccaagcagcgacgtgccctgcgacgtgaagctggtggaaaagagcttcgagacagacaccaacctgaacttccagaacctgagcgtgatcggcttcagaatcctgctgctgaaagtggccggctttaacctgctgatgaccctgcggctgtggtccagccgcgccaagagaagcggatctggcgtgaagcagaccctgaatttcgacctgctgaagctggctggcgacgtggaatccaacccaggccctactagtaccatggactggatttggcgcatccttttccttgtcggcgctgctaccggcgcccattccgggccccaggtgcagctggttgaatctggcggaggatctgttcaggctggcggctctctgagactgtcttgtggcgcttccggcaacatcagcagcagaaactgcatgggctggttcagacaggcccctggcaaagagagagaaggcgttgccgccatcggacaagtgaccggcagatcctactacgtggacagcgtgaagggcagattcaccatcagcctggacaacgccaagaacaccctgtacctccagatgaacacactgaagcccgaggacaccgccatgtactactgtgctgctgcccctggctgtctgctgtctgcacttagaagcgccgactacagaaactggggccagggaacccaagtgacagtgtctagtggatccggcggcggaggatctggcggaggcggatctgggggcggaggctctttcgaacaggttcagctgcaagagtctggccccggactggtcaagcctagccaaacactgagcctgacctgtaccgtgtccggctacagcatcaccagcgactacacctggaactggatcagacagcctcctggcaacggactggaatggatcggctacatcacctacagcggcagcaccagctacaaccccagcctgaaaagccgggtgctgatctccgtggacaccagcaagaatcaggtgtccctgaagctgagcagcgtgacagccgctgataccgccgtgtactactgtgccagactggggagaagatacacaatggactactggggccagggcaccaccgtgacagtttcttctacgcgtgaggacctgaagaacgtgttcccacctgaggtggccgtgttcgagcctagcaaggccgagatcgcccacacccagaaagccaccctcgtgtgcctggctaccggcttctaccccgaccatgtggaactgtcttggtgggtcaacggcaaagaggtgcacagcggcgtgtgtaccgacccccagccactgaaagaacagcccgccctgaacgacagccggtactgcctgagcagcagactgagagtgtccgccaccttctggcagaacccccggaaccacttcagatgccaggtgcagttctacggcctgagcgagaacgacgagtggacccaggacagagccaagcccgtgacccagatcgtgtctgccgaagcctggggcagagccgattgcggcatcaccagcgccagctaccaccagggcgtgctgagcgccaccatcctgtacgagatcctgctgggcaaggccaccctgtacgccgtgctggtgtctgccctggtgctgatggctatggtcaagcggaaggacagccggggataa

SEQ ID NO: 38711 - DNA, 2706 bp, synthetic construct
  source 1..2706: mol_type = other DNA
atggccttaccagtgaccgccttgctcctgccgctggccttgctgctccacgccgccaggccgcaggtgcagctggttgaatctggcggaggatctgttcaggctggcggctctctgagactgtcttgtggcgcttccggcaacatcagcagcagaaactgcatgggctggttcagacaggcccctggcaaagagagagaaggcgttgccgccatcggacaagtgaccggcagatcctactacgtggacagcgtgaagggcagattcaccatcagcctggacaacgccaagaacaccctgtacctccagatgaacacactgaagcccgaggacaccgccatgtactactgtgctgctgcccctggctgtctgctgtctgcacttagaagcgccgactacagaaactggggccagggaacccaagtgacagtgtctagtggtaccggcggaggcggatctggcggcggaggtagcggtggcggaggatctgaattcgacgtggtcatgacacagagcccttctagcctgtctgccagcgtgggcgacagagtgaccatcacctgtatggcctccgaggacatctacatccggctggcctggtatcagcagaagcctggaaacgcccctaagctgctgatctacgccgccacctctctggaaacaggcgtgccaagcagattttccggcagcggctctggcaccgatttcaccctgacaatatccagcctccagcctgaggacttcgccacctactactgccagcagtattggagcagcccctggacatttggcggaggcaccaaggtggaaatcaaactcgaggacctgaagaacgtgttcccacctgaggtggccgtgttcgagcctagcgaggccgagatcagccacacccagaaagccaccctcgtgtgcctggctaccggcttctaccccgaccatgtggaactgtcttggtgggtcaacggcaaagaggtgcacagcggcgtgtgtaccgacccccagccactgaaagaacagcccgccctgaacgacagccggtactgcctgagcagcagactgagagtgtccgccaccttctggcagaacccccggaaccacttcagatgccaggtgcagttctacggcctgagcgagaacgacgagtggacccaggacagagccaagcccgtgacccagatcgtgtctgccgaagcctggggcagagccgattgcggctttaccagcgagagctaccagcagggcgtgctgagcgccaccatcctgtacgagatcctgctgggcaaggccaccctgtacgccgtgctggtgtctgccctggtgctgatggctatggtcaagcggaaggacagccggggaagggccaagcgatctggatctggagcaacaaacttctcactactcaaacaagcaggtgacgtggaggagaatcccgggcctactagtgccaccatggactggatttggcgcatccttttccttgtcggcgctgctaccggcgcccattccgggcccgaagtgcaactggttgaatccggtggcggcctggtgcaagcaggcggatctctcagacttagctgtgccgcctccggcagaaccttcacaatgggatggtttaggcaggctccagggaaagagagagagttcgtcgccgccatctctctgtctcccacactggcctactacgccgactctgtgaaaggccggttcaccatctccagagataatgccaagaacaccgtggtgctgcaaatgaactctctgaaacccgaggatacagccctgtactattgtgccgctgaccggaagtccgtgatgagcatcagacccgattactggggacagggcacacaagtcacagtgtcctctggatccggcggcggaggatctggcggaggcggatctgggggcggaggctctttcgaacaggttcagctgcaagagtctggccccggactggtcaagcctagccaaacactgagcctgacctgtaccgtgtccggctacagcatcaccagcgactacacctggaactggatcagacagcctcctggcaacggactggaatggatcggctacatcacctacagcggcagcaccagctacaaccccagcctgaaaagccgggtgctgatctccgtggacaccagcaagaatcaggtgtccctgaagctgagcagcgtgacagccgctgataccgccgtgtactactgtgccagactggggagaagatacacaatggactactggggccagggcaccaccgtgacagtttcttctacgcgtatccagaaccctgatcctgccgtgtaccagctgcgggatagcaagagcagcgacaagagcgtgtgtctgttcaccgacttcgacagccagaccaacgtgtcccagagcaaggactccgacgtgtacatcaccgataagtgcgtgctggacatgcggagcatggacttcaagagcaactccgccgtggcctggtccaacaagtccgatttcgcctgcgccaacgccttcaacaacagcattatccccgaggacacattcttcccaagccccgagagcagctgcgacgtgaagctggtggaaaagagcttcgagacagacaccaacctgaacttccagaacctgagcgtgatcggcttcagaatcctgctgctgaaagtggccggctttaacctgctgatgaccctgcggctgtggtccagctaa

SEQ ID NO: 38712 - DNA, 2295 bp, synthetic construct
  source 1..2295: mol_type = other DNA
atggccttaccagtgaccgccttgctcctgccgctggccttgctgctccacgccgccaggccgcaggtgcagctggttgaatctggcggaggatctgttcaggctggcggctctctgagactgtcttgtggcgcttccggcaacatcagcagcagaaactgcatgggctggttcagacaggcccctggcaaagagagagaaggcgttgccgccatcggacaagtgaccggcagatcctactacgtggacagcgtgaagggcagattcaccatcagcctggacaacgccaagaacaccctgtacctccagatgaacacactgaagcccgaggacaccgccatgtactactgtgctgctgcccctggctgtctgctgtctgcacttagaagcgccgactacagaaactggggccagggaacccaagtgacagtgtctagtggtaccggcggaggcggatctggcggcggaggtagcggtggcggaggatctgaattcgacgtggtcatgacacagagcccttctagcctgtctgccagcgtgggcgacagagtgaccatcacctgtatggcctccgaggacatctacatccggctggcctggtatcagcagaagcctggaaacgcccctaagctgctgatctacgccgccacctctctggaaacaggcgtgccaagcagattttccggcagcggctctggcaccgatttcaccctgacaatatccagcctccagcctgaggacttcgccacctactactgccagcagtattggagcagcccctggacatttggcggaggcaccaaggtggaaatcaaactcgaggacctgaagaacgtgttcccacctgaggtggccgtgttcgagcctagcgaggccgagatcagccacacccagaaagccaccctcgtgtgcctggctaccggcttctaccccgaccatgtggaactgtcttggtgggtcaacggcaaagaggtgcacagcggcgtgtgtaccgacccccagccactgaaagaacagcccgccctgaacgacagccggtactgcctgagcagcagactgagagtgtccgccaccttctggcagaacccccggaaccacttcagatgccaggtgcagttctacggcctgagcgagaacgacgagtggacccaggacagagccaagcccgtgacccagatcgtgtctgccgaagcctggggcagagccgattgcggctttaccagcgagagctaccagcagggcgtgctgagcgccaccatcctgtacgagatcctgctgggcaaggccaccctgtacgccgtgctggtgtctgccctggtgctgatggctatggtcaagcggaaggacagccggggaagggccaagcgatctggatctggagcaacaaacttctcactactcaaacaagcaggtgacgtggaggagaatcccgggcctactagtgccaccatggactggatttggcgcatccttttccttgtcggcgctgctaccggcgcccattccttcgaacaggttcagctgcaagagtctggccccggactggtcaagcctagccaaacactgagcctgacctgtaccgtgtccggctacagcatcaccagcgactacacctggaactggatcagacagcctcctggcaacggactggaatggatcggctacatcacctacagcggcagcaccagctacaaccccagcctgaaaagccgggtgctgatctccgtggacaccagcaagaatcaggtgtccctgaagctgagcagcgtgacagccgctgataccgccgtgtactactgtgccagactggggagaagatacacaatggactactggggccagggcaccaccgtgacagtttcttctacgcgtatccagaaccctgatcctgccgtgtaccagctgcgggatagcaagagcagcgacaagagcgtgtgtctgttcaccgacttcgacagccagaccaacgtgtcccagagcaaggactccgacgtgtacatcaccgataagtgcgtgctggacatgcggagcatggacttcaagagcaactccgccgtggcctggtccaacaagtccgatttcgcctgcgccaacgccttcaacaacagcattatccccgaggacacattcttcccaagccccgagagcagctgcgacgtgaagctggtggaaaagagcttcgagacagacaccaacctgaacttccagaacctgagcgtgatcggcttcagaatcctgctgctgaaagtggccggctttaacctgctgatgaccctgcggctgtggtccagctaa

SEQ ID NO: 38713 - DNA, 2295 bp, synthetic construct
  source 1..2295: mol_type = other DNA
atggccttaccagtgaccgccttgctcctgccgctggccttgctgctccacgccgccaggccgcaagttcagctggtggaaagcggtggtggcgttgtgcaacctggtggaagtctgaggctgagctgtgccgcttctggcctgagctttagcacctacactgtggcctggttcaggcaggctcccggaaagggtcttgaaggcgtggccgccattccttacaccagccagcacatggtgtacacagacagcgtcagaggccggttcaccatcagcagagacaactccaagaatacgctctatctccagatgaactctctgcgcgccgaagatacagccgtgtattactgcgccaccgacagacggcctggcacctctatgctggctatcaacggctacaacagatggggacagggaaccaccgtgaccgtgtcatctggtaccggcggaggcggatctggcggcggaggtagcggtggcggaggatctgaattcgacgtggtcatgacacagagcccttctagcctgtctgccagcgtgggcgacagagtgaccatcacctgtatggcctccgaggacatctacatccggctggcctggtatcagcagaagcctggaaacgcccctaagctgctgatctacgccgccacctctctggaaacaggcgtgccaagcagattttccggcagcggctctggcaccgatttcaccctgacaatatccagcctccagcctgaggacttcgccacctactactgccagcagtattggagcagcccctggacatttggcggaggcaccaaggtggaaatcaaactcgaggacctgaagaacgtgttcccacctgaggtggccgtgttcgagcctagcgaggccgagatcagccacacccagaaagccaccctcgtgtgcctggctaccggcttctaccccgaccatgtggaactgtcttggtgggtcaacggcaaagaggtgcacagcggcgtgtgtaccgacccccagccactgaaagaacagcccgccctgaacgacagccggtactgcctgagcagcagactgagagtgtccgccaccttctggcagaacccccggaaccacttcagatgccaggtgcagttctacggcctgagcgagaacgacgagtggacccaggacagagccaagcccgtgacccagatcgtgtctgccgaagcctggggcagagccgattgcggctttaccagcgagagctaccagcagggcgtgctgagcgccaccatcctgtacgagatcctgctgggcaaggccaccctgtacgccgtgctggtgtctgccctggtgctgatggctatggtcaagcggaaggacagccggggaagggccaagcgatctggatctggagcaacaaacttctcactactcaaacaagcaggtgacgtggaggagaatcccgggcctactagtgccaccatggactggatttggcgcatccttttccttgtcggcgctgctaccggcgcccattccttcgaacaggttcagctgcaagagtctggccccggactggtcaagcctagccaaacactgagcctgacctgtaccgtgtccggctacagcatcaccagcgactacacctggaactggatcagacagcctcctggcaacggactggaatggatcggctacatcacctacagcggcagcaccagctacaaccccagcctgaaaagccgggtgctgatctccgtggacaccagcaagaatcaggtgtccctgaagctgagcagcgtgacagccgctgataccgccgtgtactactgtgccagactggggagaagatacacaatggactactggggccagggcaccaccgtgacagtttcttctacgcgtatccagaaccctgatcctgccgtgtaccagctgcgggatagcaagagcagcgacaagagcgtgtgtctgttcaccgacttcgacagccagaccaacgtgtcccagagcaaggactccgacgtgtacatcaccgataagtgcgtgctggacatgcggagcatggacttcaagagcaactccgccgtggcctggtccaacaagtccgatttcgcctgcgccaacgccttcaacaacagcattatccccgaggacacattcttcccaagccccgagagcagctgcgacgtgaagctggtggaaaagagcttcgagacagacaccaacctgaacttccagaacctgagcgtgatcggcttcagaatcctgctgctgaaagtggccggctttaacctgctgatgaccctgcggctgtggtccagctaa

SEQ ID NO: 38714 - DNA, 2292 bp, synthetic construct
  source 1..2292: mol_type = other DNA
atggccttaccagtgaccgccttgctcctgccgctggccttgctgctccacgccgccaggccggacgtggtcatgacacagagcccttctagcctgtctgccagcgtgggcgacagagtgaccatcacctgtatggcctccgaggacatctacatccggctggcctggtatcagcagaagcctggaaacgcccctaagctgctgatctacgccgccacctctctggaaacaggcgtgccaagcagattttccggcagcggctctggcaccgatttcaccctgacaatatccagcctccagcctgaggacttcgccacctactactgccagcagtattggagcagcccctggacatttggcggaggcaccaaggtggaaatcaaactcgaggacctgaagaacgtgttcccacctgaggtggccgtgttcgagcctagcgaggccgagatcagccacacccagaaagccaccctcgtgtgcctggctaccggcttctaccccgaccatgtggaactgtcttggtgggtcaacggcaaagaggtgcacagcggcgtgtgtaccgacccccagccactgaaagaacagcccgccctgaacgacagccggtactgcctgagcagcagactgagagtgtccgccaccttctggcagaacccccggaaccacttcagatgccaggtgcagttctacggcctgagcgagaacgacgagtggacccaggacagagccaagcccgtgacccagatcgtgtctgccgaagcctggggcagagccgattgcggctttaccagcgagagctaccagcagggcgtgctgagcgccaccatcctgtacgagatcctgctgggcaaggccaccctgtacgccgtgctggtgtctgccctggtgctgatggctatggtcaagcggaaggacagccggggaagggccaagcgatctggatctggagcaacaaacttctcactactcaaacaagcaggtgacgtggaggagaatcccgggcctactagtaccatggactggatttggcgcatccttttccttgtcggcgctgctaccggcgcccattccgggccccaagttcagctggtggaaagcggtggtggcgttgtgcaacctggtggaagtctgaggctgagctgtgccgcttctggcctgagctttagcacctacactgtggcctggttcaggcaggctcccggaaagggtcttgaaggcgtggccgccattccttacaccagccagcacatggtgtacacagacagcgtcagaggccggttcaccatcagcagagacaactccaagaatacgctctatctccagatgaactctctgcgcgccgaagatacagccgtgtattactgcgccaccgacagacggcctggcacctctatgctggctatcaacggctacaacagatggggacagggaaccaccgtgaccgtgtcatctggatccggcggcggaggatctggcggaggcggatctgggggcggaggctctttcgaacaggttcagctgcaagagtctggccccggactggtcaagcctagccaaacactgagcctgacctgtaccgtgtccggctacagcatcaccagcgactacacctggaactggatcagacagcctcctggcaacggactggaatggatcggctacatcacctacagcggcagcaccagctacaaccccagcctgaaaagccgggtgctgatctccgtggacaccagcaagaatcaggtgtccctgaagctgagcagcgtgacagccgctgataccgccgtgtactactgtgccagactggggagaagatacacaatggactactggggccagggcaccaccgtgacagtttcttctacgcgtatccagaaccctgatcctgccgtgtaccagctgcgggatagcaagagcagcgacaagagcgtgtgtctgttcaccgacttcgacagccagaccaacgtgtcccagagcaaggactccgacgtgtacatcaccgataagtgcgtgctggacatgcggagcatggacttcaagagcaactccgccgtggcctggtccaacaagtccgatttcgcctgcgccaacgccttcaacaacagcattatccccgaggacacattcttcccaagccccgagagcagctgcgacgtgaagctggtggaaaagagcttcgagacagacaccaacctgaacttccagaacctgagcgtgatcggcttcagaatcctgctgctgaaagtggccggctttaacctgctgatgaccctgcggctgtggtccagctaa

SEQ ID NO: 38715 - DNA, 2298 bp, synthetic construct
  source 1..2298: mol_type = other DNA
atggccttaccagtgaccgccttgctcctgccgctggccttgctgctccacgccgccaggccggacgtggtcatgacacagagcccttctagcctgtctgccagcgtgggcgacagagtgaccatcacctgtatggcctccgaggacatctacatccggctggcctggtatcagcagaagcctggaaacgcccctaagctgctgatctacgccgccacctctctggaaacaggcgtgccaagcagattttccggcagcggctctggcaccgatttcaccctgacaatatccagcctccagcctgaggacttcgccacctactactgccagcagtattggagcagcccctggacatttggcggaggcaccaaggtggaaatcaaactcgaggacctgaagaacgtgttcccacctgaggtggccgtgttcgagcctagcgaggccgagatcagccacacccagaaagccaccctcgtgtgcctggctaccggcttctaccccgaccatgtggaactgtcttggtgggtcaacggcaaagaggtgcacagcggcgtgtgtaccgacccccagccactgaaagaacagcccgccctgaacgacagccggtactgcctgagcagcagactgagagtgtccgccaccttctggcagaacccccggaaccacttcagatgccaggtgcagttctacggcctgagcgagaacgacgagtggacccaggacagagccaagcccgtgacccagatcgtgtctgccgaagcctggggcagagccgattgcggctttaccagcgagagctaccagcagggcgtgctgagcgccaccatcctgtacgagatcctgctgggcaaggccaccctgtacgccgtgctggtgtctgccctggtgctgatggctatggtcaagcggaaggacagccggggaagggccaagcgatctggatctggagcaacaaacttctcactactcaaacaagcaggtgacgtggaggagaatcccgggcctactagtaccatggactggatttggcgcatccttttccttgtcggcgctgctaccggcgcccattccgggcccgaggtgcagctggttgaatctggcggaggatctgttcaggctggcggctctctgagactgtcttgtgccgccagcggctacacctacagcatcaactgcatgggctggttcagacaggcccctggcaaagagagagaaggcgttgccgccatctctaccggcggaggcagaaccgattaccgggattctgtgaagggcagattcaccatcagccaggacaacgccaagaacaccgtgtacctccagatgaacagcctgaagcctgaggacaccgccatgtactactgtgccggcaagaccacctatcctggctacggatgtggcctgggcagaagcgcctacaattattggggccagggcacccaagtgaccgtgtcatctggatccggcggcggaggatctggcggaggcggatctgggggcggaggctctttcgaacaggttcagctgcaagagtctggccccggactggtcaagcctagccaaacactgagcctgacctgtaccgtgtccggctacagcatcaccagcgactacacctggaactggatcagacagcctcctggcaacggactggaatggatcggctacatcacctacagcggcagcaccagctacaaccccagcctgaaaagccgggtgctgatctccgtggacaccagcaagaatcaggtgtccctgaagctgagcagcgtgacagccgctgataccgccgtgtactactgtgccagactggggagaagatacacaatggactactggggccagggcaccaccgtgacagtttcttctacgcgtatccagaaccctgatcctgccgtgtaccagctgcgggatagcaagagcagcgacaagagcgtgtgtctgttcaccgacttcgacagccagaccaacgtgtcccagagcaaggactccgacgtgtacatcaccgataagtgcgtgctggacatgcggagcatggacttcaagagcaactccgccgtggcctggtccaacaagtccgatttcgcctgcgccaacgccttcaacaacagcattatccccgaggacacattcttcccaagccccgagagcagctgcgacgtgaagctggtggaaaagagcttcgagacagacaccaacctgaacttccagaacctgagcgtgatcggcttcagaatcctgctgctgaaagtggccggctttaacctgctgatgaccctgcggctgtggtccagctaa

SEQ ID NO: 38716 - DNA, 1854 bp, synthetic construct
  source 1..1854: mol_type = other DNA
atggccttaccagtgaccgccttgctcctgccgctggccttgctgctccacgccgccaggccggacgtggtcatgacacagagcccttctagcctgtctgccagcgtgggcgacagagtgaccatcacctgtatggcctccgaggacatctacatccggctggcctggtatcagcagaagcctggaaacgcccctaagctgctgatctacgccgccacctctctggaaacaggcgtgccaagcagattttccggcagcggctctggcaccgatttcaccctgacaatatccagcctccagcctgaggacttcgccacctactactgccagcagtattggagcagcccctggacatttggcggaggcaccaaggtggaaatcaaactcgaggacctgaagcacgtgttcccacctgaggtggccgtgttcgagcctagcgacgccgagatctggcacacccagaaagccaccctcgtgtgcctggctaccggcttctaccccgaccatgtggaactgtcttggtgggtcaacggcaaagaggtgcacagcggcgtgtctaccgacccccagccactgaaagaacagcccgccctgaacgacagccggtactgcctgagcagcagactgagagtgtccgccaccttctggcagaacccccggaaccacttcagatgccaggtgcagttctacggcctgagcgagaacgacgagtggacccaggacagagccaagcccgtgacccagatcgtgtctgccgaagcctggggcagagccgattgcggctttaccagcgagagctaccagcagggcgtgctgagcgccaccatcctgtacgagatcctgctgggcaaggccaccctgtacgccgtgctggtgtctgccctggtgctgatggctatggtcaagcggaaggacagccggggaagggccaagcgatctggatctggagcaacaaacttctcactactcaaacaagcaggtgacgtggaggagaatcccgggcctactagtatggactggatttggcgcatccttttccttgtcggcgctgctaccggcgcgcattccttcgaacaggttcagctgcaagagtctggccccggactggtcaagcctagccaaacactgagcctgacctgtaccgtgtccggctacagcatcaccagcgactacacctggaactggatcagacagcctcctggcaacggactggaatggatcggctacatcacctacagcggcagcaccagctacaaccccagcctgaaaagccgggtgctgatctccgtggacaccagcaagaatcaggtgtccctgaagctgagcagcgtgacagccgctgataccgccgtgtactactgtgccagactggggagaagatacacaatggactactggggccagggcaccaccgtgacagtttcttctacgcgtatccagaaccctgatcctgccgtgtaccagctgcgggatagcaagagcagcgacaagagcgtgtgtctgttcaccgacttcgacagccagaccaacgtgtcccagagcaaggactccgacgtgtacatcaccgataagaccgtgctggacatgcggagcatggacttcaagagcaactccgccgtggcctggtccagcaagtccgatttcgcctgcgccaacgccttcaacaacagcattatccccgaggacacattcttcccaagccccgagatggcctgcgacgtgaagctggtggaaaagagcttcgagacagacaccaacctgaacttccagaacctgctcgtgatctggctgagaatcctgctgctgaaagtggccggctttaacctgctgatgaccctgcggctgtggtccagc

SEQ ID NO: 38717 - DNA, 1854 bp, synthetic construct
  source 1..1854: mol_type = other DNA
atggccttaccagtgaccgccttgctcctgccgctggccttgctgctccacgccgccaggccggacgtggtcatgacacagagcccttctagcctgtctgccagcgtgggcgacagagtgaccatcacctgtatggcctccgaggacatctacatccggctggcctggtatcagcagaagcctggaaacgcccctaagctgctgatctacgccgccacctctctggaaacaggcgtgccaagcagattttccggcagcggctctggcaccgatttcaccctgacaatatccagcctccagcctgaggacttcgccacctactactgccagcagtattggagcagcccctggacatttggcggaggcaccaaggtggaaatcaaactcgaggacctgaagcacgtgttcccacctgaggtggccgtgttcgagcctagcgacgccgagatctggcacacccagaaagccaccctcgtgtgcctggctaccggcttctaccccgaccatgtggaactgtcttggtgggtcaacggcaaagaggtgcacagcggcgtgtctaccgacccccagccactgaaagaacagcccgccctgaacgacagccggtactgcctgagcagcagactgagagtgtccgccaccttctggcagaacccccggaaccacttcagatgccaggtgcagttctacggcctgagcgagaacgacgagtggacccaggacagagccaagcccgtgacccagatcgtgtctgccgaagcctggggcagagccgattgcggctttaccagcgagagctaccagcagggcgtgctgagcgccaccatcctgtacgagatcctgctgggcaaggccaccctgtacgccgtgctggtgtctgccctggtgctgatggctatggtcaagcggaaggacagccggggaagggccaagcgatctggatctggagcaacaaacttctcactactcaaacaagcaggtgacgtggaggagaatcccgggcctactagtatggactggatttggcgcatccttttccttgtcggcgctgctaccggcgcgcattccttcgaacaggttcagctgcaagagtctggccccggactggtcaagcctagccaaacactgagcctgacctgtaccgtgtccggctacagcatcaccagcgactacacctggaactggatcagacagcctcctggcaacggactggaatggatcggctacatcacctacagcggcagcaccagctacaaccccagcctgaaaagccgggtgctgatctccgtggacaccagcaagaatcaggtgtccctgaagctgagcagcgtgacagccgctgataccgccgtgtactactgtgccagactggggagaagatacacaatggactactggggccagggcaccaccgtgacagtttcttctacgcgtatccagaaccctgatcctgccgtgtaccagctgcgggatagcaagagcagcgacaagagcgtgtgtctgttcaccgacttcgacagccagaccaacgtgtcccagagcaaggactccgacgtgtacatcaccgataagaccgtgctggacatgcggagcatggacttcaagagcaactccgccgtggcctggtccaccaagtccgatttcgcctgcgccaacgccttcaacaacagcattatccccgaggacacattcttcccaagccccgaggtggtgtgcgacgtgaagctggtggaaaagagcttcgagacagacaccaacctgaacttccagaacctggtggtgatcggcgccagaatcctgctgctgaaagtggccggctttaacctgctgatgaccctgcggctgtggtccagc

SEQ ID NO: 38718 - DNA, 1854 bp, synthetic construct
  source 1..1854: mol_type = other DNA
atggccttaccagtgaccgccttgctcctgccgctggccttgctgctccacgccgccaggccggacgtggtcatgacacagagcccttctagcctgtctgccagcgtgggcgacagagtgaccatcacctgtatggcctccgaggacatctacatccggctggcctggtatcagcagaagcctggaaacgcccctaagctgctgatctacgccgccacctctctggaaacaggcgtgccaagcagattttccggcagcggctctggcaccgatttcaccctgacaatatccagcctccagcctgaggacttcgccacctactactgccagcagtattggagcagcccctggacatttggcggaggcaccaaggtggaaatcaaactcgaggacctgaagaacgtgttcccacctgaggtggccgtgttcgagcctagcaaggccgagatcagcagaacccagaaagccaccctcgtgtgcctggctaccggcttctaccctcctcatgtggaactgtcttggtgggtcaacggcaaagaggtgcacgacggcgtgtgtaccgacccccagccactgaaagaacagcccgccctgaacgacagccggtactgcctgagcagcagactgagagtgtccgccaccttctggcagaacccccggaaccacttcagatgccaggtgcagttctacggcctgagcgagaacgacgagtggacccaggacagagccaagcccgtgacccagatcgtgtctgccgaagcctggggcagagccgattgcggctttaccagcgagagctaccagcagggcgtgctgagcgccaccatcctgtacgagatcctgctgggcaaggccaccctgtacgccgtgctggtgtctgccctggtgctgatggctatggtcaagcggaaggacagccggggaagggccaagcgatctggatctggagcaacaaacttctcactactcaaacaagcaggtgacgtggaggagaatcccgggcctactagtatggactggatttggcgcatccttttccttgtcggcgctgctaccggcgcgcattccttcgaacaggttcagctgcaagagtctggccccggactggtcaagcctagccaaacactgagcctgacctgtaccgtgtccggctacagcatcaccagcgactacacctggaactggatcagacagcctcctggcaacggactggaatggatcggctacatcacctacagcggcagcaccagctacaaccccagcctgaaaagccgggtgctgatctccgtggacaccagcaagaatcaggtgtccctgaagctgagcagcgtgacagccgctgataccgccgtgtactactgtgccagactggggagaagatacacaatggactactggggccagggcaccaccgtgacagtttcttctacgcgtatccagaaccctgatcctgccgtgtaccagctgcgggatagcaagagcagcgacaagttcgtgtgtctgttcaccgacttcgacagccagatcaacgtgtcccagagcaaggactccgacgtgtacatcaccgataagtgcgtgctggacatgcggagcatggacttcaagagcaactccgccgtggcctggtccaacaagtccgatttcacctgcgccaacgccttcaacaacagcattatccccgaggacacattcttcccaagccccgagagcagctgcgacgtgaagctggtggaaaagagcttcgagacagacaccaacctgaacttccagaacctgagcgtgatcggcttcagaatcctgctgctgaaagtggccggctttaacctgctgatgaccctgcggctgtggtccagc

SEQ ID NO: 38719 - DNA, 2280 bp, synthetic construct
  source 1..2280: mol_type = other DNA
atggccttaccagtgaccgccttgctcctgccgctggccttgctgctccacgccgccaggccggacgtggtcatgacacagagcccttctagcctgtctgccagcgtgggcgacagagtgaccatcacctgtatggcctccgaggacatctacatccggctggcctggtatcagcagaagcctggaaacgcccctaagctgctgatctacgccgccacctctctggaaacaggcgtgccaagcagattttccggcagcggctctggcaccgatttcaccctgacaatatccagcctccagcctgaggacttcgccacctactactgccagcagtattggagcagcccctggacatttggcggaggcaccaaggtggaaatcaaactcgaggacctgaagaacgtgttcccacctgaggtggccgtgttcgagcctagcgaggccgagatcagccacacccagaaagccaccctcgtgtgcctggctaccggcttctaccccgaccatgtggaactgtcttggtgggtcaacggcaaagaggtgcacagcggcgtgtgtaccgacccccagccactgaaagaacagcccgccctgaacgacagccggtactgcctgagcagcagactgagagtgtccgccaccttctggcagaacccccggaaccacttcagatgccaggtgcagttctacggcctgagcgagaacgacgagtggacccaggacagagccaagcccgtgacccagatcgtgtctgccgaagcctggggcagagccgattgcggctttaccagcgagagctaccagcagggcgtgctgagcgccaccatcctgtacgagatcctgctgggcaaggccaccctgtacgccgtgctggtgtctgccctggtgctgatggctatggtcaagcggaaggacagccggggaagggccaagcgatctggatctggagcaacaaacttctcactactcaaacaagcaggtgacgtggaggagaatcccgggcctactagtaccatggactggatttggcgcatccttttccttgtcggcgctgctaccggcgcccattccgggccccaggtgcagctccaagaaagcggacccggactggttaagccctctcagaccctgtctctgacctgcacagttagcggagccagcattaccacaggcgagtattattggaattggtttcggcagccaccaggcaaggggcttgagtggatgggtgctattgctgcctctggcagcaccacctactctcccagctttgagagcagaacctccatcagccgggacacctccaaaaaccagttctctctgaagctgtcctccgtgaccgctgctgacaccgccgtctattattgtggccggtctttcggcgtggcagctgtgaccacaggacagaacagaggccagggaacacttgtgaccgtgtcctctggatccggcggcggaggatctggcggaggcggatctgggggcggaggctctttcgaacaggttcagctgcaagagtctggccccggactggtcaagcctagccaaacactgagcctgacctgtaccgtgtccggctacagcatcaccagcgactacacctggaactggatcagacagcctcctggcaacggactggaatggatcggctacatcacctacagcggcagcaccagctacaaccccagcctgaaaagccgggtgctgatctccgtggacaccagcaagaatcaggtgtccctgaagctgagcagcgtgacagccgctgataccgccgtgtactactgtgccagactggggagaagatacacaatggactactggggccagggcaccaccgtgacagtttcttctacgcgtatccagaaccctgatcctgccgtgtaccagctgcgggatagcaagagcagcgacaagagcgtgtgtctgttcaccgacttcgacagccagaccaacgtgtcccagagcaaggactccgacgtgtacatcaccgataagtgcgtgctggacatgcggagcatggacttcaagagcaactccgccgtggcctggtccaacaagtccgatttcgcctgcgccaacgccttcaacaacagcattatccccgaggacacattcttcccaagccccgagagcagctgcgacgtgaagctggtggaaaagagcttcgagacagacaccaacctgaacttccagaacctgagcgtgatcggcttcagaatcctgctgctgaaagtggccggctttaacctgctgatgaccctgcggctgtggtccagc

SEQ ID NO: 38720 - DNA, 2703 bp, synthetic construct
  source 1..2703: mol_type = other DNA
atggccttaccagtgaccgccttgctcctgccgctggccttgctgctccacgccgccaggccgcaggttcagctgcaagagtctggccctggcctggtcaagcctagccaaacactgagcctgacctgtaccgtgtctggcggctctatcaccaccggcgagttctactggaactggttcagacagcctcctggcaaaggactggaatggatgggagccattgccgccagcggcagcacaacatacagccctagcttcgagagccggaccagcatcagcagagacaccagcaagaatcagttcagcctgaagctgagcagcgtgacagccgccgatacagccgtgtattactgcggcagatcctttggagtggccgccgtgacaaccggccagaatagaggacagggcaccctggtcacagtgtctagcggtaccggcggaggcggatctggcggcggaggtagcggtggcggaggatctgaattcgacgtggtcatgacacagagcccttctagcctgtctgccagcgtgggcgacagagtgaccatcacctgtatggcctccgaggacatctacatccggctggcctggtatcagcagaagcctggaaacgcccctaagctgctgatctacgccgccacctctctggaaacaggcgtgccaagcagattttccggcagcggctctggcaccgatttcaccctgacaatatccagcctccagcctgaggacttcgccacctactactgccagcagtattggagcagcccctggacatttggcggaggcaccaaggtggaaatcaaactcgagatccagaaccctgatcctgccgtgtaccagctgcgggatagcaagagcagcgacaagagcgtgtgtctgttcaccgacttcgacagccagaccaacgtgtcccagagcaaggactccgacgtgtacatcaccgataagtgcgtgctggacatgcggagcatggacttcaagagcaactccgccgtggcctggtccaacaagtccgatttcgcctgcgccaacgccttcaacaacagcattatccccgaggacacattcttcccaagcagcgacgtgccctgcgacgtgaagctggtggaaaagagcttcgagacagacaccaacctgaacttccagaacctgagcgtgatcggcttcagaatcctgctgctgaaagtggccggctttaacctgctgatgaccctgcggctgtggtccagccgcgccaagagaagcggatctggcgtgaagcagaccctgaatttcgacctgctgaagctggctggcgacgtggaatccaacccaggccctactagtaccatggactggatttggcgcatccttttccttgtcggcgctgctaccggcgcccattccgggcccgaagtgcaactggttgaatccggtggcggcctggtgcaacccggcggatctctcagacttagctgtgccgcctccggcagaaccttcacaatgggatggtacaggcaggctccagggaaagagagagagttcgtcgccgccatctctctgtctcccacactggcctactacgccgactctgtgaaaggccggttcaccatctccagagataatagcaagaacaccgtggtgctgcaaatgaactctctgagagccgaggatacagccctgtactattgtgccgctgaccggaagtccgtgatgagcatcagacccgattactggggacagggcacactggtcacagtgtctagtggatccggcggcggaggatctggcggaggcggatctgggggcggaggctctttcgaacaggttcagctgcaagagtctggccccggactggtcaagcctagccaaacactgagcctgacctgtaccgtgtccggctacagcatcaccagcgactacacctggaactggatcagacagcctcctggcaacggactggaatggatcggctacatcacctacagcggcagcaccagctacaaccccagcctgaaaagccgggtgctgatctccgtggacaccagcaagaatcaggtgtccctgaagctgagcagcgtgacagccgctgataccgccgtgtactactgtgccagactggggagaagatacacaatggactactggggccagggcaccaccgtgacagtttcttctacgcgtgaggacctgaagaacgtgttcccacctgaggtggccgtgttcgagcctagcaaggccgagatcgcccacacccagaaagccaccctcgtgtgcctggctaccggcttctaccccgaccatgtggaactgtcttggtgggtcaacggcaaagaggtgcacagcggcgtgtgtaccgacccccagccactgaaagaacagcccgccctgaacgacagccggtactgcctgagcagcagactgagagtgtccgccaccttctggcagaacccccggaaccacttcagatgccaggtgcagttctacggcctgagcgagaacgacgagtggacccaggacagagccaagcccgtgacccagatcgtgtctgccgaagcctggggcagagccgattgcggcatcaccagcgccagctaccaccagggcgtgctgagcgccaccatcctgtacgagatcctgctgggcaaggccaccctgtacgccgtgctggtgtctgccctggtgctgatggctatggtcaagcggaaggacagccgggga

SEQ ID NO: 38721 - DNA, 2292 bp, synthetic construct
  source 1..2292: mol_type = other DNA
atggccttaccagtgaccgccttgctcctgccgctggccttgctgctccacgccgccaggccgcaggttcagctgcaagagtctggccctggcctggtcaagcctagccaaacactgagcctgacctgtaccgtgtctggcggctctatcaccaccggcgagttctactggaactggttcagacagcctcctggcaaaggactggaatggatgggagccattgccgccagcggcagcacaacatacagccctagcttcgagagccggaccagcatcagcagagacaccagcaagaatcagttcagcctgaagctgagcagcgtgacagccgccgatacagccgtgtattactgcggcagatcctttggagtggccgccgtgacaaccggccagaatagaggacagggcaccctggtcacagtgtctagcggtaccggcggaggcggatctggcggcggaggtagcggtggcggaggatctgaattcgacgtggtcatgacacagagcccttctagcctgtctgccagcgtgggcgacagagtgaccatcacctgtatggcctccgaggacatctacatccggctggcctggtatcagcagaagcctggaaacgcccctaagctgctgatctacgccgccacctctctggaaacaggcgtgccaagcagattttccggcagcggctctggcaccgatttcaccctgacaatatccagcctccagcctgaggacttcgccacctactactgccagcagtattggagcagcccctggacatttggcggaggcaccaaggtggaaatcaaactcgagatccagaaccctgatcctgccgtgtaccagctgcgggatagcaagagcagcgacaagagcgtgtgtctgttcaccgacttcgacagccagaccaacgtgtcccagagcaaggactccgacgtgtacatcaccgataagtgcgtgctggacatgcggagcatggacttcaagagcaactccgccgtggcctggtccaacaagtccgatttcgcctgcgccaacgccttcaacaacagcattatccccgaggacacattcttcccaagcagcgacgtgccctgcgacgtgaagctggtggaaaagagcttcgagacagacaccaacctgaacttccagaacctgagcgtgatcggcttcagaatcctgctgctgaaagtggccggctttaacctgctgatgaccctgcggctgtggtccagccgcgccaagagaagcggatctggcgtgaagcagaccctgaatttcgacctgctgaagctggctggcgacgtggaatccaacccaggccctactagtaccatggactggatttggcgcatccttttccttgtcggcgctgctaccggcgcccattccttcgaacaggttcagctgcaagagtctggccccggactggtcaagcctagccaaacactgagcctgacctgtaccgtgtccggctacagcatcaccagcgactacacctggaactggatcagacagcctcctggcaacggactggaatggatcggctacatcacctacagcggcagcaccagctacaaccccagcctgaaaagccgggtgctgatctccgtggacaccagcaagaatcaggtgtccctgaagctgagcagcgtgacagccgctgataccgccgtgtactactgtgccagactggggagaagatacacaatggactactggggccagggcaccaccgtgacagtttcttctacgcgtgaggacctgaagaacgtgttcccacctgaggtggccgtgttcgagcctagcaaggccgagatcgcccacacccagaaagccaccctcgtgtgcctggctaccggcttctaccccgaccatgtggaactgtcttggtgggtcaacggcaaagaggtgcacagcggcgtgtgtaccgacccccagccactgaaagaacagcccgccctgaacgacagccggtactgcctgagcagcagactgagagtgtccgccaccttctggcagaacccccggaaccacttcagatgccaggtgcagttctacggcctgagcgagaacgacgagtggacccaggacagagccaagcccgtgacccagatcgtgtctgccgaagcctggggcagagccgattgcggcatcaccagcgccagctaccaccagggcgtgctgagcgccaccatcctgtacgagatcctgctgggcaaggccaccctgtacgccgtgctggtgtctgccctggtgctgatggctatggtcaagcggaaggacagccgggga

SEQ ID NO: 38722 - DNA, 2691 bp, synthetic construct
  source 1..2691: mol_type = other DNA
atggccttaccagtgaccgccttgctcctgccgctggccttgctgctccacgccgccaggccggaagtgcagctggttgaatctggcggaggactggttcaggctggcggatctctgagactgtcttgtgccgccagcggcagaacctttagcatgggctggtttagacaggcccctggcaaagagagagagttcgtcgccgccatcacatactctggcggcagcccttactacgccgactctgtgaagggcagattcaccatcagccgggacaacgccaagaacaccgtgtacctccagatgaacagcctgaagcctgaggacaccgccgtgtactactgcgccgccaatccaacatacggcagcgactggaacgccgagaattggggccagggaacccaagtgacagtgtctagcggtaccggcggaggcggatctggcggcggaggtagcggtggcggaggatctgaattcgacgtggtcatgacacagagcccttctagcctgtctgccagcgtgggcgacagagtgaccatcacctgtatggcctccgaggacatctacatccggctggcctggtatcagcagaagcctggaaacgcccctaagctgctgatctacgccgccacctctctggaaacaggcgtgccaagcagattttccggcagcggctctggcaccgatttcaccctgacaatatccagcctccagcctgaggacttcgccacctactactgccagcagtattggagcagcccctggacatttggcggaggcaccaaggtggaaatcaaactcgaggacctgaagaacgtgttcccacctgaggtggccgtgttcgagcctagcgaggccgagatcagccacacccagaaagccaccctcgtgtgcctggctaccggcttctaccccgaccatgtggaactgtcttggtgggtcaacggcaaagaggtgcacagcggcgtgtgtaccgacccccagccactgaaagaacagcccgccctgaacgacagccggtactgcctgagcagcagactgagagtgtccgccaccttctggcagaacccccggaaccacttcagatgccaggtgcagttctacggcctgagcgagaacgacgagtggacccaggacagagccaagcccgtgacccagatcgtgtctgccgaagcctggggcagagccgattgcggctttaccagcgagagctaccagcagggcgtgctgagcgccaccatcctgtacgagatcctgctgggcaaggccaccctgtacgccgtgctggtgtctgccctggtgctgatggctatggtcaagcggaaggacagccggggaagggccaagcgatctggatctggagcaacaaacttctcactactcaaacaagcaggtgacgtggaggagaatcccgggcctactagtaccatggactggatttggcgcatccttttccttgtcggcgctgctaccggcgcccattccgggccccaggtgcagctccaagaaagcggacccggactggttaagccctctcagaccctgtctctgacctgcacagttagcggagccagcattaccacaggcgagtattattggaattggtttcggcagccaccaggcaaggggcttgagtggatgggtgctattgctgcctctggcagcaccacctactctcccagctttgagagcagaacctccatcagccgggacacctccaaaaaccagttctctctgaagctgtcctccgtgaccgctgctgacaccgccgtctattattgtggccggtctttcggcgtggcagctgtgaccacaggacagaacagaggccagggaacacttgtgaccgtgtcctctggatccggcggcggaggatctggcggaggcggatctgggggcggaggctctttcgaacaggttcagctgcaagagtctggccccggactggtcaagcctagccaaacactgagcctgacctgtaccgtgtccggctacagcatcaccagcgactacacctggaactggatcagacagcctcctggcaacggactggaatggatcggctacatcacctacagcggcagcaccagctacaaccccagcctgaaaagccgggtgctgatctccgtggacaccagcaagaatcaggtgtccctgaagctgagcagcgtgacagccgctgataccgccgtgtactactgtgccagactggggagaagatacacaatggactactggggccagggcaccaccgtgacagtttcttctacgcgtatccagaaccctgatcctgccgtgtaccagctgcgggatagcaagagcagcgacaagagcgtgtgtctgttcaccgacttcgacagccagaccaacgtgtcccagagcaaggactccgacgtgtacatcaccgataagtgcgtgctggacatgcggagcatggacttcaagagcaactccgccgtggcctggtccaacaagtccgatttcgcctgcgccaacgccttcaacaacagcattatccccgaggacacattcttcccaagccccgagagcagctgcgacgtgaagctggtggaaaagagcttcgagacagacaccaacctgaacttccagaacctgagcgtgatcggcttcagaatcctgctgctgaaagtggccggctttaacctgctgatgaccctgcggctgtggtccagc

SEQ ID NO: 38723 - DNA, 2712 bp, synthetic construct
  source 1..2712: mol_type = other DNA
atggccttaccagtgaccgccttgctcctgccgctggccttgctgctccacgccgccaggccggaagtgcagctggttgaatctggcggaggactggttcaggctggcggatctctgagactgtcttgtgccgccagcggcagaacctttagcatgggctggtttagacaggcccctggcaaagagagagagttcgtcgccgccatcacatactctggcggcagcccttactacgccgactctgtgaagggcagattcaccatcagccgggacaacgccaagaacaccgtgtacctccagatgaacagcctgaagcctgaggacaccgccgtgtactactgcgccgccaatccaacatacggcagcgactggaacgccgagaattggggccagggaacccaagtgacagtgtctagcggtaccggcggaggcggatctggcggcggaggtagcggtggcggaggatctgaattcgacgtggtcatgacacagagcccttctagcctgtctgccagcgtgggcgacagagtgaccatcacctgtatggcctccgaggacatctacatccggctggcctggtatcagcagaagcctggaaacgcccctaagctgctgatctacgccgccacctctctggaaacaggcgtgccaagcagattttccggcagcggctctggcaccgatttcaccctgacaatatccagcctccagcctgaggacttcgccacctactactgccagcagtattggagcagcccctggacatttggcggaggcaccaaggtggaaatcaaactcgagatccagaaccctgatcctgccgtgtaccagctgcgggatagcaagagcagcgacaagagcgtgtgtctgttcaccgacttcgacagccagaccaacgtgtcccagagcaaggactccgacgtgtacatcaccgataagtgcgtgctggacatgcggagcatggacttcaagagcaactccgccgtggcctggtccaacaagtccgatttcgcctgcgccaacgccttcaacaacagcattatccccgaggacacattcttcccaagcagcgacgtgccctgcgacgtgaagctggtggaaaagagcttcgagacagacaccaacctgaacttccagaacctgagcgtgatcggcttcagaatcctgctgctgaaagtggccggctttaacctgctgatgaccctgcggctgtggtccagccgcgccaagagaagcggatctggcgtgaagcagaccctgaatttcgacctgctgaagctggctggcgacgtggaatccaacccaggccctactagtaccatggactggatttggcgcatccttttccttgtcggcgctgctaccggcgcccattccgggccccaggtgcagctggttgaatctggcggaggactggttcagcctggcggatctctgagactgtcttgtgccgccagcggcaacatcaacagcagaaactgcatgggctggttcagacaggcccctggcaagggaagagaaggcgtggcagctatcggccaagtgaccggcagaacctactacgtggacagcgtgaagggcagattcaccatcagcctggacaacagcaagaacaccctgtacctccagatgaacagcctgagagccgaggacaccgccgtgtactattgtgctgctgcccctggctgtctgctgtctgcacttagaagcgccgactacagaaactggggccagggcacactggtcaccgtttcttctggatccggcggcggaggatctggcggaggcggatctgggggcggaggctctttcgaacaggttcagctgcaagagtctggccccggactggtcaagcctagccaaacactgagcctgacctgtaccgtgtccggctacagcatcaccagcgactacacctggaactggatcagacagcctcctggcaacggactggaatggatcggctacatcacctacagcggcagcaccagctacaaccccagcctgaaaagccgggtgctgatctccgtggacaccagcaagaatcaggtgtccctgaagctgagcagcgtgacagccgctgataccgccgtgtactactgtgccagactggggagaagatacacaatggactactggggccagggcaccaccgtgacagtttcttctacgcgtgaggacctgaagaacgtgttcccacctgaggtggccgtgttcgagcctagcaaggccgagatcgcccacacccagaaagccaccctcgtgtgcctggctaccggcttctaccccgaccatgtggaactgtcttggtgggtcaacggcaaagaggtgcacagcggcgtgtgtaccgacccccagccactgaaagaacagcccgccctgaacgacagccggtactgcctgagcagcagactgagagtgtccgccaccttctggcagaacccccggaaccacttcagatgccaggtgcagttctacggcctgagcgagaacgacgagtggacccaggacagagccaagcccgtgacccagatcgtgtctgccgaagcctggggcagagccgattgcggcatcaccagcgccagctaccaccagggcgtgctgagcgccaccatcctgtacgagatcctgctgggcaaggccaccctgtacgccgtgctggtgtctgccctggtgctgatggctatggtcaagcggaaggacagccgggga

SEQ ID NO: 38724 - DNA, 2700 bp, synthetic construct
  source 1..2700: mol_type = other DNA
atggccttaccagtgaccgccttgctcctgccgctggccttgctgctccacgccgccaggccggaagtgcagctggttgaatctggcggaggactggttcaggctggcggatctctgagactgtcttgtgccgccagcggcagaacctttagcatgggctggtttagacaggcccctggcaaagagagagagttcgtcgccgccatcacatactctggcggcagcccttactacgccgactctgtgaagggcagattcaccatcagccgggacaacgccaagaacaccgtgtacctccagatgaacagcctgaagcctgaggacaccgccgtgtactactgcgccgccaatccaacatacggcagcgactggaacgccgagaattggggccagggaacccaagtgacagtgtctagcggtaccggcggaggcggatctggcggcggaggtagcggtggcggaggatctgaattcgacgtggtcatgacacagagcccttctagcctgtctgccagcgtgggcgacagagtgaccatcacctgtatggcctccgaggacatctacatccggctggcctggtatcagcagaagcctggaaacgcccctaagctgctgatctacgccgccacctctctggaaacaggcgtgccaagcagattttccggcagcggctctggcaccgatttcaccctgacaatatccagcctccagcctgaggacttcgccacctactactgccagcagtattggagcagcccctggacatttggcggaggcaccaaggtggaaatcaaactcgaggacctgaagaacgtgttcccacctgaggtggccgtgttcgagcctagcgaggccgagatcagccacacccagaaagccaccctcgtgtgcctggctaccggcttctaccccgaccatgtggaactgtcttggtgggtcaacggcaaagaggtgcacagcggcgtgtgtaccgacccccagccactgaaagaacagcccgccctgaacgacagccggtactgcctgagcagcagactgagagtgtccgccaccttctggcagaacccccggaaccacttcagatgccaggtgcagttctacggcctgagcgagaacgacgagtggacccaggacagagccaagcccgtgacccagatcgtgtctgccgaagcctggggcagagccgattgcggctttaccagcgagagctaccagcagggcgtgctgagcgccaccatcctgtacgagatcctgctgggcaaggccaccctgtacgccgtgctggtgtctgccctggtgctgatggctatggtcaagcggaaggacagccggggaagggccaagcgatctggatctggagcaacaaacttctcactactcaaacaagcaggtgacgtggaggagaatcccgggcctactagtaccatggactggatttggcgcatccttttccttgtcggcgctgctaccggcgcccattccgggccccaggtgcagctggttgaatctggcggaggactggttcagcctggcggatctctgagactgtcttgtgccgccagcggcaacatcaacagcagaaactgcatgggctggttcagacaggcccctggcaagggaagagaaggcgtggcagctatcggccaagtgaccggcagaacctactacgtggacagcgtgaagggcagattcaccatcagcctggacaacagcaagaacaccctgtacctccagatgaacagcctgagagccgaggacaccgccgtgtactattgtgctgctgcccctggctgtctgctgtctgcacttagaagcgccgactacagaaactggggccagggcacactggtcaccgtttcttctggatccggcggcggaggatctggcggaggcggatctgggggcggaggctctttcgaacaggttcagctgcaagagtctggccccggactggtcaagcctagccaaacactgagcctgacctgtaccgtgtccggctacagcatcaccagcgactacacctggaactggatcagacagcctcctggcaacggactggaatggatcggctacatcacctacagcggcagcaccagctacaaccccagcctgaaaagccgggtgctgatctccgtggacaccagcaagaatcaggtgtccctgaagctgagcagcgtgacagccgctgataccgccgtgtactactgtgccagactggggagaagatacacaatggactactggggccagggcaccaccgtgacagtttcttctacgcgtatccagaaccctgatcctgccgtgtaccagctgcgggatagcaagagcagcgacaagagcgtgtgtctgttcaccgacttcgacagccagaccaacgtgtcccagagcaaggactccgacgtgtacatcaccgataagtgcgtgctggacatgcggagcatggacttcaagagcaactccgccgtggcctggtccaacaagtccgatttcgcctgcgccaacgccttcaacaacagcattatccccgaggacacattcttcccaagccccgagagcagctgcgacgtgaagctggtggaaaagagcttcgagacagacaccaacctgaacttccagaacctgagcgtgatcggcttcagaatcctgctgctgaaagtggccggctttaacctgctgatgaccctgcggctgtggtccagc

SEQ ID NO: 38725 - DNA, 2700 bp, synthetic construct
  source 1..2700: mol_type = other DNA
atggccttaccagtgaccgccttgctcctgccgctggccttgctgctccacgccgccaggccggaagtgcaactggttgaatccggtggcggcctggtgcaagcaggcggatctctcagacttagctgtgccgcctccggcagaaccttcacaatgggatggtttaggcaggctccagggaaagagagagagttcgtcgccgccatctctctgtctcccacactggcctactacgccgactctgtgaaaggccggttcaccatctccagagataatgccaagaacaccgtggtgctgcaaatgaactctctgaaacccgaggatacagccctgtactattgtgccgctgaccggaagtccgtgatgagcatcagacccgattactggggacagggcacacaagtcacagtgtcctctggtaccggcggaggcggatctggcggcggaggtagcggtggcggaggatctgaattcgacgtggtcatgacacagagcccttctagcctgtctgccagcgtgggcgacagagtgaccatcacctgtatggcctccgaggacatctacatccggctggcctggtatcagcagaagcctggaaacgcccctaagctgctgatctacgccgccacctctctggaaacaggcgtgccaagcagattttccggcagcggctctggcaccgatttcaccctgacaatatccagcctccagcctgaggacttcgccacctactactgccagcagtattggagcagcccctggacatttggcggaggcaccaaggtggaaatcaaactcgaggacctgaagaacgtgttcccacctgaggtggccgtgttcgagcctagcgaggccgagatcagccacacccagaaagccaccctcgtgtgcctggctaccggcttctaccccgaccatgtggaactgtcttggtgggtcaacggcaaagaggtgcacagcggcgtgtgtaccgacccccagccactgaaagaacagcccgccctgaacgacagccggtactgcctgagcagcagactgagagtgtccgccaccttctggcagaacccccggaaccacttcagatgccaggtgcagttctacggcctgagcgagaacgacgagtggacccaggacagagccaagcccgtgacccagatcgtgtctgccgaagcctggggcagagccgattgcggctttaccagcgagagctaccagcagggcgtgctgagcgccaccatcctgtacgagatcctgctgggcaaggccaccctgtacgccgtgctggtgtctgccctggtgctgatggctatggtcaagcggaaggacagccggggaagggccaagcgatctggatctggagcaacaaacttctcactactcaaacaagcaggtgacgtggaggagaatcccgggcctactagtaccatggactggatttggcgcatccttttccttgtcggcgctgctaccggcgcccattccgggccccaggtgcagctggttgaatctggcggaggactggttcagcctggcggatctctgagactgtcttgtgccgccagcggcaacatcaacagcagaaactgcatgggctggttcagacaggcccctggcaagggaagagaaggcgtggcagctatcggccaagtgaccggcagaacctactacgtggacagcgtgaagggcagattcaccatcagcctggacaacagcaagaacaccctgtacctccagatgaacagcctgagagccgaggacaccgccgtgtactattgtgctgctgcccctggctgtctgctgtctgcacttagaagcgccgactacagaaactggggccagggcacactggtcaccgtttcttctggatccggcggcggaggatctggcggaggcggatctgggggcggaggctctttcgaacaggttcagctgcaagagtctggccccggactggtcaagcctagccaaacactgagcctgacctgtaccgtgtccggctacagcatcaccagcgactacacctggaactggatcagacagcctcctggcaacggactggaatggatcggctacatcacctacagcggcagcaccagctacaaccccagcctgaaaagccgggtgctgatctccgtggacaccagcaagaatcaggtgtccctgaagctgagcagcgtgacagccgctgataccgccgtgtactactgtgccagactggggagaagatacacaatggactactggggccagggcaccaccgtgacagtttcttctacgcgtatccagaaccctgatcctgccgtgtaccagctgcgggatagcaagagcagcgacaagagcgtgtgtctgttcaccgacttcgacagccagaccaacgtgtcccagagcaaggactccgacgtgtacatcaccgataagtgcgtgctggacatgcggagcatggacttcaagagcaactccgccgtggcctggtccaacaagtccgatttcgcctgcgccaacgccttcaacaacagcattatccccgaggacacattcttcccaagccccgagagcagctgcgacgtgaagctggtggaaaagagcttcgagacagacaccaacctgaacttccagaacctgagcgtgatcggcttcagaatcctgctgctgaaagtggccggctttaacctgctgatgaccctgcggctgtggtccagc

SEQ ID NO: 38726 - DNA, 2712 bp, synthetic construct
  source 1..2712: mol_type = other DNA
atggccttaccagtgaccgccttgctcctgccgctggccttgctgctccacgccgccaggccgcaggttcagctgcaagagtctggccctggcctggtcaagcctagccaaacactgagcctgacctgtaccgtgtctggcggctctatcaccaccggcgagttctactggaactggttcagacagcctcctggcaaaggactggaatggatgggagccattgccgccagcggcagcacaacatacagccctagcttcgagagccggaccagcatcagcagagacaccagcaagaatcagttcagcctgaagctgagcagcgtgacagccgccgatacagccgtgtattactgcggcagatcctttggagtggccgccgtgacaaccggccagaatagaggacagggcaccctggtcacagtgtctagcggtaccggcggaggcggatctggcggcggaggtagcggtggcggaggatctgaattcgacgtggtcatgacacagagcccttctagcctgtctgccagcgtgggcgacagagtgaccatcacctgtatggcctccgaggacatctacatccggctggcctggtatcagcagaagcctggaaacgcccctaagctgctgatctacgccgccacctctctggaaacaggcgtgccaagcagattttccggcagcggctctggcaccgatttcaccctgacaatatccagcctccagcctgaggacttcgccacctactactgccagcagtattggagcagcccctggacatttggcggaggcaccaaggtggaaatcaaactcgaggacctgaagaacgtgttcccacctgaggtggccgtgttcgagcctagcgaggccgagatcagccacacccagaaagccaccctcgtgtgcctggctaccggcttctaccccgaccatgtggaactgtcttggtgggtcaacggcaaagaggtgcacagcggcgtgtgtaccgacccccagccactgaaagaacagcccgccctgaacgacagccggtactgcctgagcagcagactgagagtgtccgccaccttctggcagaacccccggaaccacttcagatgccaggtgcagttctacggcctgagcgagaacgacgagtggacccaggacagagccaagcccgtgacccagatcgtgtctgccgaagcctggggcagagccgattgcggctttaccagcgagagctaccagcagggcgtgctgagcgccaccatcctgtacgagatcctgctgggcaaggccaccctgtacgccgtgctggtgtctgccctggtgctgatggctatggtcaagcggaaggacagccggggaagggccaagcgatctggatctggagcaacaaacttctcactactcaaacaagcaggtgacgtggaggagaatcccgggcctactagtaccatggactggatttggcgcatccttttccttgtcggcgctgctaccggcgcccattccgggccccaggtgcagctggttgaatctggcggaggactggttcagcctggcggatctctgagactgtcttgtgccgccagcggcaacatcaacagcagaaactgcatgggctggttcagacaggcccctggcaagggaagagaaggcgtggcagctatcggccaagtgaccggcagaacctactacgtggacagcgtgaagggcagattcaccatcagcctggacaacagcaagaacaccctgtacctccagatgaacagcctgagagccgaggacaccgccgtgtactattgtgctgctgcccctggctgtctgctgtctgcacttagaagcgccgactacagaaactggggccagggcacactggtcaccgtttcttctggatccggcggcggaggatctggcggaggcggatctgggggcggaggctctttcgaacaggttcagctgcaagagtctggccccggactggtcaagcctagccaaacactgagcctgacctgtaccgtgtccggctacagcatcaccagcgactacacctggaactggatcagacagcctcctggcaacggactggaatggatcggctacatcacctacagcggcagcaccagctacaaccccagcctgaaaagccgggtgctgatctccgtggacaccagcaagaatcaggtgtccctgaagctgagcagcgtgacagccgctgataccgccgtgtactactgtgccagactggggagaagatacacaatggactactggggccagggcaccaccgtgacagtttcttctacgcgtatccagaaccctgatcctgccgtgtaccagctgcgggatagcaagagcagcgacaagagcgtgtgtctgttcaccgacttcgacagccagaccaacgtgtcccagagcaaggactccgacgtgtacatcaccgataagtgcgtgctggacatgcggagcatggacttcaagagcaactccgccgtggcctggtccaacaagtccgatttcgcctgcgccaacgccttcaacaacagcattatccccgaggacacattcttcccaagccccgagagcagctgcgacgtgaagctggtggaaaagagcttcgagacagacaccaacctgaacttccagaacctgagcgtgatcggcttcagaatcctgctgctgaaagtggccggctttaacctgctgatgaccctgcggctgtggtccagc

SEQ ID NO: 38727 - DNA, 1446 bp, synthetic construct
  source 1..1446: mol_type = other DNA
atggccttaccagtgaccgccttgctcctgccgctggccttgctgctccacgccgccaggccggacatccagatgacacagagccctagcagcctgtctgccagcgtgggagacagagtgaccatcacatgcaaggccagcgacctgatccacaactggctggcctggtatcagcagaagcctggcaaggcccctaagctgctgatctacggcgctacctctctggaaacaggcgtgcccagcagattttctggcagcggctctggcaccgacttcaccctgacaatatccagcctccagcctgaggacttcgccacctactactgccagcagtactggaccacacctttcaccttcggccagggcaccaaggtggaaatcaaaagaggcggaggcggaagtggaggcggaggatctggcggcggaggctctgaagtgcagctggttgaatcaggtggcggcctggttcaacctggcggatctctgagactgagctgtgccgccagcggctacagcatcaccaatgactacgcctggaactgggtccgacaggcccctggaaaaggactggaatgggtcggatatatcagctactccggctacaccacctacaatcccagcatcaagagccggttcaccatcagcagagacaccagcaagaacaccctgtacctccagatgaactccctgagagccgaggacaccgccgtgtactattgtgccagatggaccagcggcctggactattggggacagggaacactggtcaccgtgtcctctacgcgtaaaattgaagttatgtatcctcctccttacctagacaatgagaagagcaatggaaccattatccatgtgaaagggaaacacctttgtccaagtcccctatttcccggaccttctaagcccttttgggtgctggtggtggttgggggagtcctggcttgctatagcttgctagtaacagtggcctttattattttctgggtgaggagtaagaggagcaggctcctgcacagtgactacatgaacatgactccacgccgccccggacccacccgcaagcattaccagccctatgccccaccacgcgacttcgcagcctatcgctccagagtgaagttcagcaggagcgcagacgcccccgcgtaccagcagggccagaaccagctctataacgagctcaatctaggacgaagagaggagtacgatgttttggacaagagacgtggccgggaccctgagatggggggaaagccgagaaggaagaaccctcaggaaggcctgtacaatgaactgcagaaagataagatggcggaggcctacagtgagattgggatgaaaggcgagcgccggaggggcaaggggcacgatggcctttaccagggtctcagtacagccaccaaggacacctacgacgcccttcacatgcaggccctgccccctcgc

SEQ ID NO: 38728 - DNA, 1464 bp, synthetic construct
  source 1..1464: mol_type = other DNA
atggccttaccagtgaccgccttgctcctgccgctggccttgctgctccacgccgccaggccggacatccagatgacacagagccctagcagcctgtctgccagcgtgggagacagagtgaccatcacatgcaaggccagcgacctgatccacaactggctggcctggtatcagcagaagcctggcaaggcccctaagctgctgatctacggcgctacctctctggaaacaggcgtgcccagcagattttctggcagcggctctggcaccgacttcaccctgacaatatccagcctccagcctgaggacttcgccacctactactgccagcagtactggaccacacctttcaccttcggccagggcaccaaggtggaaatcaaaagaggcggaggcggaagtggaggcggaggatctggcggcggaggctctgaagtgcagctggttgaatcaggtggcggcctggttcaacctggcggatctctgagactgagctgtgccgccagcggctacagcatcaccaatgactacgcctggaactgggtccgacaggcccctggaaaaggactggaatgggtcggatatatcagctactccggctacaccacctacaatcccagcatcaagagccggttcaccatcagcagagacaccagcaagaacaccctgtacctccagatgaactccctgagagccgaggacaccgccgtgtactattgtgccagatggaccagcggcctggactattggggacagggaacactggtcaccgtgtcctctacgcgtgcgaagcccaccacgacgccagcgccgcgaccaccaacaccggcgcccaccatcgcgtcgcagcccctgtccctgcgcccagaggcgtgccggccagcggcggggggcgcagtgcacacgagggggctggacttcgcctgtgacatctacatctgggcgcccttggccgggacttgtggggtccttctcctgtcactggttatcaccctttactgcaaacggggcagaaagaaactcctgtatatattcaaacaaccatttatgagaccagtacaaactactcaagaggaagatggctgtagctgccgatttccagaagaagaagaaggaggatgtgaactgagagtgaagttcagcaggagcgcagacgcccccgcgtaccagcagggccagaaccagctctataacgagctgaatctaggacgaagagaggagtacgatgttttggacaagagacgtggccgggaccctgagatggggggaaagccgagaaggaagaaccctcaggaaggcctgtacaatgaactgcagaaagataagatggcggaggcctacagtgagattgggatgaaaggcgagcgccggaggggcaaggggcacgatggcctttaccagggtctcagtacagccaccaaggacacctacgacgcccttcacatgcaggccctgccccctcgc

SEQ ID NO: 38729 - DNA, 1464 bp, synthetic construct
  source 1..1464: mol_type = other DNA
atggccttaccagtgaccgccttgctcctgccgctggccttgctgctccacgccgccaggccggaagtgcagctggttgaatcaggtggcggcctggttcaacctggcggatctctgagactgagctgtgccgccagcggctacagcatcaccaatgactacgcctggaactgggtccgacaggcccctggaaaaggactggaatgggtcggatatatcagctactccggctacaccacctacaatcccagcatcaagagccggttcaccatcagcagagacaccagcaagaacaccctgtacctccagatgaactccctgagagccgaggacaccgccgtgtactattgtgccagatggaccagcggcctggactattggggacagggaacactggtcaccgtgtcctctggcggaggcggaagtggaggcggaggatctggcggcggaggctctgacatccagatgacacagagccctagcagcctgtctgccagcgtgggagacagagtgaccatcacatgcaaggccagcgacctgatccacaactggctggcctggtatcagcagaagcctggcaaggcccctaagctgctgatctacggcgctacctctctggaaacaggcgtgcccagcagattttctggcagcggctctggcaccgacttcaccctgacaatatccagcctccagcctgaggacttcgccacctactactgccagcagtactggaccacacctttcaccttcggccagggcaccaaggtggaaatcaaaagaacgcgtgcgaagcccaccacgacgccagcgccgcgaccaccaacaccggcgcccaccatcgcgtcgcagcccctgtccctgcgcccagaggcgtgccggccagcggcggggggcgcagtgcacacgagggggctggacttcgcctgtgacatctacatctgggcgcccttggccgggacttgtggggtccttctcctgtcactggttatcaccctttactgcaaacggggcagaaagaaactcctgtatatattcaaacaaccatttatgagaccagtacaaactactcaagaggaagatggctgtagctgccgatttccagaagaagaagaaggaggatgtgaactgagagtgaagttcagcaggagcgcagacgcccccgcgtaccagcagggccagaaccagctctataacgagctgaatctaggacgaagagaggagtacgatgttttggacaagagacgtggccgggaccctgagatggggggaaagccgagaaggaagaaccctcaggaaggcctgtacaatgaactgcagaaagataagatggcggaggcctacagtgagattgggatgaaaggcgagcgccggaggggcaaggggcacgatggcctttaccagggtctcagtacagccaccaaggacacctacgacgcccttcacatgcaggccctgccccctcgc

SEQ ID NO: 38730 - DNA, 1863 bp, synthetic construct
  source 1..1863: mol_type = other DNA
atggccttaccagtgaccgccttgctcctgccgctggccttgctgctccacgccgccaggccggacatccagatgacacagagccctagcagcctgtctgccagcgtgggagacagagtgaccatcacatgcaaggccagcgacctgatccacaactggctggcctggtatcagcagaagcctggcaaggcccctaagctgctgatctacggcgctacctctctggaaacaggcgtgcccagcagattttctggcagcggctctggcaccgacttcaccctgacaatatccagcctccagcctgaggacttcgccacctactactgccagcagtactggaccacacctttcaccttcggccagggcaccaaggtggaaatcaaaagactcgagatccagaaccctgatcctgccgtgtaccagctgcgggatagcaagagcagcgacaagagcgtgtgtctgttcaccgacttcgacagccagaccaacgtgtcccagagcaaggactccgacgtgtacatcaccgataagtgcgtgctggacatgcggagcatggacttcaagagcaactccgccgtggcctggtccaacaagtccgatttcgcctgcgccaacgccttcaacaacagcattatccccgaggacacattcttcccaagcagcgacgtgccctgcgacgtgaagctggtggaaaagagcttcgagacagacaccaacctgaacttccagaacctgagcgtgatcggcttcagaatcctgctgctgaaagtggccggctttaacctgctgatgaccctgcggctgtggtccagccgcgccaagagaagcggatctggcgtgaagcagaccctgaatttcgacctgctgaagctggctggcgacgtggaatccaacccaggccctactagtatggactggatttggcgcatccttttccttgtcggcgctgctaccggcgcgcattccttcgaagaagtgcagctggttgaatcaggtggcggcctggttcaacctggcggatctctgagactgagctgtgccgccagcggctacagcatcaccaatgactacgcctggaactgggtccgacaggcccctggaaaaggactggaatgggtcggatatatcagctactccggctacaccacctacaatcccagcatcaagagccggttcaccatcagcagagacaccagcaagaacaccctgtacctccagatgaactccctgagagccgaggacaccgccgtgtactattgtgccagatggaccagcggcctggactattggggacagggaacactggtcaccgtgtcctctacgcgtgaggacctgaagaacgtgttcccacctgaggtggccgtgttcgagcctagcaaggccgagatcgcccacacccagaaagccaccctcgtgtgcctggctaccggcttctaccccgaccatgtggaactgtcttggtgggtcaacggcaaagaggtgcacagcggcgtgtgtaccgacccccagccactgaaagaacagcccgccctgaacgacagccggtactgcctgagcagcagactgagagtgtccgccaccttctggcagaacccccggaaccacttcagatgccaggtgcagttctacggcctgagcgagaacgacgagtggacccaggacagagccaagcccgtgacccagatcgtgtctgccgaagcctggggcagagccgattgcggcatcaccagcgccagctaccaccagggcgtgctgagcgccaccatcctgtacgagatcctgctgggcaaggccaccctgtacgccgtgctggtgtctgccctggtgctgatggctatggtcaagcggaaggacagccgggga

SEQ ID NO: 38731 - DNA, 1851 bp, synthetic construct
  source 1..1851: mol_type = other DNA
atggccttaccagtgaccgccttgctcctgccgctggccttgctgctccacgccgccaggccggacatccagatgacacagagccctagcagcctgtctgccagcgtgggagacagagtgaccatcacatgcaaggccagcgacctgatccacaactggctggcctggtatcagcagaagcctggcaaggcccctaagctgctgatctacggcgctacctctctggaaacaggcgtgcccagcagattttctggcagcggctctggcaccgacttcaccctgacaatatccagcctccagcctgaggacttcgccacctactactgccagcagtactggaccacacctttcaccttcggccagggcaccaaggtggaaatcaaaagactcgaggacctgaagaacgtgttcccacctgaggtggccgtgttcgagcctagcaaggccgagatcgcccacacccagaaagccaccctcgtgtgcctggctaccggcttctaccccgaccatgtggaactgtcttggtgggtcaacggcaaagaggtgcacagcggcgtgtgtaccgacccccagccactgaaagaacagcccgccctgaacgacagccggtactgcctgagcagcagactgagagtgtccgccaccttctggcagaacccccggaaccacttcagatgccaggtgcagttctacggcctgagcgagaacgacgagtggacccaggacagagccaagcccgtgacccagatcgtgtctgccgaagcctggggcagagccgattgcggcatcaccagcgccagctaccaccagggcgtgctgagcgccaccatcctgtacgagatcctgctgggcaaggccaccctgtacgccgtgctggtgtctgccctggtgctgatggctatggtcaagcggaaggacagccggggaagggccaagcgatctggatctggagcaacaaacttctcactactcaaacaagcaggtgacgtggaggagaatcccgggcctactagtatggactggatttggcgcatccttttccttgtcggcgctgctaccggcgcgcattccttcgaagaagtgcagctggttgaatcaggtggcggcctggttcaacctggcggatctctgagactgagctgtgccgccagcggctacagcatcaccaatgactacgcctggaactgggtccgacaggcccctggaaaaggactggaatgggtcggatatatcagctactccggctacaccacctacaatcccagcatcaagagccggttcaccatcagcagagacaccagcaagaacaccctgtacctccagatgaactccctgagagccgaggacaccgccgtgtactattgtgccagatggaccagcggcctggactattggggacagggaacactggtcaccgtgtcctctacgcgtatccagaaccctgatcctgccgtgtaccagctgcgggatagcaagagcagcgacaagagcgtgtgtctgttcaccgacttcgacagccagaccaacgtgtcccagagcaaggactccgacgtgtacatcaccgataagtgcgtgctggacatgcggagcatggacttcaagagcaactccgccgtggcctggtccaacaagtccgatttcgcctgcgccaacgccttcaacaacagcattatccccgaggacacattcttcccaagcagcgacgtgccctgcgacgtgaagctggtggaaaagagcttcgagacagacaccaacctgaacttccagaacctgagcgtgatcggcttcagaatcctgctgctgaaagtggccggctttaacctgctgatgaccctgcggctgtggtccagc

SEQ ID NO: 38732 - DNA, 1851 bp, synthetic construct
  source 1..1851: mol_type = other DNA
atggccttaccagtgaccgccttgctcctgccgctggccttgctgctccacgccgccaggccggacatccagatgacacagagccctagcagcctgtctgccagcgtgggagacagagtgaccatcacatgcaaggccagcgacctgatccacaactggctggcctggtatcagcagaagcctggcaaggcccctaagctgctgatctacggcgctacctctctggaaacaggcgtgcccagcagattttctggcagcggctctggcaccgacttcaccctgacaatatccagcctccagcctgaggacttcgccacctactactgccagcagtactggaccacacctttcaccttcggccagggcaccaaggtggaaatcaaaagactcgaggacctgaagaacgtgttcccacctgaggtggccgtgttcgagcctagcgaggccgagatcagccacacccagaaagccaccctcgtgtgcctggctaccggcttctaccccgaccatgtggaactgtcttggtgggtcaacggcaaagaggtgcacagcggcgtgtgtaccgacccccagccactgaaagaacagcccgccctgaacgacagccggtactgcctgagcagcagactgagagtgtccgccaccttctggcagaacccccggaaccacttcagatgccaggtgcagttctacggcctgagcgagaacgacgagtggacccaggacagagccaagcccgtgacccagatcgtgtctgccgaagcctggggcagagccgattgcggctttaccagcgagagctaccagcagggcgtgctgagcgccaccatcctgtacgagatcctgctgggcaaggccaccctgtacgccgtgctggtgtctgccctggtgctgatggctatggtcaagcggaaggacagccggggaagggccaagcgatctggatctggagcaacaaacttctcactactcaaacaagcaggtgacgtggaggagaatcccgggcctactagtatggactggatttggcgcatccttttccttgtcggcgctgctaccggcgcgcattccttcgaagaagtgcagctggttgaatcaggtggcggcctggttcaacctggcggatctctgagactgagctgtgccgccagcggctacagcatcaccaatgactacgcctggaactgggtccgacaggcccctggaaaaggactggaatgggtcggatatatcagctactccggctacaccacctacaatcccagcatcaagagccggttcaccatcagcagagacaccagcaagaacaccctgtacctccagatgaactccctgagagccgaggacaccgccgtgtactattgtgccagatggaccagcggcctggactattggggacagggaacactggtcaccgtgtcctctacgcgtatccagaaccctgatcctgccgtgtaccagctgcgggatagcaagagcagcgacaagagcgtgtgtctgttcaccgacttcgacagccagaccaacgtgtcccagagcaaggactccgacgtgtacatcaccgataagtgcgtgctggacatgcggagcatggacttcaagagcaactccgccgtggcctggtccaacaagtccgatttcgcctgcgccaacgccttcaacaacagcattatccccgaggacacattcttcccaagccccgagagcagctgcgacgtgaagctggtggaaaagagcttcgagacagacaccaacctgaacttccagaacctgagcgtgatcggcttcagaatcctgctgctgaaagtggccggctttaacctgctgatgaccctgcggctgtggtccagc

SEQ ID NO: 38733 - DNA, 1863 bp, synthetic construct
  source 1..1863: mol_type = other DNA
atggccttaccagtgaccgccttgctcctgccgctggccttgctgctccacgccgccaggccggacatccagatgacacagagccctagcagcctgtctgccagcgtgggagacagagtgaccatcacatgcaaggccagcgacctgatccacaactggctggcctggtatcagcagaagcctggcaaggcccctaagctgctgatctacggcgctacctctctggaaacaggcgtgcccagcagattttctggcagcggctctggcaccgacttcaccctgacaatatccagcctccagcctgaggacttcgccacctactactgccagcagtactggaccacacctttcaccttcggccagggcaccaaggtggaaatcaaaagactcgagatccagaaccctgatcctgccgtgtaccagctgcgggatagcaagagcagcgacaagagcgtgtgtctgttcaccgacttcgacagccagaccaacgtgtcccagagcaaggactccgacgtgtacatcaccgataagtgcgtgctggacatgcggagcatggacttcaagagcaactccgccgtggcctggtccaacaagtccgatttcgcctgcgccaacgccttcaacaacagcattatccccgaggacacattcttcccaagccccgagagcagctgcgacgtgaagctggtggaaaagagcttcgagacagacaccaacctgaacttccagaacctgagcgtgatcggcttcagaatcctgctgctgaaagtggccggctttaacctgctgatgaccctgcggctgtggtccagccgcgccaagagaagcggatctggcgtgaagcagaccctgaatttcgacctgctgaagctggctggcgacgtggaatccaacccaggccctactagtatggactggatttggcgcatccttttccttgtcggcgctgctaccggcgcgcattccttcgaagaagtgcagctggttgaatcaggtggcggcctggttcaacctggcggatctctgagactgagctgtgccgccagcggctacagcatcaccaatgactacgcctggaactgggtccgacaggcccctggaaaaggactggaatgggtcggatatatcagctactccggctacaccacctacaatcccagcatcaagagccggttcaccatcagcagagacaccagcaagaacaccctgtacctccagatgaactccctgagagccgaggacaccgccgtgtactattgtgccagatggaccagcggcctggactattggggacagggaacactggtcaccgtgtcctctacgcgtgaggacctgaagaacgtgttcccacctgaggtggccgtgttcgagcctagcgaggccgagatcagccacacccagaaagccaccctcgtgtgcctggctaccggcttctaccccgaccatgtggaactgtcttggtgggtcaacggcaaagaggtgcacagcggcgtgtgtaccgacccccagccactgaaagaacagcccgccctgaacgacagccggtactgcctgagcagcagactgagagtgtccgccaccttctggcagaacccccggaaccacttcagatgccaggtgcagttctacggcctgagcgagaacgacgagtggacccaggacagagccaagcccgtgacccagatcgtgtctgccgaagcctggggcagagccgattgcggctttaccagcgagagctaccagcagggcgtgctgagcgccaccatcctgtacgagatcctgctgggcaaggccaccctgtacgccgtgctggtgtctgccctggtgctgatggctatggtcaagcggaaggacagccgggga

SEQ ID NO: 38734 - DNA, 1899 bp, synthetic construct
  source 1..1899: mol_type = other DNA
atggccttaccagtgaccgccttgctcctgccgctggccttgctgctccacgccgccaggccgctcgaggaggacctgaagaacgtgttcccacctgaggtggccgtgttcgagcctagcaaggccgagatcgcccacacccagaaagccaccctcgtgtgcctggctaccggcttctaccccgaccatgtggaactgtcttggtgggtcaacggcaaagaggtgcacagcggcgtgtgtaccgacccccagccactgaaagaacagcccgccctgaacgacagccggtactgcctgagcagcagactgagagtgtccgccaccttctggcagaacccccggaaccacttcagatgccaggtgcagttctacggcctgagcgagaacgacgagtggacccaggacagagccaagcccgtgacccagatcgtgtctgccgaagcctggggcagagccgattgcggcatcaccagcgccagctaccaccagggcgtgctgagcgccaccatcctgtacgagatcctgctgggcaaggccaccctgtacgccgtgctggtgtctgccctggtgctgatggctatggtcaagcggaaggacagccggggaagggccaagcgatctggatctggagcaacaaacttctcactactcaaacaagcaggtgacgtggaggagaatcccgggcctactagcatggccttaccagtgaccgccttgctcctgccgctggccttgctgctccacgccgccaggccggacatccagatgacacagagccctagcagcctgtctgccagcgtgggagacagagtgaccatcacatgcaaggccagcgacctgatccacaactggctggcctggtatcagcagaagcctggcaaggcccctaagctgctgatctacggcgctacctctctggaaacaggcgtgcccagcagattttctggcagcggctctggcaccgacttcaccctgacaatatccagcctccagcctgaggacttcgccacctactactgccagcagtactggaccacacctttcaccttcggccagggcaccaaggtggaaatcaaaagaggcggaggcggaagtggaggcggaggatctggcggcggaggctctgaagtgcagctggttgaatcaggtggcggcctggttcaacctggcggatctctgagactgagctgtgccgccagcggctacagcatcaccaatgactacgcctggaactgggtccgacaggcccctggaaaaggactggaatgggtcggatatatcagctactccggctacaccacctacaatcccagcatcaagagccggttcaccatcagcagagacaccagcaagaacaccctgtacctccagatgaactccctgagagccgaggacaccgccgtgtactattgtgccagatggaccagcggcctggactattggggacagggaacactggtcaccgtgtcctctacgcgtatccagaaccctgatcctgccgtgtaccagctgcgggatagcaagagcagcgacaagagcgtgtgtctgttcaccgacttcgacagccagaccaacgtgtcccagagcaaggactccgacgtgtacatcaccgataagtgcgtgctggacatgcggagcatggacttcaagagcaactccgccgtggcctggtccaacaagtccgatttcgcctgcgccaacgccttcaacaacagcattatccccgaggacacattcttcccaagcagcgacgtgccctgcgacgtgaagctggtggaaaagagcttcgagacagacaccaacctgaacttccagaacctgagcgtgatcggcttcagaatcctgctgctgaaagtggccggctttaacctgctgatgaccctgcggctgtggtccagc

SEQ ID NO: 38735 - DNA, 1920 bp, synthetic construct
  source 1..1920: mol_type = other DNA
atggccttaccagtgaccgccttgctcctgccgctggccttgctgctccacgccgccaggccgctcgagggctccggcgatcgccctgatcctgccgtgtaccagctgcgggatagcaagagcagcgacaagagcgtgtgtctgttcaccgacttcgacagccagaccaacgtgtcccagagcaaggactccgacgtgtacatcaccgataagtgcgtgctggacatgcggagcatggacttcaagagcaactccgccgtggcctggtccaacaagtccgatttcgcctgcgccaacgccttcaacaacagcattatccccgaggacacattcttcccaagccccgagagcagctgcgacgtgaagctggtggaaaagagcttcgagacagacaccaacctgaacttccagaacctgagcgtgatcggcttcagaatcctgctgctgaaagtggccggctttaacctgctgatgaccctgcggctgtggtccagctctagtcgcgccaagagaagcggatctggcgtgaagcagaccctgaatttcgacctgctgaagctggctggcgacgtggaatccaacccaggccccactagcatggccttaccagtgaccgccttgctcctgccgctggccttgctgctccacgccgccaggccggacatccagatgacacagagccctagcagcctgtctgccagcgtgggagacagagtgaccatcacatgcaaggccagcgacctgatccacaactggctggcctggtatcagcagaagcctggcaaggcccctaagctgctgatctacggcgctacctctctggaaacaggcgtgcccagcagattttctggcagcggctctggcaccgacttcaccctgacaatatccagcctccagcctgaggacttcgccacctactactgccagcagtactggaccacacctttcaccttcggccagggcaccaaggtggaaatcaaaagaggcggaggcggaagtggaggcggaggatctggcggcggaggctctgaagtgcagctggttgaatcaggtggcggcctggttcaacctggcggatctctgagactgagctgtgccgccagcggctacagcatcaccaatgactacgcctggaactgggtccgacaggcccctggaaaaggactggaatgggtcggatatatcagctactccggctacaccacctacaatcccagcatcaagagccggttcaccatcagcagagacaccagcaagaacaccctgtacctccagatgaactccctgagagccgaggacaccgccgtgtactattgtgccagatggaccagcggcctggactattggggacagggaacactggtcaccgtgtcctctacgcgtgaggacctgaagaacgtgttcccacctgaggtggccgtgttcgagcctagcgaggccgagatcagccacacccagaaagccaccctcgtgtgcctggctaccggcttctaccccgaccatgtggaactgtcttggtgggtcaacggcaaagaggtgcacagcggcgtgtgtaccgacccccagccactgaaagaacagcccgccctgaacgacagccggtactgcctgagcagcagactgagagtgtccgccaccttctggcagaacccccggaaccacttcagatgccaggtgcagttctacggcctgagcgagaacgacgagtggacccaggacagagccaagcccgtgacccagatcgtgtctgccgaagcctggggcagagccgattgcggctttaccagcgagagctaccagcagggcgtgctgagcgccaccatcctgtacgagatcctgctgggcaaggccaccctgtacgccgtgctggtgtctgccctggtgctgatggctatggtcaagcggaaggacagccgggga

SEQ ID NO: 38736 - DNA, 1851 bp, synthetic construct
  source 1..1851: mol_type = other DNA
atggccttaccagtgaccgccttgctcctgccgctggccttgctgctccacgccgccaggccggacatccagatgacacagagccctagcagcctgtctgccagcgtgggagacagagtgaccatcacatgcaaggccagcgacctgatccacaactggctggcctggtatcagcagaagcctggcaaggcccctaagctgctgatctacggcgctacctctctggaaacaggcgtgcccagcagattttctggcagcggctctggcaccgacttcaccctgacaatatccagcctccagcctgaggacttcgccacctactactgccagcagtactggaccacacctttcaccttcggccagggcaccaaggtggaaatcaaaagactcgaggacctgaagaacgtgttcccacctgaggtggccgtgttcgagcctagcgaggccgagatcagccacacccagaaagccaccctcgtgtgcctggctaccggcttctaccccgaccatgtggaactgtcttggtgggtcaacggcaaagaggtgcacagcggcgtgtctaccgacccccagccactgaaagaacagcccgccctgaacgacagccggtactgcctgagcagcagactgagagtgtccgccaccttctggcagaacccccggaaccacttcagatgccaggtgcagttctacggcctgagcgagaacgacgagtggacccaggacagagccaagcccgtgacccagatcgtgtctgccgaagcctggggcagagccgattgcggctttaccagcgagagctaccagcagggcgtgctgagcgccaccatcctgtacgagatcctgctgggcaaggccaccctgtacgccgtgctggtgtctgccctggtgctgatggctatggtcaagcggaaggacagccggggaagggccaagcgatctggatctggagcaacaaacttctcactactcaaacaagcaggtgacgtggaggagaatcccgggcctactagtatggactggatttggcgcatccttttccttgtcggcgctgctaccggcgcgcattccttcgaagaagtgcagctggttgaatcaggtggcggcctggttcaacctggcggatctctgagactgagctgtgccgccagcggctacagcatcaccaatgactacgcctggaactgggtccgacaggcccctggaaaaggactggaatgggtcggatatatcagctactccggctacaccacctacaatcccagcatcaagagccggttcaccatcagcagagacaccagcaagaacaccctgtacctccagatgaactccctgagagccgaggacaccgccgtgtactattgtgccagatggaccagcggcctggactattggggacagggaacactggtcaccgtgtcctctacgcgtatccagaaccctgatcctgccgtgtaccagctgcgggatagcaagagcagcgacaagagcgtgtgtctgttcaccgacttcgacagccagaccaacgtgtcccagagcaaggactccgacgtgtacatcaccgataagaccgtgctggacatgcggagcatggacttcaagagcaactccgccgtggcctggtccaacaagtccgatttcgcctgcgccaacgccttcaacaacagcattatccccgaggacacattcttcccaagccccgagagcagctgcgacgtgaagctggtggaaaagagcttcgagacagacaccaacctgaacttccagaacctgagcgtgatcggcttcagaatcctgctgctgaaagtggccggctttaacctgctgatgaccctgcggctgtggtccagc

SEQ ID NO: 38737 - DNA, 1875 bp, synthetic construct
  source 1..1875: mol_type = other DNA
atggccttaccagtgaccgccttgctcctgccgctggccttgctgctccacgccgccaggccggacatccagatgacacagagccctagcagcctgtctgccagcgtgggagacagagtgaccatcacatgcaaggccagcgacctgatccacaactggctggcctggtatcagcagaagcctggcaaggcccctaagctgctgatctacggcgctacctctctggaaacaggcgtgcccagcagattttctggcagcggctctggcaccgacttcaccctgacaatatccagcctccagcctgaggacttcgccacctactactgccagcagtactggaccacacctttcaccttcggccagggcaccaaggtggaaatcaaaagactcgaggacaagcagctggacgccgacgtgtcccccaagcctaccatcttcctgccctctatcgccgagacaaagctccagaaggccggcacctacctgtgcctgctggaaaagttcttcccagatgtgattaagatccactggcaggaaaagaagtccaacaccatcctgggcagccaggaaggcaacaccatgaagaccaacgacacctacatgaagttcagctggctgaccgtgcccgagaagtccctggacaaagaacacagatgcatcgtgcggcacgaaaacaacaagaacggcgtggaccaggaaatcatcttcccacccatcaagaccgatgtgattacaatggaccccaaggacaactgctccaaggacgccaacgataccctgctgctccagctgaccaacaccagcgcctactacatgtacttgttgctgctgctgaagtccgtggtgtacttcgccatcatcacatgctgcctgctgcggagaaccgccttctgctgcaacggcgagaagtctagggccaagcgatctggatctggagcaacaaacttctcactactcaaacaagcaggtgacgtggaggagaatcccgggcctactagtatggactggatttggcgcatccttttccttgtcggcgctgctaccggcgcgcattccttcgaagaagtgcagctggttgaatcaggtggcggcctggttcaacctggcggatctctgagactgagctgtgccgccagcggctacagcatcaccaatgactacgcctggaactgggtccgacaggcccctggaaaaggactggaatgggtcggatatatcagctactccggctacaccacctacaatcccagcatcaagagccggttcaccatcagcagagacaccagcaagaacaccctgtacctccagatgaactccctgagagccgaggacaccgccgtgtactattgtgccagatggaccagcggcctggactattggggacagggaacactggtcaccgtgtcctctacgcgtagccagcctcacaccaagcccagcgtgttcgtgatgaagaacggcaccaacgtggcctgcctcgtgaaagagttctaccccaaggacatcaggatcaacctggtgtccagcaagaagatcaccgagttcgaccccgccatcgtgatctcccccagcggcaagtacaacgccgtgaagctggggaagtacgaggacagcaacagcgtgacctgctccgtgcagcacgacaacaagaccgtgcacagcaccgactttgaagtgaaaaccgactccaccgaccacgtgaagcccaaagagacagagaacaccaagcagcccagcaagagctgccacaagcccaaggccatcgtgcacaccgagaaagtgaacatgatgagcctgaccgtgctgggcctgcggatgctgttcgccaaaaccgtggccgtgaacttcctgctgaccgccaagctgttcttcctc

SEQ ID NO: 38738 - DNA, 1875 bp, synthetic construct
  source 1..1875: mol_type = other DNA
atggccttaccagtgaccgccttgctcctgccgctggccttgctgctccacgccgccaggccggacatccagatgacacagagccctagcagcctgtctgccagcgtgggagacagagtgaccatcacatgcaaggccagcgacctgatccacaactggctggcctggtatcagcagaagcctggcaaggcccctaagctgctgatctacggcgctacctctctggaaacaggcgtgcccagcagattttctggcagcggctctggcaccgacttcaccctgacaatatccagcctccagcctgaggacttcgccacctactactgccagcagtactggaccacacctttcaccttcggccagggcaccaaggtggaaatcaaaagactcgagagccagcctcacaccaagcccagcgtgttcgtgatgaagaacggcaccaacgtggcctgcctcgtgaaagagttctaccccaaggacatcaggatcaacctggtgtccagcaagaagatcaccgagttcgaccccgccatcgtgatctcccccagcggcaagtacaacgccgtgaagctggggaagtacgaggacagcaacagcgtgacctgctccgtgcagcacgacaacaagaccgtgcacagcaccgactttgaagtgaaaaccgactccaccgaccacgtgaagcccaaagagacagagaacaccaagcagcccagcaagagctgccacaagcccaaggccatcgtgcacaccgagaaagtgaacatgatgagcctgaccgtgctgggcctgcggatgctgttcgccaaaaccgtggccgtgaacttcctgctgaccgccaagctgttcttcctcagggccaagcgatctggatctggagcaacaaacttctcactactcaaacaagcaggtgacgtggaggagaatcccgggcctactagtatggactggatttggcgcatccttttccttgtcggcgctgctaccggcgcgcattccttcgaagaagtgcagctggttgaatcaggtggcggcctggttcaacctggcggatctctgagactgagctgtgccgccagcggctacagcatcaccaatgactacgcctggaactgggtccgacaggcccctggaaaaggactggaatgggtcggatatatcagctactccggctacaccacctacaatcccagcatcaagagccggttcaccatcagcagagacaccagcaagaacaccctgtacctccagatgaactccctgagagccgaggacaccgccgtgtactattgtgccagatggaccagcggcctggactattggggacagggaacactggtcaccgtgtcctctacgcgtgacaagcagctggacgccgacgtgtcccccaagcctaccatcttcctgccctctatcgccgagacaaagctccagaaggccggcacctacctgtgcctgctggaaaagttcttcccagatgtgattaagatccactggcaggaaaagaagtccaacaccatcctgggcagccaggaaggcaacaccatgaagaccaacgacacctacatgaagttcagctggctgaccgtgcccgagaagtccctggacaaagaacacagatgcatcgtgcggcacgaaaacaacaagaacggcgtggaccaggaaatcatcttcccacccatcaagaccgatgtgattacaatggaccccaaggacaactgctccaaggacgccaacgataccctgctgctccagctgaccaacaccagcgcctactacatgtacttgttgctgctgctgaagtccgtggtgtacttcgccatcatcacatgctgcctgctgcggagaaccgccttctgctgcaacggcgagaagtct

SEQ ID NO: 38739 - DNA, 1920 bp, synthetic construct
  source 1..1920: mol_type = other DNA
atggccttaccagtgaccgccttgctcctgccgctggccttgctgctccacgccgccaggccgctcgaggacaagcagctggacgccgacgtgtcccccaagcctaccatcttcctgccctctatcgccgagacaaagctccagaaggccggcacctacctgtgcctgctggaaaagttcttcccagatgtgattaagatccactggcaggaaaagaagtccaacaccatcctgggcagccaggaaggcaacaccatgaagaccaacgacacctacatgaagttcagctggctgaccgtgcccgagaagtccctggacaaagaacacagatgcatcgtgcggcacgaaaacaacaagaacggcgtggaccaggaaatcatcttcccacccatcaagaccgatgtgattacaatggaccccaaggacaactgctccaaggacgccaacgataccctgctgctccagctgaccaacaccagcgcctactacatgtacttgttgctgctgctgaagtccgtggtgtacttcgccatcatcacatgctgcctgctgcggagaaccgccttctgctgcaacggcgagaagtctagggccaagcgatctggatctggagcaacaaacttctcactactcaaacaagcaggtgacgtggaggagaatcccgggcctactagcatggccttaccagtgaccgccttgctcctgccgctggccttgctgctccacgccgccaggccggacatccagatgacacagagccctagcagcctgtctgccagcgtgggagacagagtgaccatcacatgcaaggccagcgacctgatccacaactggctggcctggtatcagcagaagcctggcaaggcccctaagctgctgatctacggcgctacctctctggaaacaggcgtgcccagcagattttctggcagcggctctggcaccgacttcaccctgacaatatccagcctccagcctgaggacttcgccacctactactgccagcagtactggaccacacctttcaccttcggccagggcaccaaggtggaaatcaaaagaggcggaggcggaagtggaggcggaggatctggcggcggaggctctgaagtgcagctggttgaatcaggtggcggcctggttcaacctggcggatctctgagactgagctgtgccgccagcggctacagcatcaccaatgactacgcctggaactgggtccgacaggcccctggaaaaggactggaatgggtcggatatatcagctactccggctacaccacctacaatcccagcatcaagagccggttcaccatcagcagagacaccagcaagaacaccctgtacctccagatgaactccctgagagccgaggacaccgccgtgtactattgtgccagatggaccagcggcctggactattggggacagggaacactggtcaccgtgtcctctacgcgtagccagcctcacaccaagcccagcgtgttcgtgatgaagaacggcaccaacgtggcctgcctcgtgaaagagttctaccccaaggacatcaggatcaacctggtgtccagcaagaagatcaccgagttcgaccccgccatcgtgatctcccccagcggcaagtacaacgccgtgaagctggggaagtacgaggacagcaacagcgtgacctgctccgtgcagcacgacaacaagaccgtgcacagcaccgactttgaagtgaaaaccgactccaccgaccacgtgaagcccaaagagacagagaacaccaagcagcccagcaagagctgccacaagcccaaggccatcgtgcacaccgagaaagtgaacatgatgagcctgaccgtgctgggcctgcggatgctgttcgccaaaaccgtggccgtgaacttcctgctgaccgccaagctgttcttcctc

SEQ ID NO: 38740 - DNA, 2382 bp, synthetic construct
  source 1..2382: mol_type = other DNA
atggccttaccagtgaccgccttgctcctgccgctggccttgctgctccacgccgccaggccggacatccagatgacacagagccctagcagcctgtctgccagcgtgggagacagagtgaccatcacatgcaaggccagcgacctgatccacaactggctggcctggtatcagcagaagcctggcaaggcccctaagctgctgatctacggcgctacctctctggaaacaggcgtgcccagcagattttctggcagcggctctggcaccgacttcaccctgacaatatccagcctccagcctgaggacttcgccacctactactgccagcagtactggaccacacctttcaccttcggccagggcaccaaggtggaaatcaaaagaggacagcctaaggccaatcctaccgtgacactgttccctccaagcagcgaagaactccaggccaacaaggccacacttgtgtgcctgatctccgacttctaccctggggctgtgacagtggcttggaaggccgatggatctcctgtgaaagccggcgtggaaaccaccaagccatccaagcagagcaacaacaaatacgccgccagctcctacctgagcctgacacctgagcagtggaagtcccacagatcctacagctgccaagtgacccacgaaggcagcaccgtggaaaagacagtggcccctacagagtgcagcggatcccagagcttcggcctgctggaccccaagctgtgctacctgctggatggcatcctgttcatctacggcgtgatcctgaccgccctgttcctgagagtgaagttcagcagaagcgccgacgcccctgcctaccagcagggacagaaccaactgtacaacgagctgaacctgggcagacgggaagagtacgacgtgctggacaagcggagaggcagggaccctgagatgggcggaaagccccagcggagaaagaacccccaggaaggactgtataacgaactccagaaagacaagatggccgaagcctacagcgagatcggcatgaagggcgagcggagaagaggcaagggccacgatggcctgtaccagggcctgagcaccgccaccaaggacacctatgacgccctgcacatgcaggccctgcctccaagaagggccaagcgatctggatctggagcaacaaacttctcactactcaaacaagcaggtgacgtggaggagaatcccgggcctactagtatggactggatttggcgcatccttttccttgtcggcgctgctaccggcgcgcattccttcgaagaagtgcagctggttgaatcaggtggcggcctggttcaacctggcggatctctgagactgagctgtgccgccagcggctacagcatcaccaatgactacgcctggaactgggtccgacaggcccctggaaaaggactggaatgggtcggatatatcagctactccggctacaccacctacaatcccagcatcaagagccggttcaccatcagcagagacaccagcaagaacaccctgtacctccagatgaactccctgagagccgaggacaccgccgtgtactattgtgccagatggaccagcggcctggactattggggacagggaacactggtcaccgtgtcctctgcctctacaaagggaccctccgtgtttcctctggctcccagcagcaagtctacaagcggaggaacagccgctctgggctgcctggtcaaggattactttcccgagcctgtgaccgtgtcctggaatagcggagcactgacaagcggcgtgcacacctttccagccgtgctgcaaagcagcggcctgtactctctgagcagcgtggtcacagtgcctagctctagcctgggcacccagacctacatctgcaatgtgaaccacaagcctagcaacaccaaggtggacaagagagtggaacccaagagctgtggtacccagagttttgggttgttggaccctaaattgtgctatctgttggacggaatcctgttcatttacggagtgatcctgaccgcattgttcctgcgggttaagttttccagatccgcagacgcacccgcttaccaacaagggcagaaccaactctacaatgaacttaatttggggcggagggaagagtacgacgttctggacaaaaggaggggacgagatcccgagatgggcggaaagcctcagcgaaggaagaatccgcaagaggggctttataacgaactccagaaagataaaatggcagaagcctatagtgagattgggatgaagggagaaaggaggaggggtaaaggtcacgatgggttgtaccaaggattgagcacagccactaaagatacctatgatgcgctccacatgcaggccctgccgccaaga

SEQ ID NO: 38741 - DNA, 2439 bp, synthetic construct
  source 1..2439: mol_type = other DNA
atggccttaccagtgaccgccttgctcctgccgctggccttgctgctccacgccgccaggccggacatccagatgacacagagccctagcagcctgtctgccagcgtgggagacagagtgaccatcacatgcaaggccagcgacctgatccacaactggctggcctggtatcagcagaagcctggcaaggcccctaagctgctgatctacggcgctacctctctggaaacaggcgtgcccagcagattttctggcagcggctctggcaccgacttcaccctgacaatatccagcctccagcctgaggacttcgccacctactactgccagcagtactggaccacacctttcaccttcggccagggcaccaaggtggaaatcaaaagactcgaggacctgaagaacgtgttcccacctgaggtggccgtgttcgagcctagcgaggccgagatcagccacacccagaaagccaccctcgtgtgcctggctaccggcttctaccccgaccatgtggaactgtcttggtgggtcaacggcaaagaggtgcacagcggcgtgtctaccgacccccagccactgaaagaacagcccgccctgaacgacagccggtactgcctgagcagcagactgagagtgtccgccaccttctggcagaacccccggaaccacttcagatgccaggtgcagttctacggcctgagcgagaacgacgagtggacccaggacagagccaagcccgtgacccagatcgtgtctgccgaagcctggggcagagccgattgcggatcccagagcttcggcctgctggaccccaagctgtgctacctgctggatggcatcctgttcatctacggcgtgatcctgaccgccctgttcctgagagtgaagttcagcagaagcgccgacgcccctgcctaccagcagggacagaaccaactgtacaacgagctgaacctgggcagacgggaagagtacgacgtgctggacaagcggagaggcagggaccctgagatgggcggaaagccccagcggagaaagaacccccaggaaggactgtataacgaactccagaaagacaagatggccgaagcctacagcgagatcggcatgaagggcgagcggagaagaggcaagggccacgatggcctgtaccagggcctgagcaccgccaccaaggacacctatgacgccctgcacatgcaggccctgcctccaagaagggccaagcgatctggatctggagcaacaaacttctcactactcaaacaagcaggtgacgtggaggagaatcccgggcctactagtatggactggatttggcgcatccttttccttgtcggcgctgctaccggcgcgcattccttcgaagaagtgcagctggttgaatcaggtggcggcctggttcaacctggcggatctctgagactgagctgtgccgccagcggctacagcatcaccaatgactacgcctggaactgggtccgacaggcccctggaaaaggactggaatgggtcggatatatcagctactccggctacaccacctacaatcccagcatcaagagccggttcaccatcagcagagacaccagcaagaacaccctgtacctccagatgaactccctgagagccgaggacaccgccgtgtactattgtgccagatggaccagcggcctggactattggggacagggaacactggtcaccgtgtcctctacgcgtatccagaaccctgatcctgccgtgtaccagctgcgggatagcaagagcagcgacaagagcgtgtgtctgttcaccgacttcgacagccagaccaacgtgtcccagagcaaggactccgacgtgtacatcaccgataagaccgtgctggacatgcggagcatggacttcaagagcaactccgccgtggcctggtccaacaagtccgatttcgcctgcgccaacgccttcaacaacagcattatccccgaggacacattcttcccaagccccgagagcagctgcggtacccagagttttgggttgttggaccctaaattgtgctatctgttggacggaatcctgttcatttacggagtgatcctgaccgcattgttcctgcgggttaagttttccagatccgcagacgcacccgcttaccaacaagggcagaaccaactctacaatgaacttaatttggggcggagggaagagtacgacgttctggacaaaaggaggggacgagatcccgagatgggcggaaagcctcagcgaaggaagaatccgcaagaggggctttataacgaactccagaaagataaaatggcagaagcctatagtgagattgggatgaagggagaaaggaggaggggtaaaggtcacgatgggttgtaccaaggattgagcacagccactaaagatacctatgatgcgctccacatgcaggccctgccgccaaga

SEQ ID NO: 38742 - DNA, 2565 bp, synthetic construct
  source 1..2565: mol_type = other DNA
atggccttaccagtgaccgccttgctcctgccgctggccttgctgctccacgccgccaggccggacatccagatgacacagagccctagcagcctgtctgccagcgtgggagacagagtgaccatcacatgcaaggccagcgacctgatccacaactggctggcctggtatcagcagaagcctggcaaggcccctaagctgctgatctacggcgctacctctctggaaacaggcgtgcccagcagattttctggcagcggctctggcaccgacttcaccctgacaatatccagcctccagcctgaggacttcgccacctactactgccagcagtactggaccacacctttcaccttcggccagggcaccaaggtggaaatcaaaagactcgaggaggacctgaagaacgtgttcccacctgaggtggccgtgttcgagcctagcgaggccgagatcagccacacccagaaagccaccctcgtgtgcctggctaccggcttctaccccgaccatgtggaactgtcttggtgggtcaacggcaaagaggtgcacagcggcgtgtctaccgacccccagccactgaaagaacagcccgccctgaacgacagccggtactgcctgagcagcagactgagagtgtccgccaccttctggcagaacccccggaaccacttcagatgccaggtgcagttctacggcctgagcgagaacgacgagtggacccaggacagagccaagcccgtgacccagatcgtgtctgccgaagcctggggcagagccgattgcggatcccagagcttcggcctgctggaccccaagctgtgctacctgctggatggcatcctgttcatctacggcgtgatcctgaccgccctgttcctgagagtgaagttcagcagaagcgccgacgcccctgcctaccagcagggacagaaccaactgtacaacgagctgaacctgggcagacgggaagagtacgacgtgctggacaagcggagaggcagggaccctgagatgggcggaaagccccagcggagaaagaacccccaggaaggactgtataacgaactccagaaagacaagatggccgaagcctacagcgagatcggcatgaagggcgagcggagaagaggcaagggccacgatggcctgtaccagggcctgagcaccgccaccaaggacacctatgacgccctgcacatgcaggccctgcctccaagaagggccaagcgatctggatctggagcaacaaacttctcactactcaaacaagcaggtgacgtggaggagaatcccgggcctactagtatggactggatttggcgcatccttttccttgtcggcgctgctaccggcgcgcattccttcgaagaagtgcagctggttgaatcaggtggcggcctggttcaacctggcggatctctgagactgagctgtgccgccagcggctacagcatcaccaatgactacgcctggaactgggtccgacaggcccctggaaaaggactggaatgggtcggatatatcagctactccggctacaccacctacaatcccagcatcaagagccggttcaccatcagcagagacaccagcaagaacaccctgtacctccagatgaactccctgagagccgaggacaccgccgtgtactattgtgccagatggaccagcggcctggactattggggacagggaacactggtcaccgtgtcctctacgcgtatccagaaccctgatcctgccgtgtaccagctgcgggatagcaagagcagcgacaagagcgtgtgtctgttcaccgacttcgacagccagaccaacgtgtcccagagcaaggactccgacgtgtacatcaccgataagaccgtgctggacatgcggagcatggacttcaagagcaactccgccgtggcctggtccaacaagtccgatttcgcctgcgccaacgccttcaacaacagcattatccccgaggacacattcttcccaagccccgagagcagctgcggtacccagagttttgggttgttggaccctaaattgtgctatctgttggacggaatcctgttcatttacggagtgatcctgaccgcattgttcctgaggagcaagcggtcacggctgctccacagcgattacatgaatatgacaccacgaagaccgggtcctactcgcaaacactaccaaccctacgcacctccccgcgactttgcagcgtaccgatctcgggttaagttttccagatccgcagacgcacccgcttaccaacaagggcagaaccaactctacaatgaacttaatttggggcggagggaagagtacgacgttctggacaaaaggaggggacgagatcccgagatgggcggaaagcctcagcgaaggaagaatccgcaagaggggctttataacgaactccagaaagataaaatggcagaagcctatagtgagattgggatgaagggagaaaggaggaggggtaaaggtcacgatgggttgtaccaaggattgagcacagccactaaagatacctatgatgcgctccacatgcaggccctgccgccaaga

SEQ ID NO: 38743 - DNA, 2694 bp, synthetic construct
  source 1..2694: mol_type = other DNA
atggccttaccagtgaccgccttgctcctgccgctggccttgctgctccacgccgccaggccggacatccagatgacacagagccctagcagcctgtctgccagcgtgggagacagagtgaccatcacatgcaaggccagcgacctgatccacaactggctggcctggtatcagcagaagcctggcaaggcccctaagctgctgatctacggcgctacctctctggaaacaggcgtgcccagcagattttctggcagcggctctggcaccgacttcaccctgacaatatccagcctccagcctgaggacttcgccacctactactgccagcagtactggaccacacctttcaccttcggccagggcaccaaggtggaaatcaaaagactcgaggaggacctgaagaacgtgttcccacctgaggtggccgtgttcgagcctagcgaggccgagatcagccacacccagaaagccaccctcgtgtgcctggctaccggcttctaccccgaccatgtggaactgtcttggtgggtcaacggcaaagaggtgcacagcggcgtgtctaccgacccccagccactgaaagaacagcccgccctgaacgacagccggtactgcctgagcagcagactgagagtgtccgccaccttctggcagaacccccggaaccacttcagatgccaggtgcagttctacggcctgagcgagaacgacgagtggacccaggacagagccaagcccgtgacccagatcgtgtctgccgaagcctggggcagagccgattgcggatcccagagcttcggcctgctggaccccaagctgtgctacctgctggatggcatcctgttcatctacggcgtgatcctgaccgccctgttcctgaaacggggcagaaagaaactcctgtatatattcaaacaaccatttatgagaccagtacaaactactcaagaggaagatggctgtagctgccgatttccagaagaagaagaaggaggatgtgaactgagagtgaagttcagcagaagcgccgacgcccctgcctaccagcagggacagaaccaactgtacaacgagctgaacctgggcagacgggaagagtacgacgtgctggacaagcggagaggcagggaccctgagatgggcggaaagccccagcggagaaagaacccccaggaaggactgtataacgaactccagaaagacaagatggccgaagcctacagcgagatcggcatgaagggcgagcggagaagaggcaagggccacgatggcctgtaccagggcctgagcaccgccaccaaggacacctatgacgccctgcacatgcaggccctgcctccaagaagggccaagcgatctggatctggagcaacaaacttctcactactcaaacaagcaggtgacgtggaggagaatcccgggcctactagtatggactggatttggcgcatccttttccttgtcggcgctgctaccggcgcgcattccttcgaagaagtgcagctggttgaatcaggtggcggcctggttcaacctggcggatctctgagactgagctgtgccgccagcggctacagcatcaccaatgactacgcctggaactgggtccgacaggcccctggaaaaggactggaatgggtcggatatatcagctactccggctacaccacctacaatcccagcatcaagagccggttcaccatcagcagagacaccagcaagaacaccctgtacctccagatgaactccctgagagccgaggacaccgccgtgtactattgtgccagatggaccagcggcctggactattggggacagggaacactggtcaccgtgtcctctacgcgtatccagaaccctgatcctgccgtgtaccagctgcgggatagcaagagcagcgacaagagcgtgtgtctgttcaccgacttcgacagccagaccaacgtgtcccagagcaaggactccgacgtgtacatcaccgataagaccgtgctggacatgcggagcatggacttcaagagcaactccgccgtggcctggtccaacaagtccgatttcgcctgcgccaacgccttcaacaacagcattatccccgaggacacattcttcccaagccccgagagcagctgcggtacccagagttttgggttgttggaccctaaattgtgctatctgttggacggaatcctgttcatttacggagtgatcctgaccgcattgttcctgaagagaggccggaagaagctgctgtacatcttcaagcagcctttcatgcggcccgtgcagaccacccaggaagaggacggctgctcctgccggttccccgaggaagaagaaggcggctgcgagctgcgggttaagttttccagatccgcagacgcacccgcttaccaacaagggcagaaccaactctacaatgaacttaatttggggcggagggaagagtacgacgttctggacaaaaggaggggacgagatcccgagatgggcggaaagcctcagcgaaggaagaatccgcaagaggggctttataacgaactccagaaagataaaatggcagaagcctatagtgagattgggatgaagggagaaaggaggaggggtaaaggtcacgatgggttgtaccaaggattgagcacagccactaaagatacctatgatgcgctccacatgcaggccctgccgccaaga

SEQ ID NO: 38744 - DNA, 1755 bp, synthetic construct
  source 1..1755: mol_type = other DNA
atggccttaccagtgaccgccttgctcctgccgctggccttgctgctccacgccgccaggccggacatccagatgacacagagccctagcagcctgtctgccagcgtgggagacagagtgaccatcacatgcaaggccagcgacctgatccacaactggctggcctggtatcagcagaagcctggcaaggcccctaagctgctgatctacggcgctacctctctggaaacaggcgtgcccagcagattttctggcagcggctctggcaccgacttcaccctgacaatatccagcctccagcctgaggacttcgccacctactactgccagcagtactggaccacacctttcaccttcggccagggcaccaaggtggaaatcaaaagactcgagcagagcttcggcctgctggaccccaagctgtgctacctgctggatggcatcctgttcatctacggcgtgatcctgaccgccctgttcctgagagtgaagttcagcagaagcgccgacgcccctgcctaccagcagggacagaaccaactgtacaacgagctgaacctgggcagacgggaagagtacgacgtgctggacaagcggagaggcagggaccctgagatgggcggaaagccccagcggagaaagaacccccaggaaggactgtataacgaactccagaaagacaagatggccgaagcctacagcgagatcggcatgaagggcgagcggagaagaggcaagggccacgatggcctgtaccagggcctgagcaccgccaccaaggacacctatgacgccctgcacatgcaggccctgcctccaagaagggccaagcgatctggatctggagcaacaaacttctcactactcaaacaagcaggtgacgtggaggagaatcccgggcctactagtatggactggatttggcgcatccttttccttgtcggcgctgctaccggcgcgcattccttcgaagaagtgcagctggttgaatcaggtggcggcctggttcaacctggcggatctctgagactgagctgtgccgccagcggctacagcatcaccaatgactacgcctggaactgggtccgacaggcccctggaaaaggactggaatgggtcggatatatcagctactccggctacaccacctacaatcccagcatcaagagccggttcaccatcagcagagacaccagcaagaacaccctgtacctccagatgaactccctgagagccgaggacaccgccgtgtactattgtgccagatggaccagcggcctggactattggggacagggaacactggtcaccgtgtcctctacgcgtcagagttttgggttgttggaccctaaattgtgctatctgttggacggaatcctgttcatttacggagtgatcctgaccgcattgttcctgcgggttaagttttccagatccgcagacgcacccgcttaccaacaagggcagaaccaactctacaatgaacttaatttggggcggagggaagagtacgacgttctggacaaaaggaggggacgagatcccgagatgggcggaaagcctcagcgaaggaagaatccgcaagaggggctttataacgaactccagaaagataaaatggcagaagcctatagtgagattgggatgaagggagaaaggaggaggggtaaaggtcacgatgggttgtaccaaggattgagcacagccactaaagatacctatgatgcgctccacatgcaggccctgccgccaaga

SEQ ID NO: 38745 - DNA, 1929 bp, synthetic construct
  source 1..1929: mol_type = other DNA
atggccttaccagtgaccgccttgctcctgccgctggccttgctgctccacgccgccaggccggacatccagatgacacagagccctagcagcctgtctgccagcgtgggagacagagtgaccatcacatgcaaggccagcgacctgatccacaactggctggcctggtatcagcagaagcctggcaaggcccctaagctgctgatctacggcgctacctctctggaaacaggcgtgcccagcagattttctggcagcggctctggcaccgacttcaccctgacaatatccagcctccagcctgaggacttcgccacctactactgccagcagtactggaccacacctttcaccttcggccagggcaccaaggtggaaatcaaaagactcgagggacagcctaaggccaatcctaccgtgacactgttccctccaagcagcgaagaactccaggccaacaaggccacacttgtgtgcctgatctccgacttctaccctggggctgtgacagtggcttggaaggccgatggatctcctgtgaaagccggcgtggaaaccaccaagccatccaagcagagcaacaacaaatacgccgccagctcctacctgagcctgacacctgagcagtggaagtcccacagatcctacagctgccaagtgacccacgaaggcagcaccgtggaaaagacagtggcccctacagagtgcagccccatcaagaccgatgtgattacaatggaccccaaggacaactgctccaaggacgccaacgataccctgctgctccagctgaccaacaccagcgcctactacatgtacttgttgctgctgctgaagtccgtggtgtacttcgccatcatcacatgctgcctgctgcggagaaccgccttctgctgcaacggcgagaagtctagggccaagcgatctggatctggagcaacaaacttctcactactcaaacaagcaggtgacgtggaggagaatcccgggcctactagtatggactggatttggcgcatccttttccttgtcggcgctgctaccggcgcgcattccttcgaagaagtgcagctggttgaatcaggtggcggcctggttcaacctggcggatctctgagactgagctgtgccgccagcggctacagcatcaccaatgactacgcctggaactgggtccgacaggcccctggaaaaggactggaatgggtcggatatatcagctactccggctacaccacctacaatcccagcatcaagagccggttcaccatcagcagagacaccagcaagaacaccctgtacctccagatgaactccctgagagccgaggacaccgccgtgtactattgtgccagatggaccagcggcctggactattggggacagggaacactggtcaccgtgtcctctacgcgtgcctctacaaagggaccctccgtgtttcctctggctcccagcagcaagtctacaagcggaggaacagccgctctgggctgcctggtcaaggattactttcccgagcctgtgaccgtgtcctggaatagcggagcactgacaagcggcgtgcacacctttccagccgtgctgcaaagcagcggcctgtactctctgagcagcgtggtcacagtgcctagctctagcctgggcacccagacctacatctgcaatgtgaaccacaagcctagcaacaccaaggtggacaagagagtggaacccaagagctgtgaagtgaaaaccgactccaccgaccacgtgaagcccaaagagacagagaacaccaagcagcccagcaagagctgccacaagcccaaggccatcgtgcacaccgagaaagtgaacatgatgagcctgaccgtgctgggcctgcggatgctgttcgccaaaaccgtggccgtgaacttcctgctgaccgccaagctgttcttcctc

SEQ ID NO: 38746 - DNA, 1863 bp, synthetic construct
  source 1..1863: mol_type = other DNA
atggccttaccagtgaccgccttgctcctgccgctggccttgctgctccacgccgccaggccggacatccagatgacacagagccctagcagcctgtctgccagcgtgggagacagagtgaccatcacatgcaaggccagcgacctgatccacaactggctggcctggtatcagcagaagcctggcaaggcccctaagctgctgatctacggcgctacctctctggaaacaggcgtgcccagcagattttctggcagcggctctggcaccgacttcaccctgacaatatccagcctccagcctgaggacttcgccacctactactgccagcagtactggaccacacctttcaccttcggccagggcaccaaggtggaaatcaaaagactcgagggacagcctaaggccaatcctaccgtgacactgttccctccaagcagcgaagaactccaggccaacaaggccacacttgtgtgcctgatctccgacttctaccctggggctgtgacagtggcttggaaggccgatggatctcctgtgaaagccggcgtggaaaccaccaagccatccaagcagagcaacaacaaatacgccgccagctcctacctgagcctgacacctgagcagtggaagtcccacagatcctacagctgccaagtgacccacgaaggcagcaccgtggaaaagacagtggcccctacagagtgcagcggcagagccgattgcggcatcaccagcgccagctaccaccagggcgtgctgagcgccaccatcctgtacgagatcctgctgggcaaggccaccctgtacgccgtgctggtgtctgccctggtgctgatggctatggtcaagcggaaggacagccggggaagggccaagcgatctggatctggagcaacaaacttctcactactcaaacaagcaggtgacgtggaggagaatcccgggcctactagtatggactggatttggcgcatccttttccttgtcggcgctgctaccggcgcgcattccttcgaagaagtgcagctggttgaatcaggtggcggcctggttcaacctggcggatctctgagactgagctgtgccgccagcggctacagcatcaccaatgactacgcctggaactgggtccgacaggcccctggaaaaggactggaatgggtcggatatatcagctactccggctacaccacctacaatcccagcatcaagagccggttcaccatcagcagagacaccagcaagaacaccctgtacctccagatgaactccctgagagccgaggacaccgccgtgtactattgtgccagatggaccagcggcctggactattggggacagggaacactggtcaccgtgtcctctacgcgtgcctctacaaagggaccctccgtgtttcctctggctcccagcagcaagtctacaagcggaggaacagccgctctgggctgcctggtcaaggattactttcccgagcctgtgaccgtgtcctggaatagcggagcactgacaagcggcgtgcacacctttccagccgtgctgcaaagcagcggcctgtactctctgagcagcgtggtcacagtgcctagctctagcctgggcacccagacctacatctgcaatgtgaaccacaagcctagcaacaccaaggtggacaagagagtggaacccaagagctgtatccccgaggacacattcttcccaagcagcgacgtgccctgcgacgtgaagctggtggaaaagagcttcgagacagacaccaacctgaacttccagaacctgagcgtgatcggcttcagaatcctgctgctgaaagtggccggctttaacctgctgatgaccctgcggctgtggtccagc

SEQ ID NO: 38747 - DNA, 1863 bp, synthetic construct
  source 1..1863: mol_type = other DNA
atggccttaccagtgaccgccttgctcctgccgctggccttgctgctccacgccgccaggccggacatccagatgacacagagccctagcagcctgtctgccagcgtgggagacagagtgaccatcacatgcaaggccagcgacctgatccacaactggctggcctggtatcagcagaagcctggcaaggcccctaagctgctgatctacggcgctacctctctggaaacaggcgtgcccagcagattttctggcagcggctctggcaccgacttcaccctgacaatatccagcctccagcctgaggacttcgccacctactactgccagcagtactggaccacacctttcaccttcggccagggcaccaaggtggaaatcaaaagactcgagggacagcctaaggccaatcctaccgtgacactgttccctccaagcagcgaagaactccaggccaacaaggccacacttgtgtgcctgatctccgacttctaccctggggctgtgacagtggcttggaaggccgatggatctcctgtgaaagccggcgtggaaaccaccaagccatccaagcagagcaacaacaaatacgccgccagctcctacctgagcctgacacctgagcagtggaagtcccacagatcctacagctgccaagtgacccacgaaggcagcaccgtggaaaagacagtggcccctacagagtgcagcggcagagccgattgcggctttaccagcgagagctaccagcagggcgtgctgagcgccaccatcctgtacgagatcctgctgggcaaggccaccctgtacgccgtgctggtgtctgccctggtgctgatggctatggtcaagcggaaggacagccggggaagggccaagcgatctggatctggagcaacaaacttctcactactcaaacaagcaggtgacgtggaggagaatcccgggcctactagtatggactggatttggcgcatccttttccttgtcggcgctgctaccggcgcgcattccttcgaagaagtgcagctggttgaatcaggtggcggcctggttcaacctggcggatctctgagactgagctgtgccgccagcggctacagcatcaccaatgactacgcctggaactgggtccgacaggcccctggaaaaggactggaatgggtcggatatatcagctactccggctacaccacctacaatcccagcatcaagagccggttcaccatcagcagagacaccagcaagaacaccctgtacctccagatgaactccctgagagccgaggacaccgccgtgtactattgtgccagatggaccagcggcctggactattggggacagggaacactggtcaccgtgtcctctacgcgtgcctctacaaagggaccctccgtgtttcctctggctcccagcagcaagtctacaagcggaggaacagccgctctgggctgcctggtcaaggattactttcccgagcctgtgaccgtgtcctggaatagcggagcactgacaagcggcgtgcacacctttccagccgtgctgcaaagcagcggcctgtactctctgagcagcgtggtcacagtgcctagctctagcctgggcacccagacctacatctgcaatgtgaaccacaagcctagcaacaccaaggtggacaagagagtggaacccaagagctgtatccccgaggacacattcttcccaagccccgagagcagctgcgacgtgaagctggtggaaaagagcttcgagacagacaccaacctgaacttccagaacctgagcgtgatcggcttcagaatcctgctgctgaaagtggccggctttaacctgctgatgaccctgcggctgtggtccagc

SEQ ID NO: 38748 - DNA, 1341 bp, synthetic construct
  source 1..1341: mol_type = other DNA
atggccttaccagtgaccgccttgctcctgccgctggccttgctgctccacgccgccaggccggacatccagatgacacagagccctagcagcctgtctgccagcgtgggagacagagtgaccatcacatgcaaggccagcgacctgatccacaactggctggcctggtatcagcagaagcctggcaaggcccctaagctgctgatctacggcgctacctctctggaaacaggcgtgcccagcagattttctggcagcggctctggcaccgacttcaccctgacaatatccagcctccagcctgaggacttcgccacctactactgccagcagtactggaccacacctttcaccttcggccagggcaccaaggtggaaatcaaaagaggcggaggcggaagtggaggcggaggatctggcggcggaggctctgaagtgcagctggttgaatcaggtggcggcctggttcaacctggcggatctctgagactgagctgtgccgccagcggctacagcatcaccaatgactacgcctggaactgggtccgacaggcccctggaaaaggactggaatgggtcggatatatcagctactccggctacaccacctacaatcccagcatcaagagccggttcaccatcagcagagacaccagcaagaacaccctgtacctccagatgaactccctgagagccgaggacaccgccgtgtactattgtgccagatggaccagcggcctggactattggggacagggaacactggtcaccgtgtcctctacgcgtgacggtaacgaggagatgggaggaatcactcaaaccccttacaaagtctcaatttcaggaacaactgttatccttacatgtccccagtatcctggcagcgagatcctttggcagcataacgacaagaatatagggggagatgaagacgataagaatatcggatctgacgaggatcacttgagcctgaaagagttctccgagcttgaacaaagcggatattatgtgtgctatccgcgcgggtcaaagccggaagacgctaacttttacctttatctccgagccagagtgtgcgaaaattgcatggaaatggacgttatgtccgttgctacaatagttatcgtagatatatgcatcacgggtggactgcttctgctggtttattattggtccaagaatagaaaggccaaagctaaacccgtgaccagaggcgctggcgcaggcggaaggcaaaggggacaaaacaaagaacggccaccaccagtgccaaatccagattatgagcctattcggaaaggacagagggacctgtactctggcctgaatcagagaagaatc

SEQ ID NO: 38749 - DNA, 1236 bp, synthetic construct
  source 1..1236: mol_type = other DNA
atggccttaccagtgaccgccttgctcctgccgctggccttgctgctccacgccgccaggccggacatccagatgacacagagccctagcagcctgtctgccagcgtgggagacagagtgaccatcacatgcaaggccagcgacctgatccacaactggctggcctggtatcagcagaagcctggcaaggcccctaagctgctgatctacggcgctacctctctggaaacaggcgtgcccagcagattttctggcagcggctctggcaccgacttcaccctgacaatatccagcctccagcctgaggacttcgccacctactactgccagcagtactggaccacacctttcaccttcggccagggcaccaaggtggaaatcaaaagaggcggaggcggaagtggaggcggaggatctggcggcggaggctctgaagtgcagctggttgaatcaggtggcggcctggttcaacctggcggatctctgagactgagctgtgccgccagcggctacagcatcaccaatgactacgcctggaactgggtccgacaggcccctggaaaaggactggaatgggtcggatatatcagctactccggctacaccacctacaatcccagcatcaagagccggttcaccatcagcagagacaccagcaagaacaccctgtacctccagatgaactccctgagagccgaggacaccgccgtgtactattgtgccagatggaccagcggcctggactattggggacagggaacactggtcaccgtgtcctctacgcgtttcaagatccccatcgaggaactggaagatcgggtgttcgtgaactgcaacacctctatcacctgggtggaaggcaccgtgggaacactgctgagcgacatcaccagactggacctcggcaagcggattctggaccctcggggcatctacagatgcaacggcaccgacatctacaaggacaaagaaagcaccgtgcaggtccactacagaatgtgccagtcctgcgtggaactggaccctgctacagtggccggcatcatcgtgaccgatgtgatcgctactctgctgctggctctgggagtgttctgcttcgccggacacgaaacaggcagactgtctggcgctgccgatacacaggccctgctgagaaacgaccaagtgtatcagcccctgcgcgacagagatgatgcccagtattctcacctcggcggcaactgggctagaaacaag

SEQ ID NO: 38750 - DNA, 1266 bp, synthetic construct
  source 1..1266: mol_type = other DNA
atggccttaccagtgaccgccttgctcctgccgctggccttgctgctccacgccgccaggccggacatccagatgacacagagccctagcagcctgtctgccagcgtgggagacagagtgaccatcacatgcaaggccagcgacctgatccacaactggctggcctggtatcagcagaagcctggcaaggcccctaagctgctgatctacggcgctacctctctggaaacaggcgtgcccagcagattttctggcagcggctctggcaccgacttcaccctgacaatatccagcctccagcctgaggacttcgccacctactactgccagcagtactggaccacacctttcaccttcggccagggcaccaaggtggaaatcaaaagaggcggaggcggaagtggaggcggaggatctggcggcggaggctctgaagtgcagctggttgaatcaggtggcggcctggttcaacctggcggatctctgagactgagctgtgccgccagcggctacagcatcaccaatgactacgcctggaactgggtccgacaggcccctggaaaaggactggaatgggtcggatatatcagctactccggctacaccacctacaatcccagcatcaagagccggttcaccatcagcagagacaccagcaagaacaccctgtacctccagatgaactccctgagagccgaggacaccgccgtgtactattgtgccagatggaccagcggcctggactattggggacagggaacactggtcaccgtgtcctctacgcgtcagagcatcaagggcaaccacctggtcaaggtgtacgactaccaagaggacggcagcgtgctgctgacatgtgatgccgaggccaagaacatcacctggtttaaggacggcaagatgatcggcttcctgaccgaggacaagaagaagtggaacctgggcagcaacgctaaggaccccagaggcatgtatcagtgcaagggcagccagaacaagagcaagcccctccaggtgtactaccggatgtgccagaactgcatcgagctgaacgccgctaccatcagcggctttctgttcgccgagatcgtgtccatcttcgtgctggccgtgggcgtgtactttatcgctggacaggatggcgtgcggcagagcagagcttccgataagcaaaccctgctgcctaacgaccagctgtaccagcctctgaaggacagagaggacgaccagtacagccacctccagggcaatcagctgagaagaaac

SEQ ID NO: 38751 - DNA, 1215 bp, synthetic construct
  source 1..1215: mol_type = other DNA
atggccttaccagtgaccgccttgctcctgccgctggccttgctgctccacgccgccaggccggacatccagatgacacagagccctagcagcctgtctgccagcgtgggagacagagtgaccatcacatgcaaggccagcgacctgatccacaactggctggcctggtatcagcagaagcctggcaaggcccctaagctgctgatctacggcgctacctctctggaaacaggcgtgcccagcagattttctggcagcggctctggcaccgacttcaccctgacaatatccagcctccagcctgaggacttcgccacctactactgccagcagtactggaccacacctttcaccttcggccagggcaccaaggtggaaatcaaaagaggcggaggcggaagtggaggcggaggatctggcggcggaggctctgaagtgcagctggttgaatcaggtggcggcctggttcaacctggcggatctctgagactgagctgtgccgccagcggctacagcatcaccaatgactacgcctggaactgggtccgacaggcccctggaaaaggactggaatgggtcggatatatcagctactccggctacaccacctacaatcccagcatcaagagccggttcaccatcagcagagacaccagcaagaacaccctgtacctccagatgaactccctgagagccgaggacaccgccgtgtactattgtgccagatggaccagcggcctggactattggggacagggaacactggtcaccgtgtcctctacgcgtcagagttttgggttgttggaccctaaattgtgctatctgttggacggaatcctgttcatttacggagtgatcctgaccgcattgttcctgcgggttaagttttccagatccgcagacgcacccgcttaccaacaagggcagaaccaactctacaatgaacttaatttggggcggagggaagagtacgacgttctggacaaaaggaggggacgagatcccgagatgggcggaaagcctcagcgaaggaagaatccgcaagaggggctttataacgaactccagaaagataaaatggcagaagcctatagtgagattgggatgaagggagaaaggaggaggggtaaaggtcacgatgggttgtaccaaggattgagcacagccactaaagatacctatgatgcgctccacatgcaggccctgccgccaaga

SEQ ID NO: 38752 - DNA, 1500 bp, synthetic construct
  source 1..1500: mol_type = other DNA
atggccttaccagtgaccgccttgctcctgccgctggccttgctgctccacgccgccaggccggacatccagatgacacagagccctagcagcctgtctgccagcgtgggagacagagtgaccatcacatgcaaggccagcgacctgatccacaactggctggcctggtatcagcagaagcctggcaaggcccctaagctgctgatctacggcgctacctctctggaaacaggcgtgcccagcagattttctggcagcggctctggcaccgacttcaccctgacaatatccagcctccagcctgaggacttcgccacctactactgccagcagtactggaccacacctttcaccttcggccagggcaccaaggtggaaatcaaaagaggcggaggcggaagtggaggcggaggatctggcggcggaggctctgaagtgcagctggttgaatcaggtggcggcctggttcaacctggcggatctctgagactgagctgtgccgccagcggctacagcatcaccaatgactacgcctggaactgggtccgacaggcccctggaaaaggactggaatgggtcggatatatcagctactccggctacaccacctacaatcccagcatcaagagccggttcaccatcagcagagacaccagcaagaacaccctgtacctccagatgaactccctgagagccgaggacaccgccgtgtactattgtgccagatggaccagcggcctggactattggggacagggaacactggtcaccgtgtcctctacgcgtggaatgaggactgaggatcttcccaaagctgtcgtctttctcgaaccccaatggtatcgggtgctcgaaaaagactctgtgacactgaaatgccaaggggcctactctcccgaggacaactccacacagtggtttcataatgagtccctcatcagctctcaggccagctcttatttcattgatgccgctacagtggacgactccggcgagtatcggtgtcagaccaatctgtctacactgtctgaccccgtgcagcttgaggtccacattggatggttgctcttgcaagccccacgctgggttttcaaagaggaagatccaatccatctgcggtgccacagctggaaaaacaccgctctccacaaagtcacatacctgcaaaatggcaaaggacgcaaatacttccatcacaattccgatttttacattccgaaggctaccctgaaagacagcggcagctatttctgccggggactcgtcggctccaagaatgtgtcctccgaaaccgtgaatatcacgattacccaaggactggctgtgcctacaatctctagcttctttccgcctggataccaagtctccttctgtcttgtgatggtcctcctgtttgctgtggacacaggactgtacttttccgtgaaaacgaacatccgcagctccacacgcgattggaaagatcacaagtttaaatggcgcaaagatccccaggacaag

SEQ ID NO: 38753 - DNA, 1425 bp, synthetic construct
  source 1..1425: mol_type = other DNA
atggccttaccagtgaccgccttgctcctgccgctggccttgctgctccacgccgccaggccggacatccagatgacacagagccctagcagcctgtctgccagcgtgggagacagagtgaccatcacatgcaaggccagcgacctgatccacaactggctggcctggtatcagcagaagcctggcaaggcccctaagctgctgatctacggcgctacctctctggaaacaggcgtgcccagcagattttctggcagcggctctggcaccgacttcaccctgacaatatccagcctccagcctgaggacttcgccacctactactgccagcagtactggaccacacctttcaccttcggccagggcaccaaggtggaaatcaaaagaggcggaggcggaagtggaggcggaggatctggcggcggaggctctgaagtgcagctggttgaatcaggtggcggcctggttcaacctggcggatctctgagactgagctgtgccgccagcggctacagcatcaccaatgactacgcctggaactgggtccgacaggcccctggaaaaggactggaatgggtcggatatatcagctactccggctacaccacctacaatcccagcatcaagagccggttcaccatcagcagagacaccagcaagaacaccctgtacctccagatgaactccctgagagccgaggacaccgccgtgtactattgtgccagatggaccagcggcctggactattggggacagggaacactggtcaccgtgtcctctacgcgtggaatgaggactgaggatcttcccaaagctgtcgtctttctcgaaccccaatggtatcgggtgctcgaaaaagactctgtgacactgaaatgccaaggggcctactctcccgaggacaactccacacagtggtttcataatgagtccctcatcagctctcaggccagctcttatttcattgatgccgctacagtggacgactccggcgagtatcggtgtcagaccaatctgtctacactgtctgaccccgtgcagcttgaggtccacattggatggttgctcttgcaagccccacgctgggttttcaaagaggaagatccaatccatctgcggtgccacagctggaaaaacaccgctctccacaaagtcacatacctgcaaaatggcaaaggacgcaaatacttccatcacaattccgatttttacattccgaaggctaccctgaaagacagcggcagctatttctgccggggactcgtcggctccaagaatgtgtcctccgaaaccgtgaatatcacgattacccaaggactggctgtgcctacaatctctagcttctttccgcctggataccaagtctccttctgtcttgtgatggtcctcctgtttgctgtggacacaggactgtacttttccgtg

SEQ ID NO: 38754 - DNA, 1428 bp, synthetic construct
  source 1..1428: mol_type = other DNA
atggccttaccagtgaccgccttgctcctgccgctggccttgctgctccacgccgccaggccggacatccagatgacacagagccctagcagcctgtctgccagcgtgggagacagagtgaccatcacatgcaaggccagcgacctgatccacaactggctggcctggtatcagcagaagcctggcaaggcccctaagctgctgatctacggcgctacctctctggaaacaggcgtgcccagcagattttctggcagcggctctggcaccgacttcaccctgacaatatccagcctccagcctgaggacttcgccacctactactgccagcagtactggaccacacctttcaccttcggccagggcaccaaggtggaaatcaaaagaggcggaggcggaagtggaggcggaggatctggcggcggaggctctgaagtgcagctggttgaatcaggtggcggcctggttcaacctggcggatctctgagactgagctgtgccgccagcggctacagcatcaccaatgactacgcctggaactgggtccgacaggcccctggaaaaggactggaatgggtcggatatatcagctactccggctacaccacctacaatcccagcatcaagagccggttcaccatcagcagagacaccagcaagaacaccctgtacctccagatgaactccctgagagccgaggacaccgccgtgtactattgtgccagatggaccagcggcctggactattggggacagggaacactggtcaccgtgtcctctacgcgtggaatgaggactgaggatcttcccaaagctgtcgtctttctcgaaccccaatggtatcgggtgctcgaaaaagactctgtgacactgaaatgccaaggggcctactctcccgaggacaactccacacagtggtttcataatgagtccctcatcagctctcaggccagctcttatttcattgatgccgctacagtggacgactccggcgagtatcggtgtcagaccaatctgtctacactgtctgaccccgtgcagcttgaggtccacattggatggttgctcttgcaagccccacgctgggttttcaaagaggaagatccaatccatctgcggtgccacagctggaaaaacaccgctctccacaaagtcacatacctgcaaaatggcaaaggacgcaaatacttccatcacaattccgatttttacattccgaaggctaccctgaaagacagcggcagctatttctgccggggactcgtcggctccaagaatgtgtcctccgaaaccgtgaatatcacgattacccaaggactggctgtgcctacaatctctagcttctttccgcctggataccaagtctccttctgtcttgtgatggtcctcctgtttgctgtggacacaggactgtacttttccgtgaaa

SEQ ID NO: 38755 - DNA, 2160 bp, synthetic construct
  source 1..2160: mol_type = other DNA
atggccttaccagtgaccgccttgctcctgccgctggccttgctgctccacgccgccaggccggacatccagatgacacagagccctagcagcctgtctgccagcgtgggagacagagtgaccatcacatgcaaggccagcgacctgatccacaactggctggcctggtatcagcagaagcctggcaaggcccctaagctgctgatctacggcgctacctctctggaaacaggcgtgcccagcagattttctggcagcggctctggcaccgacttcaccctgacaatatccagcctccagcctgaggacttcgccacctactactgccagcagtactggaccacacctttcaccttcggccagggcaccaaggtggaaatcaaaagactcgagggacagcctaaggccaatcctaccgtgacactgttccctccaagcagcgaagaactccaggccaacaaggccacacttgtgtgcctgatctccgacttctaccctggggctgtgacagtggcttggaaggccgatggatctcctgtgaaagccggcgtggaaaccaccaagccatccaagcagagcaacaacaaatacgccgccagctcctacctgagcctgacacctgagcagtggaagtcccacagatcctacagctgccaagtgacccacgaaggcagcaccgtggaaaagacagtggcccctacagagtgcagcggatcccagagcttcggcctgctggaccccaagctgtgctacctgctggatggcatcctgttcatctacggcgtgatcctgaccgccctgttcctgagagtgaagttcagcagaagcgccgacgcccctgcctaccagcagggacagaaccaactgtacaacgagctgaacctgggcagacgggaagagtacgacgtgctggacaagcggagaggcagggaccctgagatgggcggaaagccccagcggagaaagaacccccaggaaggactgtataacgaactccagaaagacaagatggccgaagcctacagcgagatcggcatgaagggcgagcggagaagaggcaagggccacgatggcctgtaccagggcctgagcaccgccaccaaggacacctatgacgccctgcacatgcaggccctgcctccaagaagggccaagcgatctggatctggagcaacaaacttctcactactcaaacaagcaggtgacgtggaggagaatcccgggcctactagtatggactggatttggcgcatccttttccttgtcggcgctgctaccggcgcgcattccttcgaagaagtgcagctggttgaatcaggtggcggcctggttcaacctggcggatctctgagactgagctgtgccgccagcggctacagcatcaccaatgactacgcctggaactgggtccgacaggcccctggaaaaggactggaatgggtcggatatatcagctactccggctacaccacctacaatcccagcatcaagagccggttcaccatcagcagagacaccagcaagaacaccctgtacctccagatgaactccctgagagccgaggacaccgccgtgtactattgtgccagatggaccagcggcctggactattggggacagggaacactggtcaccgtgtcctctacgcgtgcctctacaaagggaccctccgtgtttcctctggctcccagcagcaagtctacaagcggaggaacagccgctctgggctgcctggtcaaggattactttcccgagcctgtgaccgtgtcctggaatagcggagcactgacaagcggcgtgcacacctttccagccgtgctgcaaagcagcggcctgtactctctgagcagcgtggtcacagtgcctagctctagcctgggcacccagacctacatctgcaatgtgaaccacaagcctagcaacaccaaggtggacaagagagtggaacccaagagctgtggtaccatcactcaaggtttggcagtgtcaaccatctcatcattctttccacctggctaccaagtgtccttctgcctggtcatggtgctgctgttcgccgtggataccggcctgtacttcagcgtcaagaccaacatccggtccagcaccagagactggaaggaccacaagttcaagtggcggaaggaccctcaggacaag

SEQ ID NO: 38756 - DNA, 2205 bp, synthetic construct
  source 1..2205: mol_type = other DNA
atggccttaccagtgaccgccttgctcctgccgctggccttgctgctccacgccgccaggccggacatccagatgacacagagccctagcagcctgtctgccagcgtgggagacagagtgaccatcacatgcaaggccagcgacctgatccacaactggctggcctggtatcagcagaagcctggcaaggcccctaagctgctgatctacggcgctacctctctggaaacaggcgtgcccagcagattttctggcagcggctctggcaccgacttcaccctgacaatatccagcctccagcctgaggacttcgccacctactactgccagcagtactggaccacacctttcaccttcggccagggcaccaaggtggaaatcaaaagactcgaggacctgaagaacgtgttcccacctgaggtggccgtgttcgagcctagcgaggccgagatcagccacacccagaaagccaccctcgtgtgcctggctaccggcttctaccccgaccatgtggaactgtcttggtgggtcaacggcaaagaggtgcacagcggcgtgtctaccgacccccagccactgaaagaacagcccgccctgaacgacagccggtactgcctgagcagcagactgagagtgtccgccaccttctggcagaacccccggaaccacttcagatgccaggtgcagttctacggcctgagcgagaacgacgagtggacccaggacagagccaagcccgtgacccagatcgtgtctgccgaagcctggggcagagccgattgcggatcccagagcttcggcctgctggaccccaagctgtgctacctgctggatggcatcctgttcatctacggcgtgatcctgaccgccctgttcctgagagtgaagttcagcagaagcgccgacgcccctgcctaccagcagggacagaaccaactgtacaacgagctgaacctgggcagacgggaagagtacgacgtgctggacaagcggagaggcagggaccctgagatgggcggaaagccccagcggagaaagaacccccaggaaggactgtataacgaactccagaaagacaagatggccgaagcctacagcgagatcggcatgaagggcgagcggagaagaggcaagggccacgatggcctgtaccagggcctgagcaccgccaccaaggacacctatgacgccctgcacatgcaggccctgcctccaagaagggccaagcgatctggatctggagcaacaaacttctcactactcaaacaagcaggtgacgtggaggagaatcccgggcctactagtatggactggatttggcgcatccttttccttgtcggcgctgctaccggcgcgcattccttcgaagaagtgcagctggttgaatcaggtggcggcctggttcaacctggcggatctctgagactgagctgtgccgccagcggctacagcatcaccaatgactacgcctggaactgggtccgacaggcccctggaaaaggactggaatgggtcggatatatcagctactccggctacaccacctacaatcccagcatcaagagccggttcaccatcagcagagacaccagcaagaacaccctgtacctccagatgaactccctgagagccgaggacaccgccgtgtactattgtgccagatggaccagcggcctggactattggggacagggaacactggtcaccgtgtcctctacgcgtatccagaaccctgatcctgccgtgtaccagctgcgggatagcaagagcagcgacaagagcgtgtgtctgttcaccgacttcgacagccagaccaacgtgtcccagagcaaggactccgacgtgtacatcaccgataagaccgtgctggacatgcggagcatggacttcaagagcaactccgccgtggcctggtccaacaagtccgatttcgcctgcgccaacgccttcaacaacagcattatccccgaggacacattcttcccaagccccgagagcagctgcggtaccatcactcaaggtttggcagtgtcaaccatctcatcattctttccacctggctaccaagtgtccttctgcctggtcatggtgctgctgttcgccgtggataccggcctgtacttcagcgtcaagaccaacatccggtccagcaccagagactggaaggaccacaagttcaagtggcggaaggaccctcaggacaag

SEQ ID NO: 38757 - DNA, 2130 bp, synthetic construct
  source 1..2130: mol_type = other DNA
atggccttaccagtgaccgccttgctcctgccgctggccttgctgctccacgccgccaggccggacatccagatgacacagagccctagcagcctgtctgccagcgtgggagacagagtgaccatcacatgcaaggccagcgacctgatccacaactggctggcctggtatcagcagaagcctggcaaggcccctaagctgctgatctacggcgctacctctctggaaacaggcgtgcccagcagattttctggcagcggctctggcaccgacttcaccctgacaatatccagcctccagcctgaggacttcgccacctactactgccagcagtactggaccacacctttcaccttcggccagggcaccaaggtggaaatcaaaagactcgaggacctgaagaacgtgttcccacctgaggtggccgtgttcgagcctagcgaggccgagatcagccacacccagaaagccaccctcgtgtgcctggctaccggcttctaccccgaccatgtggaactgtcttggtgggtcaacggcaaagaggtgcacagcggcgtgtctaccgacccccagccactgaaagaacagcccgccctgaacgacagccggtactgcctgagcagcagactgagagtgtccgccaccttctggcagaacccccggaaccacttcagatgccaggtgcagttctacggcctgagcgagaacgacgagtggacccaggacagagccaagcccgtgacccagatcgtgtctgccgaagcctggggcagagccgattgcggatcccagagcttcggcctgctggaccccaagctgtgctacctgctggatggcatcctgttcatctacggcgtgatcctgaccgccctgttcctgagagtgaagttcagcagaagcgccgacgcccctgcctaccagcagggacagaaccaactgtacaacgagctgaacctgggcagacgggaagagtacgacgtgctggacaagcggagaggcagggaccctgagatgggcggaaagccccagcggagaaagaacccccaggaaggactgtataacgaactccagaaagacaagatggccgaagcctacagcgagatcggcatgaagggcgagcggagaagaggcaagggccacgatggcctgtaccagggcctgagcaccgccaccaaggacacctatgacgccctgcacatgcaggccctgcctccaagaagggccaagcgatctggatctggagcaacaaacttctcactactcaaacaagcaggtgacgtggaggagaatcccgggcctactagtatggactggatttggcgcatccttttccttgtcggcgctgctaccggcgcgcattccttcgaagaagtgcagctggttgaatcaggtggcggcctggttcaacctggcggatctctgagactgagctgtgccgccagcggctacagcatcaccaatgactacgcctggaactgggtccgacaggcccctggaaaaggactggaatgggtcggatatatcagctactccggctacaccacctacaatcccagcatcaagagccggttcaccatcagcagagacaccagcaagaacaccctgtacctccagatgaactccctgagagccgaggacaccgccgtgtactattgtgccagatggaccagcggcctggactattggggacagggaacactggtcaccgtgtcctctacgcgtatccagaaccctgatcctgccgtgtaccagctgcgggatagcaagagcagcgacaagagcgtgtgtctgttcaccgacttcgacagccagaccaacgtgtcccagagcaaggactccgacgtgtacatcaccgataagaccgtgctggacatgcggagcatggacttcaagagcaactccgccgtggcctggtccaacaagtccgatttcgcctgcgccaacgccttcaacaacagcattatccccgaggacacattcttcccaagccccgagagcagctgcggtaccatcactcaaggtttggcagtgtcaaccatctcatcattctttccacctggctaccaagtgtccttctgcctggtcatggtgctgctgttcgccgtggataccggcctgtacttcagcgtc

SEQ ID NO: 38758 - DNA, 2133 bp, synthetic construct
  source 1..2133: mol_type = other DNA
atggccttaccagtgaccgccttgctcctgccgctggccttgctgctccacgccgccaggccggacatccagatgacacagagccctagcagcctgtctgccagcgtgggagacagagtgaccatcacatgcaaggccagcgacctgatccacaactggctggcctggtatcagcagaagcctggcaaggcccctaagctgctgatctacggcgctacctctctggaaacaggcgtgcccagcagattttctggcagcggctctggcaccgacttcaccctgacaatatccagcctccagcctgaggacttcgccacctactactgccagcagtactggaccacacctttcaccttcggccagggcaccaaggtggaaatcaaaagactcgaggacctgaagaacgtgttcccacctgaggtggccgtgttcgagcctagcgaggccgagatcagccacacccagaaagccaccctcgtgtgcctggctaccggcttctaccccgaccatgtggaactgtcttggtgggtcaacggcaaagaggtgcacagcggcgtgtctaccgacccccagccactgaaagaacagcccgccctgaacgacagccggtactgcctgagcagcagactgagagtgtccgccaccttctggcagaacccccggaaccacttcagatgccaggtgcagttctacggcctgagcgagaacgacgagtggacccaggacagagccaagcccgtgacccagatcgtgtctgccgaagcctggggcagagccgattgcggatcccagagcttcggcctgctggaccccaagctgtgctacctgctggatggcatcctgttcatctacggcgtgatcctgaccgccctgttcctgagagtgaagttcagcagaagcgccgacgcccctgcctaccagcagggacagaaccaactgtacaacgagctgaacctgggcagacgggaagagtacgacgtgctggacaagcggagaggcagggaccctgagatgggcggaaagccccagcggagaaagaacccccaggaaggactgtataacgaactccagaaagacaagatggccgaagcctacagcgagatcggcatgaagggcgagcggagaagaggcaagggccacgatggcctgtaccagggcctgagcaccgccaccaaggacacctatgacgccctgcacatgcaggccctgcctccaagaagggccaagcgatctggatctggagcaacaaacttctcactactcaaacaagcaggtgacgtggaggagaatcccgggcctactagtatggactggatttggcgcatccttttccttgtcggcgctgctaccggcgcgcattccttcgaagaagtgcagctggttgaatcaggtggcggcctggttcaacctggcggatctctgagactgagctgtgccgccagcggctacagcatcaccaatgactacgcctggaactgggtccgacaggcccctggaaaaggactggaatgggtcggatatatcagctactccggctacaccacctacaatcccagcatcaagagccggttcaccatcagcagagacaccagcaagaacaccctgtacctccagatgaactccctgagagccgaggacaccgccgtgtactattgtgccagatggaccagcggcctggactattggggacagggaacactggtcaccgtgtcctctacgcgtatccagaaccctgatcctgccgtgtaccagctgcgggatagcaagagcagcgacaagagcgtgtgtctgttcaccgacttcgacagccagaccaacgtgtcccagagcaaggactccgacgtgtacatcaccgataagaccgtgctggacatgcggagcatggacttcaagagcaactccgccgtggcctggtccaacaagtccgatttcgcctgcgccaacgccttcaacaacagcattatccccgaggacacattcttcccaagccccgagagcagctgcggtaccatcactcaaggtttggcagtgtcaaccatctcatcattctttccacctggctaccaagtgtccttctgcctggtcatggtgctgctgttcgccgtggataccggcctgtacttcagcgtcaag

SEQ ID NO: 38759 - DNA, 2136 bp, synthetic construct
  source 1..2136: mol_type = other DNA
atggccttaccagtgaccgccttgctcctgccgctggccttgctgctccacgccgccaggccggacatccagatgacacagagccctagcagcctgtctgccagcgtgggagacagagtgaccatcacatgcaaggccagcgacctgatccacaactggctggcctggtatcagcagaagcctggcaaggcccctaagctgctgatctacggcgctacctctctggaaacaggcgtgcccagcagattttctggcagcggctctggcaccgacttcaccctgacaatatccagcctccagcctgaggacttcgccacctactactgccagcagtactggaccacacctttcaccttcggccagggcaccaaggtggaaatcaaaagactcgaggacctgaagaacgtgttcccacctgaggtggccgtgttcgagcctagcgaggccgagatcagccacacccagaaagccaccctcgtgtgcctggctaccggcttctaccccgaccatgtggaactgtcttggtgggtcaacggcaaagaggtgcacagcggcgtgtctaccgacccccagccactgaaagaacagcccgccctgaacgacagccggtactgcctgagcagcagactgagagtgtccgccaccttctggcagaacccccggaaccacttcagatgccaggtgcagttctacggcctgagcgagaacgacgagtggacccaggacagagccaagcccgtgacccagatcgtgtctgccgaagcctggggcagagccgattgcggatcccagagcttcggcctgctggaccccaagctgtgctacctgctggatggcatcctgttcatctacggcgtgatcctgaccgccctgttcctgagagtgaagttcagcagaagcgccgacgcccctgcctaccagcagggacagaaccaactgtacaacgagctgaacctgggcagacgggaagagtacgacgtgctggacaagcggagaggcagggaccctgagatgggcggaaagccccagcggagaaagaacccccaggaaggactgtataacgaactccagaaagacaagatggccgaagcctacagcgagatcggcatgaagggcgagcggagaagaggcaagggccacgatggcctgtaccagggcctgagcaccgccaccaaggacacctatgacgccctgcacatgcaggccctgcctccaagaagggccaagcgatctggatctggagcaacaaacttctcactactcaaacaagcaggtgacgtggaggagaatcccgggcctactagtatggactggatttggcgcatccttttccttgtcggcgctgctaccggcgcgcattccttcgaagaagtgcagctggttgaatcaggtggcggcctggttcaacctggcggatctctgagactgagctgtgccgccagcggctacagcatcaccaatgactacgcctggaactgggtccgacaggcccctggaaaaggactggaatgggtcggatatatcagctactccggctacaccacctacaatcccagcatcaagagccggttcaccatcagcagagacaccagcaagaacaccctgtacctccagatgaactccctgagagccgaggacaccgccgtgtactattgtgccagatggaccagcggcctggactattggggacagggaacactggtcaccgtgtcctctacgcgtatccagaaccctgatcctgccgtgtaccagctgcgggatagcaagagcagcgacaagagcgtgtgtctgttcaccgacttcgacagccagaccaacgtgtcccagagcaaggactccgacgtgtacatcaccgataagaccgtgctggacatgcggagcatggacttcaagagcaactccgccgtggcctggtccaacaagtccgatttcgcctgcgccaacgccttcaacaacagcattatccccgaggacacattcttcccaagccccgagagcagctgcggtaccatcactcaaggtttggcagtgtcaaccatctcatcattctttccacctggctaccaagtgtccttctgcctggtcatggtgctgctgttcgccgtggataccggcctgtacttcagcgtcaagacc

SEQ ID NO: 38760 - DNA, 1947 bp, synthetic construct
  source 1..1947: mol_type = other DNA
atggccttaccagtgaccgccttgctcctgccgctggccttgctgctccacgccgccaggccggacatccagatgacacagagccctagcagcctgtctgccagcgtgggagacagagtgaccatcacatgcaaggccagcgacctgatccacaactggctggcctggtatcagcagaagcctggcaaggcccctaagctgctgatctacggcgctacctctctggaaacaggcgtgcccagcagattttctggcagcggctctggcaccgacttcaccctgacaatatccagcctccagcctgaggacttcgccacctactactgccagcagtactggaccacacctttcaccttcggccagggcaccaaggtggaaatcaaaagactcgagggacagcctaaggccaatcctaccgtgacactgttccctccaagcagcgaagaactccaggccaacaaggccacacttgtgtgcctgatctccgacttctaccctggggctgtgacagtggcttggaaggccgatggatctcctgtgaaagccggcgtggaaaccaccaagccatccaagcagagcaacaacaaatacgccgccagctcctacctgagcctgacacctgagcagtggaagtcccacagatcctacagctgccaagtgacccacgaaggcagcaccgtggaaaagacagtggcccctacagagtgcagcggatccctgggagagcctcagctgtgctatatcctggacgccatcctgtttctgtacggcatcgtgctgaccctgctgtactgccggctgaagatccaagtgcggaaggccgccatcaccagctacgagaaatccgacggcgtgtacaccggcctgagcaccagaaatcaagagacatacgagacactgaagcacgaaaagcctccacaaagggccaagcgatctggatctggagcaacaaacttctcactactcaaacaagcaggtgacgtggaggagaatcccgggcctactagtatggactggatttggcgcatccttttccttgtcggcgctgctaccggcgcgcattccttcgaagaagtgcagctggttgaatcaggtggcggcctggttcaacctggcggatctctgagactgagctgtgccgccagcggctacagcatcaccaatgactacgcctggaactgggtccgacaggcccctggaaaaggactggaatgggtcggatatatcagctactccggctacaccacctacaatcccagcatcaagagccggttcaccatcagcagagacaccagcaagaacaccctgtacctccagatgaactccctgagagccgaggacaccgccgtgtactattgtgccagatggaccagcggcctggactattggggacagggaacactggtcaccgtgtcctctacgcgtgcctctacaaagggaccctccgtgtttcctctggctcccagcagcaagtctacaagcggaggaacagccgctctgggctgcctggtcaaggattactttcccgagcctgtgaccgtgtcctggaatagcggagcactgacaagcggcgtgcacacctttccagccgtgctgcaaagcagcggcctgtactctctgagcagcgtggtcacagtgcctagctctagcctgggcacccagacctacatctgcaatgtgaaccacaagcctagcaacaccaaggtggacaagagagtggaacccaagagctgtggtaccctcggagaaccacagctctgttacattctggatgctatcctgttcctctatgggatcgtcctgacactcctgtattgcagactcaaaattcaagttcgcaaagccgccattacctcttacgagaagagtgatggggtgtacacaggactgtctacccggaatcaagaaacctacgaaaccctcaaacatgagaagccacctcagtaa

SEQ ID NO: 38761 - DNA, 1854 bp, synthetic construct
  source 1..1854: mol_type = other DNA
atggccttaccagtgaccgccttgctcctgccgctggccttgctgctccacgccgccaggccggacatccagatgacacagagccctagcagcctgtctgccagcgtgggagacagagtgaccatcacatgcaaggccagcgacctgatccacaactggctggcctggtatcagcagaagcctggcaaggcccctaagctgctgatctacggcgctacctctctggaaacaggcgtgcccagcagattttctggcagcggctctggcaccgacttcaccctgacaatatccagcctccagcctgaggacttcgccacctactactgccagcagtactggaccacacctttcaccttcggccagggcaccaaggtggaaatcaaaagactcgaggacctgaagaacgtgttcccacctgaggtggccgtgttcgagcctagcgaggccgagatcagccacacccagaaagccaccctcgtgtgcctggctaccggcttctaccccgaccatgtggaactgtcttggtgggtcaacggcaaagaggtgcacagcggcgtgtgtaccgacccccagccactgaaagaacagcccgccctgaacgacagccggtactgcctgagcagcagactgagagtgtccgccaccttctggcagaacccccggaaccacttcagatgccaggtgcagttctacggcctgagcgagaacgacgagtggacccaggacagagccaagcccgtgacccagatcgtgtctgccgaagcctggggcagagccgattgcggctttaccagcgagagctaccagcagggcgtgctgagcgcctactacatgtacttgttgctgctgctgaagtccgtggtgtacttcgccatcatcacatgctgcctgctgcggagaaccgccttctgctgcaacggcgagaagtctagggccaagcgatctggatctggagcaacaaacttctcactactcaaacaagcaggtgacgtggaggagaatcccgggcctactagtatggactggatttggcgcatccttttccttgtcggcgctgctaccggcgcgcattccttcgaagaagtgcagctggttgaatcaggtggcggcctggttcaacctggcggatctctgagactgagctgtgccgccagcggctacagcatcaccaatgactacgcctggaactgggtccgacaggcccctggaaaaggactggaatgggtcggatatatcagctactccggctacaccacctacaatcccagcatcaagagccggttcaccatcagcagagacaccagcaagaacaccctgtacctccagatgaactccctgagagccgaggacaccgccgtgtactattgtgccagatggaccagcggcctggactattggggacagggaacactggtcaccgtgtcctctacgcgtatccagaaccctgatcctgccgtgtaccagctgcgggatagcaagagcagcgacaagagcgtgtgtctgttcaccgacttcgacagccagaccaacgtgtcccagagcaaggactccgacgtgtacatcaccgataagtgcgtgctggacatgcggagcatggacttcaagagcaactccgccgtggcctggtccaacaagtccgatttcgcctgcgccaacgccttcaacaacagcattatccccgaggacacattcttcccaagccccgagagcagctgcgacgtgaagctggtggaaaagagcttcgagacagacaccaacctgaacttccagaacctgagcgtgatcggcttcagaatcctgctgctgaaagtggccggctttaacctgctgatgaccctgcggctgtggtccagc

SEQ ID NO: 38762 - DNA, 1875 bp, synthetic construct
  source 1..1875: mol_type = other DNA
atggccttaccagtgaccgccttgctcctgccgctggccttgctgctccacgccgccaggccggacatccagatgacacagagccctagcagcctgtctgccagcgtgggagacagagtgaccatcacatgcaaggccagcgacctgatccacaactggctggcctggtatcagcagaagcctggcaaggcccctaagctgctgatctacggcgctacctctctggaaacaggcgtgcccagcagattttctggcagcggctctggcaccgacttcaccctgacaatatccagcctccagcctgaggacttcgccacctactactgccagcagtactggaccacacctttcaccttcggccagggcaccaaggtggaaatcaaaagactcgaggacaagcagctggacgccgacgtgtcccccaagcctaccatcttcctgccctctatcgccgagacaaagctccagaaggccggcacctacctgtgcctgctggaaaagttcttcccagatgtgattaagatccactggcaggaaaagaagtccaacaccatcctgggcagccaggaaggcaacaccatgaagaccaacgacacctacatgaagttcagctggctgaccgtgcccgagaagtccctggacaaagaacacagatgcatcgtgcggcacgaaaacaacaagaacggcgtggaccaggaaatcatcttcccacccatcaagaccgatgtgattacaatggaccccaaggacaactgctccaaggacgccaacgataccctgctgctccagctgaccaacaccagcgcctactacatgtacgagatcctgctgggcaaggccaccctgtacgccgtgctggtgtctgccctggtgctgatggctatggtcaagcggaaggacagccggggaagggccaagcgatctggatctggagcaacaaacttctcactactcaaacaagcaggtgacgtggaggagaatcccgggcctactagtatggactggatttggcgcatccttttccttgtcggcgctgctaccggcgcgcattccttcgaagaagtgcagctggttgaatcaggtggcggcctggttcaacctggcggatctctgagactgagctgtgccgccagcggctacagcatcaccaatgactacgcctggaactgggtccgacaggcccctggaaaaggactggaatgggtcggatatatcagctactccggctacaccacctacaatcccagcatcaagagccggttcaccatcagcagagacaccagcaagaacaccctgtacctccagatgaactccctgagagccgaggacaccgccgtgtactattgtgccagatggaccagcggcctggactattggggacagggaacactggtcaccgtgtcctctacgcgtagccagcctcacaccaagcccagcgtgttcgtgatgaagaacggcaccaacgtggcctgcctcgtgaaagagttctaccccaaggacatcaggatcaacctggtgtccagcaagaagatcaccgagttcgaccccgccatcgtgatctcccccagcggcaagtacaacgccgtgaagctggggaagtatgaggacagcaacagcgtgacctgctccgtgcagcacgacaacaagaccgtgcacagcaccgactttgaagtgaaaaccgactccaccgaccacgtgaagcccaaagagacagagaacaccaagcagcccagcaagagctgccacaagcccaaggccatcgtgcacaccgagaaagtgaacatgatgagcctgaccgtgatcggcttcagaatcctgctgctgaaagtggccggctttaacctgctgatgaccctgcggctgtggtccagctaa

SEQ ID NO: 38763 - DNA, 1875 bp, synthetic construct
  source 1..1875: mol_type = other DNA
atggccttaccagtgaccgccttgctcctgccgctggccttgctgctccacgccgccaggccggacatccagatgacacagagccctagcagcctgtctgccagcgtgggagacagagtgaccatcacatgcaaggccagcgacctgatccacaactggctggcctggtatcagcagaagcctggcaaggcccctaagctgctgatctacggcgctacctctctggaaacaggcgtgcccagcagattttctggcagcggctctggcaccgacttcaccctgacaatatccagcctccagcctgaggacttcgccacctactactgccagcagtactggaccacacctttcaccttcggccagggcaccaaggtggaaatcaaaagactcgaggacaagcagctggacgccgacgtgtcccccaagcctaccatcttcctgccctctatcgccgagacaaagctccagaaggccggcacctacctgtgcctgctggaaaagttcttcccagatgtgattaagatccactggcaggaaaagaagtccaacaccatcctgggcagccaggaaggcaacaccatgaagaccaacgacacctacatgaagttcagctggctgaccgtgcccgagaagtccctggacaaagaacacagatgcatcgtgcggcacgaaaacaacaagaacggcgtggaccaggaaatcatcttcccacccatcaagaccgatgtgattacaatggaccccaaggacaactgctccaaggacgccaacgataccctgctgctccagctgaccaacaccagcgccaccatcctgtacgagatcctgctgggcaaggccaccctgtacgccgtgctggtgtctgccctggtgctgatggctatggtcaagcggaaggacagccggggaagggccaagcgatctggatctggagcaacaaacttctcactactcaaacaagcaggtgacgtggaggagaatcccgggcctactagtatggactggatttggcgcatccttttccttgtcggcgctgctaccggcgcgcattccttcgaagaagtgcagctggttgaatcaggtggcggcctggttcaacctggcggatctctgagactgagctgtgccgccagcggctacagcatcaccaatgactacgcctggaactgggtccgacaggcccctggaaaaggactggaatgggtcggatatatcagctactccggctacaccacctacaatcccagcatcaagagccggttcaccatcagcagagacaccagcaagaacaccctgtacctccagatgaactccctgagagccgaggacaccgccgtgtactattgtgccagatggaccagcggcctggactattggggacagggaacactggtcaccgtgtcctctacgcgtagccagcctcacaccaagcccagcgtgttcgtgatgaagaacggcaccaacgtggcctgcctcgtgaaagagttctaccccaaggacatcaggatcaacctggtgtccagcaagaagatcaccgagttcgaccccgccatcgtgatctcccccagcggcaagtacaacgccgtgaagctggggaagtatgaggacagcaacagcgtgacctgctccgtgcagcacgacaacaagaccgtgcacagcaccgactttgaagtgaaaaccgactccaccgaccacgtgaagcccaaagagacagagaacaccaagcagcccagcaagagctgccacaagcccaaggccatcgtgcacaccgagaaagtgaacatgatgagcctgaccgtgatcggcttcagaatcctgctgctgaaagtggccggctttaacctgctgatgaccctgcggctgtggtccagctaa

SEQ ID NO: 38764 - DNA, 1875 bp, synthetic construct
  source 1..1875: mol_type = other DNA
atggccttaccagtgaccgccttgctcctgccgctggccttgctgctccacgccgccaggccggacatccagatgacacagagccctagcagcctgtctgccagcgtgggagacagagtgaccatcacatgcaaggccagcgacctgatccacaactggctggcctggtatcagcagaagcctggcaaggcccctaagctgctgatctacggcgctacctctctggaaacaggcgtgcccagcagattttctggcagcggctctggcaccgacttcaccctgacaatatccagcctccagcctgaggacttcgccacctactactgccagcagtactggaccacacctttcaccttcggccagggcaccaaggtggaaatcaaaagactcgaggacaagcagctggacgccgacgtgtcccccaagcctaccatcttcctgccctctatcgccgagacaaagctccagaaggccggcacctacctgtgcctgctggaaaagttcttcccagatgtgattaagatccactggcaggaaaagaagtccaacaccatcctgggcagccaggaaggcaacaccatgaagaccaacgacacctacatgaagttcagctggctgaccgtgcccgagaagtccctggacaaagaacacagatgcatcgtgcggcacgaaaacaacaagaacggcgtggaccaggaaatcatcttcccacccatcaagaccgatgtgattacaatggaccccaaggacaactgctccaaggacgccaacgataccctgctgctccagctgaccaacaccagcgcctactacatgtacgagatcctgctgggcaaggccaccctgtacgccgtgctggtgtctgccctggtgctgatggctatggtcaagcggaaggacagccggggaagggccaagcgatctggatctggagcaacaaacttctcactactcaaacaagcaggtgacgtggaggagaatcccgggcctactagtatggactggatttggcgcatccttttccttgtcggcgctgctaccggcgcgcattccttcgaagaagtgcagctggttgaatcaggtggcggcctggttcaacctggcggatctctgagactgagctgtgccgccagcggctacagcatcaccaatgactacgcctggaactgggtccgacaggcccctggaaaaggactggaatgggtcggatatatcagctactccggctacaccacctacaatcccagcatcaagagccggttcaccatcagcagagacaccagcaagaacaccctgtacctccagatgaactccctgagagccgaggacaccgccgtgtactattgtgccagatggaccagcggcctggactattggggacagggaacactggtcaccgtgtcctctacgcgtagccagcctcacaccaagcccagcgtgttcgtgatgaagaacggcaccaacgtggcctgcctcgtgaaagagttctaccccaaggacatcaggatcaacctggtgtccagcaagaagatcaccgagttcgaccccgccatcgtgatctcccccagcggcaagtacaacgccgtgaagctggggaagtacgaggacagcaacagcgtgacctgctccgtgcagcacgacaacaagaccgtgcacagcaccgactttgaagtgaaaaccgactccaccgaccacgtgaagcccaaagagacagagaacaccaagcagcccagcaagagctgccacaagcccaaggccatcgtgcacaccgagaaagtgaacatgatgagcctgaccgtgctgggcttcagaatcctgctgctgaaagtggccggctttaacctgctgatgaccctgcggctgtggtccagctaa

SEQ ID NO: 38765 - DNA, 1875 bp, synthetic construct
  source 1..1875: mol_type = other DNA
atggccttaccagtgaccgccttgctcctgccgctggccttgctgctccacgccgccaggccggacatccagatgacacagagccctagcagcctgtctgccagcgtgggagacagagtgaccatcacatgcaaggccagcgacctgatccacaactggctggcctggtatcagcagaagcctggcaaggcccctaagctgctgatctacggcgctacctctctggaaacaggcgtgcccagcagattttctggcagcggctctggcaccgacttcaccctgacaatatccagcctccagcctgaggacttcgccacctactactgccagcagtactggaccacacctttcaccttcggccagggcaccaaggtggaaatcaaaagactcgaggacaagcagctggacgccgacgtgtcccccaagcctaccatcttcctgccctctatcgccgagacaaagctccagaaggccggcacctacctgtgcctgctggaaaagttcttcccagatgtgattaagatccactggcaggaaaagaagtccaacaccatcctgggcagccaggaaggcaacaccatgaagaccaacgacacctacatgaagttcagctggctgaccgtgcccgagaagtccctggacaaagaacacagatgcatcgtgcggcacgaaaacaacaagaacggcgtggaccaggaaatcatcttcccacccatcaagaccgatgtgattacaatggaccccaaggacaactgctccaaggacgccaacgataccctgctgctccagctgaccaacaccagcgccaccatcctgtacgagatcctgctgggcaaggccaccctgtacgccgtgctggtgtctgccctggtgctgatggctatggtcaagcggaaggacagccggggaagggccaagcgatctggatctggagcaacaaacttctcactactcaaacaagcaggtgacgtggaggagaatcccgggcctactagtatggactggatttggcgcatccttttccttgtcggcgctgctaccggcgcgcattccttcgaagaagtgcagctggttgaatcaggtggcggcctggttcaacctggcggatctctgagactgagctgtgccgccagcggctacagcatcaccaatgactacgcctggaactgggtccgacaggcccctggaaaaggactggaatgggtcggatatatcagctactccggctacaccacctacaatcccagcatcaagagccggttcaccatcagcagagacaccagcaagaacaccctgtacctccagatgaactccctgagagccgaggacaccgccgtgtactattgtgccagatggaccagcggcctggactattggggacagggaacactggtcaccgtgtcctctacgcgtagccagcctcacaccaagcccagcgtgttcgtgatgaagaacggcaccaacgtggcctgcctcgtgaaagagttctaccccaaggacatcaggatcaacctggtgtccagcaagaagatcaccgagttcgaccccgccatcgtgatctcccccagcggcaagtacaacgccgtgaagctggggaagtacgaggacagcaacagcgtgacctgctccgtgcagcacgacaacaagaccgtgcacagcaccgactttgaagtgaaaaccgactccaccgaccacgtgaagcccaaagagacagagaacaccaagcagcccagcaagagctgccacaagcccaaggccatcgtgcacaccgagaaagtgaacatgatgagcctgaccgtgctgggcttcagaatcctgctgctgaaagtggccggctttaacctgctgatgaccctgcggctgtggtccagctaa

SEQ ID NO: 38766 - DNA, 1857 bp, synthetic construct
  source 1..1857: mol_type = other DNA
atggccttaccagtgaccgccttgctcctgccgctggccttgctgctccacgccgccaggccggacatccagatgacacagagccctagcagcctgtctgccagcgtgggagacagagtgaccatcacatgcaaggccagcgacctgatccacaactggctggcctggtatcagcagaagcctggcaaggcccctaagctgctgatctacggcgctacctctctggaaacaggcgtgcccagcagattttctggcagcggctctggcaccgacttcaccctgacaatatccagcctccagcctgaggacttcgccacctactactgccagcagtactggaccacacctttcaccttcggccagggcaccaaggtggaaatcaaaagactcgaggacctgaagaacgtgttcccacctgaggtggccgtgttcgagcctagcgaggccgagatcagccacacccagaaagccaccctcgtgtgcctggctaccggcttctaccccgaccatgtggaactgtcttggtgggtcaacggcaaagaggtgcacagcggcgtgtgtaccgacccccagccactgaaagaacagcccgccctgaacgacagccggtactgcctgagcagcagactgagagtgtccgccaccttctggcagaacccccggaaccacttcagatgccaggtgcagttctacggcctgagcgagaacgacgagtggacccaggacagagccaagcccgtgacccagatcgtgtctgccgaagcctggggcagagccgattgcggctttaccagcgagagctaccagcagggcgtgctgagcgccaccatcctgtacttgttgctgctgctgaagtccgtggtgtacttcgccatcatcacatgctgcctgctgcggagaaccgccttctgctgcaacggcgagaagtctagggccaagcgatctggatctggagcaacaaacttctcactactcaaacaagcaggtgacgtggaggagaatcccgggcctactagtatggactggatttggcgcatccttttccttgtcggcgctgctaccggcgcgcattccttcgaagaagtgcagctggttgaatcaggtggcggcctggttcaacctggcggatctctgagactgagctgtgccgccagcggctacagcatcaccaatgactacgcctggaactgggtccgacaggcccctggaaaaggactggaatgggtcggatatatcagctactccggctacaccacctacaatcccagcatcaagagccggttcaccatcagcagagacaccagcaagaacaccctgtacctccagatgaactccctgagagccgaggacaccgccgtgtactattgtgccagatggaccagcggcctggactattggggacagggaacactggtcaccgtgtcctctacgcgtatccagaaccctgatcctgccgtgtaccagctgcgggatagcaagagcagcgacaagagcgtgtgtctgttcaccgacttcgacagccagaccaacgtgtcccagagcaaggactccgacgtgtacatcaccgataagtgcgtgctggacatgcggagcatggacttcaagagcaactccgccgtggcctggtccaacaagtccgatttcgcctgcgccaacgccttcaacaacagcattatccccgaggacacattcttcccaagccccgagagcagctgcgacgtgaagctggtggaaaagagcttcgagacagacaccaacctgaacttccagaacctgagcgtgatcggcctgcggatgctgttcgccaaaaccgtggccgtgaacttcctgctgaccgccaagctgttcttcctctaa

SEQ ID NO: 38767 - DNA, 1944 bp, synthetic construct
  source 1..1944: mol_type = other DNA
atggccttaccagtgaccgccttgctcctgccgctggccttgctgctccacgccgccaggccggacatccagatgacacagagccctagcagcctgtctgccagcgtgggagacagagtgaccatcacatgcaaggccagcgacctgatccacaactggctggcctggtatcagcagaagcctggcaaggcccctaagctgctgatctacggcgctacctctctggaaacaggcgtgcccagcagattttctggcagcggctctggcaccgacttcaccctgacaatatccagcctccagcctgaggacttcgccacctactactgccagcagtactggaccacacctttcaccttcggccagggcaccaaggtggaaatcaaaagactcgaggacctgaagaacgtgttcccacctgaggtggccgtgttcgagcctagcgaggccgagatcagccacacccagaaagccaccctcgtgtgcctggctaccggcttctaccccgaccatgtggaactgtcttggtgggtcaacggcaaagaggtgcacagcggcgtgtctaccgacccccagccactgaaagaacagcccgccctgaacgacagccggtactgcctgagcagcagactgagagtgtccgccaccttctggcagaacccccggaaccacttcagatgccaggtgcagttctacggcctgagcgagaacgacgagtggacccaggacagagccaagcccgtgacccagatcgtgtctgccgaagcctggggcagagccgattgcggatcctccaaggacgccaacgataccctgctgctccagctgaccaacaccagcgcctactacatgtacttgttgctgctgctgaagtccgtggtgtacttcgccatcatcacatgctgcctgctgcggagaaccgccttctgctgcaacggcgagaagtctagggccaagcgatctggatctggagcaacaaacttctcactactcaaacaagcaggtgacgtggaggagaatcccgggcctactagtatggactggatttggcgcatccttttccttgtcggcgctgctaccggcgcgcattccttcgaagaagtgcagctggttgaatcaggtggcggcctggttcaacctggcggatctctgagactgagctgtgccgccagcggctacagcatcaccaatgactacgcctggaactgggtccgacaggcccctggaaaaggactggaatgggtcggatatatcagctactccggctacaccacctacaatcccagcatcaagagccggttcaccatcagcagagacaccagcaagaacaccctgtacctccagatgaactccctgagagccgaggacaccgccgtgtactattgtgccagatggaccagcggcctggactattggggacagggaacactggtcaccgtgtcctctacgcgtatccagaaccctgatcctgccgtgtaccagctgcgggatagcaagagcagcgacaagagcgtgtgtctgttcaccgacttcgacagccagaccaacgtgtcccagagcaaggactccgacgtgtacatcaccgataagaccgtgctggacatgcggagcatggacttcaagagcaactccgccgtggcctggtccaacaagtccgatttcgcctgcgccaacgccttcaacaacagcattatccccgaggacacattcttcccaagccccgagagcagctgcggtaccgaagtgaaaaccgactccaccgaccacgtgaagcccaaagagacagagaacaccaagcagcccagcaagagctgccacaagcccaaggccatcgtgcacaccgagaaagtgaacatgatgagcctgaccgtgctgggcctgcggatgctgttcgccaaaaccgtggccgtgaacttcctgctgaccgccaagctgttcttcctctaa

SEQ ID NO: 38768 - DNA, 1854 bp, synthetic construct
  source 1..1854: mol_type = other DNA
atggccttaccagtgaccgccttgctcctgccgctggccttgctgctccacgccgccaggccggacatccagatgacacagagccctagcagcctgtctgccagcgtgggagacagagtgaccatcacatgcaaggccagcgacctgatccacaactggctggcctggtatcagcagaagcctggcaaggcccctaagctgctgatctacggcgctacctctctggaaacaggcgtgcccagcagattttctggcagcggctctggcaccgacttcaccctgacaatatccagcctccagcctgaggacttcgccacctactactgccagcagtactggaccacacctttcaccttcggccagggcaccaaggtggaaatcaaaagactcgaggacctgaagaacgtgttcccacctgaggtggccgtgttcgagcctagcgaggccgagatcagccacacccagaaagccaccctcgtgtgcctggctaccggcttctaccccgaccatgtggaactgtcttggtgggtcaacggcaaagaggtgcacagcggcgtgtgtaccgacccccagccactgaaagaacagcccgccctgaacgacagccggtactgcctgagcagcagactgagagtgtccgccaccttctggcagaacccccggaaccacttcagatgccaggtgcagttctacggcctgagcgagaacgacgagtggacccaggacagagccaagcccgtgacccagatcgtgtctgccgaagcctggggcagagccgattgcgacgtgaagctggtggaaaagagcttcgagacagacaccaacctgaacttccagaacctgagcgtgatcggcttcagaatcctgctgctgaaagtggccggctttaacctgctgatgaccctgcggctgtggtccagcagggccaagcgatctggatctggagcaacaaacttctcactactcaaacaagcaggtgacgtggaggagaatcccgggcctactagtatggactggatttggcgcatccttttccttgtcggcgctgctaccggcgcgcattccttcgaagaagtgcagctggttgaatcaggtggcggcctggttcaacctggcggatctctgagactgagctgtgccgccagcggctacagcatcaccaatgactacgcctggaactgggtccgacaggcccctggaaaaggactggaatgggtcggatatatcagctactccggctacaccacctacaatcccagcatcaagagccggttcaccatcagcagagacaccagcaagaacaccctgtacctccagatgaactccctgagagccgaggacaccgccgtgtactattgtgccagatggaccagcggcctggactattggggacagggaacactggtcaccgtgtcctctacgcgtatccagaaccctgatcctgccgtgtaccagctgcgggatagcaagagcagcgacaagagcgtgtgtctgttcaccgacttcgacagccagaccaacgtgtcccagagcaaggactccgacgtgtacatcaccgataagtgcgtgctggacatgcggagcatggacttcaagagcaactccgccgtggcctggtccaacaagtccgatttcgcctgcgccaacgccttcaacaacagcattatccccgaggacacattcttcccaagccccgagagcagctgcggctttaccagcgagagctaccagcagggcgtgctgagcgccaccatcctgtacgagatcctgctgggcaaggccaccctgtacgccgtgctggtgtctgccctggtgctgatggctatggtcaagcggaaggacagccggggataa

SEQ ID NO: 38769 - DNA, 1854 bp, synthetic construct
  source 1..1854: mol_type = other DNA
atggccttaccagtgaccgccttgctcctgccgctggccttgctgctccacgccgccaggccggacatccagatgacacagagccctagcagcctgtctgccagcgtgggagacagagtgaccatcacatgcaaggccagcgacctgatccacaactggctggcctggtatcagcagaagcctggcaaggcccctaagctgctgatctacggcgctacctctctggaaacaggcgtgcccagcagattttctggcagcggctctggcaccgacttcaccctgacaatatccagcctccagcctgaggacttcgccacctactactgccagcagtactggaccacacctttcaccttcggccagggcaccaaggtggaaatcaaaagactcgaggacctgaagaacgtgttcccacctgaggtggccgtgttcgagcctagcgaggccgagatcagccacacccagaaagccaccctcgtgtgcctggctaccggcttctaccccgaccatgtggaactgtcttggtgggtcaacggcaaagaggtgcacagcggcgtgtgtaccgacccccagccactgaaagaacagcccgccctgaacgacagccggtactgcctgagcagcagactgagagtgtccgccaccttctggcagaacccccggaaccacttcagatgccaggtgcagttctacggcctgagcgagaacgacgagtggacccaggacagagccaagcccgtgacccagatcgtgtctgccgaagcctggggcagagccgattgcggctttaccagcgagagctaccagcagggcgtgctgagcgccaccaacctgagcgtgatcggcttcagaatcctgctgctgaaagtggccggctttaacctgctgatgaccctgcggctgtggtccagcagggccaagcgatctggatctggagcaacaaacttctcactactcaaacaagcaggtgacgtggaggagaatcccgggcctactagtatggactggatttggcgcatccttttccttgtcggcgctgctaccggcgcgcattccttcgaagaagtgcagctggttgaatcaggtggcggcctggttcaacctggcggatctctgagactgagctgtgccgccagcggctacagcatcaccaatgactacgcctggaactgggtccgacaggcccctggaaaaggactggaatgggtcggatatatcagctactccggctacaccacctacaatcccagcatcaagagccggttcaccatcagcagagacaccagcaagaacaccctgtacctccagatgaactccctgagagccgaggacaccgccgtgtactattgtgccagatggaccagcggcctggactattggggacagggaacactggtcaccgtgtcctctacgcgtatccagaaccctgatcctgccgtgtaccagctgcgggatagcaagagcagcgacaagagcgtgtgtctgttcaccgacttcgacagccagaccaacgtgtcccagagcaaggactccgacgtgtacatcaccgataagtgcgtgctggacatgcggagcatggacttcaagagcaactccgccgtggcctggtccaacaagtccgatttcgcctgcgccaacgccttcaacaacagcattatccccgaggacacattcttcccaagccccgagagcagctgcgacgtgaagctggtggaaaagagcttcgagacagacaccaacctgaacttccagatcctgtacgagatcctgctgggcaaggccaccctgtacgccgtgctggtgtctgccctggtgctgatggctatggtcaagcggaaggacagccggggataa

SEQ ID NO: 38770 - DNA, 1854 bp, synthetic construct; identical to SEQ ID NO: 38768
  source 1..1854: mol_type = other DNA

SEQ ID NO: 38771 - DNA, 1854 bp, synthetic construct; identical to SEQ ID NO: 38769
  source 1..1854: mol_type = other DNA

SEQ ID NO: 38772 - DNA, 1851 bp, synthetic construct
  source 1..1851: mol_type = other DNA
atggccttaccagtgaccgccttgctcctgccgctggccttgctgctccacgccgccaggccggacatccagatgacacagagccctagcagcctgtctgccagcgtgggagacagagtgaccatcacatgcaaggccagcgacctgatccacaactggctggcctggtatcagcagaagcctggcaaggcccctaagctgctgatctacggcgctacctctctggaaacaggcgtgcccagcagattttctggcagcggctctggcaccgacttcaccctgacaatatccagcctccagcctgaggacttcgccacctactactgccagcagtactggaccacacctttcaccttcggccagggcaccaaggtggaaatcaaaagactcgaggacctgaagaacgtgttcccacctgaggtggccgtgttcgagcctagcgaggccgagatcagccacacccagaaagccaccctcgtgtgcctggctaccggcttctaccccgaccatgtggaactgtcttggtgggtcaacggcaaagaggtgcacagcggcgtgtgtaccgacccccagccactgaaagaacagcccgccctgaacgacagccggtactgcctgagcagcagactgagagtgtccgccaccttctggcagaacccccggaaccacttcagatgccaggtgcagttctacggcctgagcgagaacgacgagtggacccaggacagagccaagcccgtgacccagatcgtgtctgccgaagcctggggcagagccgattgcgacgtgaagctggtggaaaagagcttcgagacagacaccaacctgaacttccagaacctgagcgtgatcggcttcagaatcctgctgctgaaagtggccggctttaacctgctgatgaccctgcggctgtggtccagcagggccaagcgatctggatctggagcaacaaacttctcactactcaaacaagcaggtgacgtggaggagaatcccgggcctactagtatggactggatttggcgcatccttttccttgtcggcgctgctaccggcgcgcattccttcgaagaagtgcagctggttgaatcaggtggcggcctggttcaacctggcggatctctgagactgagctgtgccgccagcggctacagcatcaccaatgactacgcctggaactgggtccgacaggcccctggaaaaggactggaatgggtcggatatatcagctactccggctacaccacctacaatcccagcatcaagagccggttcaccatcagcagagacaccagcaagaacaccctgtacctccagatgaactccctgagagccgaggacaccgccgtgtactattgtgccagatggaccagcggcctggactattggggacagggaacactggtcaccgtgtcctctacgcgtatccagaaccctgatcctgccgtgtaccagctgcgggatagcaagagcagcgacaagagcgtgtgtctgttcaccgacttcgacagccagaccaacgtgtcccagagcaaggactccgacgtgtacatcaccgataagtgcgtgctggacatgcggagcatggacttcaagagcaactccgccgtggcctggtccaacaagtccgatttcgcctgcgccaacgccttcaacaacagcattatccccgaggacacattcttcccaagccccgagagcagctgcggctttaccagcgagagctaccagcagggcgtgctgagcgccaccatcctgtacgagatcctgctgggcaaggccaccctgtacgccgtgctggtgtctgccctggtgctgatggctatggtcaagcggaaggacagccgggga

SEQ ID NO: 38773 - DNA, 1863 bp, synthetic construct
  source 1..1863: mol_type = other DNA
atggccttaccagtgaccgccttgctcctgccgctggccttgctgctccacgccgccaggccggacatccagatgacacagagccctagcagcctgtctgccagcgtgggagacagagtgaccatcacatgcaaggccagcgacctgatccacaactggctggcctggtatcagcagaagcctggcaaggcccctaagctgctgatctacggcgctacctctctggaaacaggcgtgcccagcagattttctggcagcggctctggcaccgacttcaccctgacaatatccagcctccagcctgaggacttcgccacctactactgccagcagtactggaccacacctttcaccttcggccagggcaccaaggtggaaatcaaaagactcgaggccgacgtgtcccccaagcctaccatcttcctgccctctatcgccgagacaaagctccagaaggccggcacctacctgtgcctgctggaaaagttcttcccagatgtgattaagatccactggcaggaaaagaagtccaacaccatcctgggcagccaggaaggcaacaccatgaagaccaacgacacctacatgaagttcagctggctgaccgtgcccgagaagtccctggacaaagaacacagatgcatcgtgcggcacgaaaacaacaagaacggcgtggaccaggaaatcatcttcccacccatcaagaccgatgtgattacaatggaccccaaggacaactgctccaaggacgccaacgataccctgctgctccagctgaccaacaccagcgcctactacatgtacttgttgctgctgctgaagtccgtggtgtacttcgccatcatcacatgctgcctgctgcggagaaccgccttctgctgcaacggcgagaagtctagggccaagcgatctggatctggagcaacaaacttctcactactcaaacaagcaggtgacgtggaggagaatcccgggcctactagtatggactggatttggcgcatccttttccttgtcggcgctgctaccggcgcgcattccttcgaagaagtgcagctggttgaatcaggtggcggcctggttcaacctggcggatctctgagactgagctgtgccgccagcggctacagcatcaccaatgactacgcctggaactgggtccgacaggcccctggaaaaggactggaatgggtcggatatatcagctactccggctacaccacctacaatcccagcatcaagagccggttcaccatcagcagagacaccagcaagaacaccctgtacctccagatgaactccctgagagccgaggacaccgccgtgtactattgtgccagatggaccagcggcctggactattggggacagggaacactggtcaccgtgtcctctacgcgtagccagcctcacaccaagcccagcgtgttcgtgatgaagaacggcaccaacgtggcctgcctcgtgaaagagttctaccccaaggacatcaggatcaacctggtgtccagcaagaagatcaccgagttcgaccccgccatcgtgatctcccccagcggcaagtacaacgccgtgaagctggggaagtatgaggacagcaacagcgtgacctgctccgtgcagcacgacaacaagaccgtgcacagcaccgactttgaagtgaaaaccgactccaccgaccacgtgaagcccaaagagacagagaacaccaagcagcccagcaagagctgccacaagcccaaggccatcgtgcacaccgagaaagtgaacatgatgagcctgaccgtgatcggcttcagaatcctgctgctgaaagtggccggctttaacctgctgatgaccctgcggctgtggtccagctaa

SEQ ID NO: 38774 - DNA, 1863 bp, synthetic construct
  source 1..1863: mol_type = other DNA
atggccttaccagtgaccgccttgctcctgccgctggccttgctgctccacgccgccaggccggacatccagatgacacagagccctagcagcctgtctgccagcgtgggagacagagtgaccatcacatgcaaggccagcgacctgatccacaactggctggcctggtatcagcagaagcctggcaaggcccctaagctgctgatctacggcgctacctctctggaaacaggcgtgcccagcagattttctggcagcggctctggcaccgacttcaccctgacaatatccagcctccagcctgaggacttcgccacctactactgccagcagtactggaccacacctttcaccttcggccagggcaccaaggtggaaatcaaaagactcgaggccgacgtgtcccccaagcctaccatcttcctgccctctatcgccgagacaaagctccagaaggccggcacctacctgtgcctgctggaaaagttcttcccagatgtgattaagatccactggcaggaaaagaagtccaacaccatcctgggcagccaggaaggcaacaccatgaagaccaacgacacctacatgaagttcagctggctgaccgtgcccgagaagtccctggacaaagaacacagatgcatcgtgcggcacgaaaacaacaagaacggcgtggaccaggaaatcatcttcccacccatcaagaccgatgtgattacaatggaccccaaggacaactgctccaaggacgccaacgataccctgctgctccagctgaccaacaccagcgcctactacatgtacttgttgctgctgctgaagtccgtggtgtacttcgccatcatcacatgctgcctgctgcggagaaccgccttctgctgcaacggcgagaagtctagggccaagcgatctggatctggagcaacaaacttctcactactcaaacaagcaggtgacgtggaggagaatcccgggcctactagtatggactggatttggcgcatccttttccttgtcggcgctgctaccggcgcgcattccttcgaagaagtgcagctggttgaatcaggtggcggcctggttcaacctggcggatctctgagactgagctgtgccgccagcggctacagcatcaccaatgactacgcctggaactgggtccgacaggcccctggaaaaggactggaatgggtcggatatatcagctactccggctacaccacctacaatcccagcatcaagagccggttcaccatcagcagagacaccagcaagaacaccctgtacctccagatgaactccctgagagccgaggacaccgccgtgtactattgtgccagatggaccagcggcctggactattggggacagggaacactggtcaccgtgtcctctacgcgtagccagcctcacaccaagcccagcgtgttcgtgatgaagaacggcaccaacgtggcctgcctcgtgaaagagttctaccccaaggacatcaggatcaacctggtgtccagcaagaagatcaccgagttcgaccccgccatcgtgatctcccccagcggcaagtacaacgccgtgaagctggggaagtacgaggacagcaacagcgtgacctgctccgtgcagcacgacaacaagaccgtgcacagcaccgactttgaagtgaaaaccgactccaccgaccacgtgaagcccaaagagacagagaacaccaagcagcccagcaagagctgccacaagcccaaggccatcgtgcacaccgagaaagtgaacatgatgagcctgaccgtgctgggcttcagaatcctgctgctgaaagtggccggctttaacctgctgatgaccctgcggctgtggtccagctaa

SEQ ID NO: 38775 - DNA, 1851 bp, synthetic construct; identical to SEQ ID NO: 38772
  source 1..1851: mol_type = other DNA

SEQ ID NO: 38776 - DNA, 1863 bp, synthetic construct
  source 1..1863: mol_type = other DNA
atggccttaccagtgaccgccttgctcctgccgctggccttgctgctccacgccgccaggccggacatccagatgacacagagccctagcagcctgtctgccagcgtgggagacagagtgaccatcacatgcaaggccagcgacctgatccacaactggctggcctggtatcagcagaagcctggcaaggcccctaagctgctgatctacggcgctacctctctggaaacaggcgtgcccagcagattttctggcagcggctctggcaccgacttcaccctgacaatatccagcctccagcctgaggacttcgccacctactactgccagcagtactggaccacacctttcaccttcggccagggcaccaaggtggaaatcaaaagactcgagatccagaaccctgatcctgccgtgtaccagctgcgggatagcaagagcagcgacaagagcgtgtgtctgttcaccgacttcgacagccagaccaacgtgtcccagagcaaggactccgacgtgtacatcaccgataagtgcgtgctggacatgcggagcatggacttcaagagcaactccgccgtggcctggtccaacaagtccgatttcgcctgcgccaacgccttcaacaacagcattatccccgaggacacattcttcccaagccccgagagcagctgcggctttaccagcgagagctaccagcagggcgtgctgagcgccaccatcctgtacgagatcctgctgggcaaggccaccctgtacgccgtgctggtgtctgccctggtgctgatggctatggtcaagcggaaggacagccggggacgcgccaagagaagcggatctggcgtgaagcagaccctgaatttcgacctgctgaagctggctggcgacgtggaatccaacccaggccctactagtatggactggatttggcgcatccttttccttgtcggcgctgctaccggcgcgcattccttcgaagaagtgcagctggttgaatcaggtggcggcctggttcaacctggcggatctctgagactgagctgtgccgccagcggctacagcatcaccaatgactacgcctggaactgggtccgacaggcccctggaaaaggactggaatgggtcggatatatcagctactccggctacaccacctacaatcccagcatcaagagccggttcaccatcagcagagacaccagcaagaacaccctgtacctccagatgaactccctgagagccgaggacaccgccgtgtactattgtgccagatggaccagcggcctggactattggggacagggaacactggtcaccgtgtcctctacgcgtgaggacctgaagaacgtgttcccacctgaggtggccgtgttcgagcctagcgaggccgagatcagccacacccagaaagccaccctcgtgtgcctggctaccggcttctaccccgaccatgtggaactgtcttggtgggtcaacggcaaagaggtgcacagcggcgtgtgtaccgacccccagccactgaaagaacagcccgccctgaacgacagccggtactgcctgagcagcagactgagagtgtccgccaccttctggcagaacccccggaaccacttcagatgccaggtgcagttctacggcctgagcgagaacgacgagtggacccaggacagagccaagcccgtgacccagatcgtgtctgccgaagcctggggcagagccgattgcgacgtgaagctggtggaaaagagcttcgagacagacaccaacctgaacttccagaacctgagcgtgatcggcttcagaatcctgctgctgaaagtggccggctttaacctgctgatgaccctgcggctgtggtccagc

SEQ ID NO: 38777 - DNA, 2256 bp, synthetic construct
  source 1..2256: mol_type = other DNA
atggccttaccagtgaccgccttgctcctgccgctggccttgctgctccacgccgccaggccggaagtgcagctggttgaatctggcggaggactggttcagcctggcggatctctgagactgtcttgtgccgccagcggcttcagcttcagcgacttttggatgagctgggtccgacaggcccctggcaaaggacttgaatgggtcgccacaatcagccaggccggcagcgagaaggactacgtggactctgtgaagggcagattcaccatcagccgggacaacgccaagaagtccctgtacctccagatgaacagcctgagagccgaggacaccgccgtgtactattgtgcctctggcgtgtacagcttcgactacagaggccagggcaccctggtcacagtctcttctggtaccggcggaggcggatctggcggcggaggtagcggtggcggaggatctgaattcgacatccagatgacacagagccctagcagcctgtctgccagcgtgggagacagagtgaccatcacatgcaaggccagcgacctgatccacaactggctggcctggtatcagcagaagcctggcaaggcccctaagctgctgatctacggcgctacctctctggaaacaggcgtgcccagcagattttctggcagcggctctggcaccgacttcaccctgacaatatccagcctccagcctgaggacttcgccacctactactgccagcagtactggaccacacctttcaccttcggccagggcaccaaggtggaaatcaaaagactcgaggacctgaagaacgtgttcccacctgaggtggccgtgttcgagcctagcgaggccgagatcagccacacccagaaagccaccctcgtgtgcctggctaccggcttctaccccgaccatgtggaactgtcttggtgggtcaacggcaaagaggtgcacagcggcgtgtgtaccgacccccagccactgaaagaacagcccgccctgaacgacagccggtactgcctgagcagcagactgagagtgtccgccaccttctggcagaacccccggaaccacttcagatgccaggtgcagttctacggcctgagcgagaacgacgagtggacccaggacagagccaagcccgtgacccagatcgtgtctgccgaagcctggggcagagccgattgcgacgtgaagctggtggaaaagagcttcgagacagacaccaacctgaacttccagaacctgagcgtgatcggcttcagaatcctgctgctgaaagtggccggctttaacctgctgatgaccctgcggctgtggtccagcagggccaagcgatctggatctggagcaacaaacttctcactactcaaacaagcaggtgacgtggaggagaatcccgggcctactagtatggactggatttggcgcatccttttccttgtcggcgctgctaccggcgcgcattccttcgaagaagtgcagctggttgaatcaggtggcggcctggttcaacctggcggatctctgagactgagctgtgccgccagcggctacagcatcaccaatgactacgcctggaactgggtccgacaggcccctggaaaaggactggaatgggtcggatatatcagctactccggctacaccacctacaatcccagcatcaagagccggttcaccatcagcagagacaccagcaagaacaccctgtacctccagatgaactccctgagagccgaggacaccgccgtgtactattgtgccagatggaccagcggcctggactattggggacagggaacactggtcaccgtgtcctctacgcgtatccagaaccctgatcctgccgtgtaccagctgcgggatagcaagagcagcgacaagagcgtgtgtctgttcaccgacttcgacagccagaccaacgtgtcccagagcaaggactccgacgtgtacatcaccgataagtgcgtgctggacatgcggagcatggacttcaagagcaactccgccgtggcctggtccaacaagtccgatttcgcctgcgccaacgccttcaacaacagcattatccccgaggacacattcttcccaagccccgagagcagctgcggctttaccagcgagagctaccagcagggcgtgctgagcgccaccatcctgtacgagatcctgctgggcaaggccaccctgtacgccgtgctggtgtctgccctggtgctgatggctatggtcaagcggaaggacagccgggga

SEQ ID NO: 38778 - DNA, 2268 bp, synthetic construct
  source 1..2268: mol_type = other DNA
atggccttaccagtgaccgccttgctcctgccgctggccttgctgctccacgccgccaggccggaagtgcagctggttgaatctggcggaggactggttcagcctggcggatctctgagactgtcttgtgccgccagcggcttcagcttcagcgacttttggatgagctgggtccgacaggcccctggcaaaggacttgaatgggtcgccacaatcagccaggccggcagcgagaaggactacgtggactctgtgaagggcagattcaccatcagccgggacaacgccaagaagtccctgtacctccagatgaacagcctgagagccgaggacaccgccgtgtactattgtgcctctggcgtgtacagcttcgactacagaggccagggcaccctggtcacagtctcttctggtaccggcggaggcggatctggcggcggaggtagcggtggcggaggatctgaattcgacatccagatgacacagagccctagcagcctgtctgccagcgtgggagacagagtgaccatcacatgcaaggccagcgacctgatccacaactggctggcctggtatcagcagaagcctggcaaggcccctaagctgctgatctacggcgctacctctctggaaacaggcgtgcccagcagattttctggcagcggctctggcaccgacttcaccctgacaatatccagcctccagcctgaggacttcgccacctactactgccagcagtactggaccacacctttcaccttcggccagggcaccaaggtggaaatcaaaagactcgagatccagaaccctgatcctgccgtgtaccagctgcgggatagcaagagcagcgacaagagcgtgtgtctgttcaccgacttcgacagccagaccaacgtgtcccagagcaaggactccgacgtgtacatcaccgataagtgcgtgctggacatgcggagcatggacttcaagagcaactccgccgtggcctggtccaacaagtccgatttcgcctgcgccaacgccttcaacaacagcattatccccgaggacacattcttcccaagccccgagagcagctgcggctttaccagcgagagctaccagcagggcgtgctgagcgccaccatcctgtacgagatcctgctgggcaaggccaccctgtacgccgtgctggtgtctgccctggtgctgatggctatggtcaagcggaaggacagccggggacgcgccaagagaagcggatctggcgtgaagcagaccctgaatttcgacctgctgaagctggctggcgacgtggaatccaacccaggccctactagtatggactggatttggcgcatccttttccttgtcggcgctgctaccggcgcgcattccttcgaagaagtgcagctggttgaatcaggtggcggcctggttcaacctggcggatctctgagactgagctgtgccgccagcggctacagcatcaccaatgactacgcctggaactgggtccgacaggcccctggaaaaggactggaatgggtcggatatatcagctactccggctacaccacctacaatcccagcatcaagagccggttcaccatcagcagagacaccagcaagaacaccctgtacctccagatgaactccctgagagccgaggacaccgccgtgtactattgtgccagatggaccagcggcctggactattggggacagggaacactggtcaccgtgtcctctacgcgtgaggacctgaagaacgtgttcccacctgaggtggccgtgttcgagcctagcgaggccgagatcagccacacccagaaagccaccctcgtgtgcctggctaccggcttctaccccgaccatgtggaactgtcttggtgggtcaacggcaaagaggtgcacagcggcgtgtgtaccgacccccagccactgaaagaacagcccgccctgaacgacagccggtactgcctgagcagcagactgagagtgtccgccaccttctggcagaacccccggaaccacttcagatgccaggtgcagttctacggcctgagcgagaacgacgagtggacccaggacagagccaagcccgtgacccagatcgtgtctgccgaagcctggggcagagccgattgcgacgtgaagctggtggaaaagagcttcgagacagacaccaacctgaacttccagaacctgagcgtgatcggcttcagaatcctgctgctgaaagtggccggctttaacctgctgatgaccctgcggctgtggtccagc

SEQ ID NO: 38779 - DNA, 2667 bp, synthetic construct
  source 1..2667: mol_type = other DNA
atggccttaccagtgaccgccttgctcctgccgctggccttgctgctccacgccgccaggccggaagtgcagctggttgaatctggcggaggactggttcagcctggcggatctctgagactgtcttgtgccgccagcggcttcagcttcagcgacttttggatgagctgggtccgacaggcccctggcaaaggacttgaatgggtcgccacaatcagccaggccggcagcgagaaggactacgtggactctgtgaagggcagattcaccatcagccgggacaacgccaagaagtccctgtacctccagatgaacagcctgagagccgaggacaccgccgtgtactattgtgcctctggcgtgtacagcttcgactacagaggccagggcaccctggtcacagtctcttctggtaccggcggaggcggatctggcggcggaggtagcggtggcggaggatctgaattcgacatccagatgacacagagccctagcagcctgtctgccagcgtgggagacagagtgaccatcacatgcaaggccagcgacctgatccacaactggctggcctggtatcagcagaagcctggcaaggcccctaagctgctgatctacggcgctacctctctggaaacaggcgtgcccagcagattttctggcagcggctctggcaccgacttcaccctgacaatatccagcctccagcctgaggacttcgccacctactactgccagcagtactggaccacacctttcaccttcggccagggcaccaaggtggaaatcaaaagactcgaggacctgaagaacgtgttcccacctgaggtggccgtgttcgagcctagcgaggccgagatcagccacacccagaaagccaccctcgtgtgcctggctaccggcttctaccccgaccatgtggaactgtcttggtgggtcaacggcaaagaggtgcacagcggcgtgtgtaccgacccccagccactgaaagaacagcccgccctgaacgacagccggtactgcctgagcagcagactgagagtgtccgccaccttctggcagaacccccggaaccacttcagatgccaggtgcagttctacggcctgagcgagaacgacgagtggacccaggacagagccaagcccgtgacccagatcgtgtctgccgaagcctggggcagagccgattgcgacgtgaagctggtggaaaagagcttcgagacagacaccaacctgaacttccagaacctgagcgtgatcggcttcagaatcctgctgctgaaagtggccggctttaacctgctgatgaccctgcggctgtggtccagcagggccaagcgatctggatctggagcaacaaacttctcactactcaaacaagcaggtgacgtggaggagaatcccgggcctactagtatggactggatttggcgcatccttttccttgtcggcgctgctaccggcgcgcattccgggccccagctccagctgcaagagtctggacctggcctggtcaagcctagcgagacactgagcctgacctgtaccgtgtccggcgatagcatcagcagcggcgattactactggggctggatcagacagcctcctggcaaaggactggaatggatcggccacatctactacagcggcgtgacctactacaaccccagcctgaagtccagagtgaccatcagcgtggacaccagccggaaccagttctccctgaagctgtctagcgtgacagccgccgataccgccgtgtactactgcaccagagaggacagcagcaactggcggagtagaggccagggaacactggtcacagttagctctggatccggcggaggcggaagtggaggcggaggatctggcggcggaggctctttcgaagaagtgcagctggttgaatcaggtggcggcctggttcaacctggcggatctctgagactgagctgtgccgccagcggctacagcatcaccaatgactacgcctggaactgggtccgacaggcccctggaaaaggactggaatgggtcggatatatcagctactccggctacaccacctacaatcccagcatcaagagccggttcaccatcagcagagacaccagcaagaacaccctgtacctccagatgaactccctgagagccgaggacaccgccgtgtactattgtgccagatggaccagcggcctggactattggggacagggaacactggtcaccgtgtcctctacgcgtatccagaaccctgatcctgccgtgtaccagctgcgggatagcaagagcagcgacaagagcgtgtgtctgttcaccgacttcgacagccagaccaacgtgtcccagagcaaggactccgacgtgtacatcaccgataagtgcgtgctggacatgcggagcatggacttcaagagcaactccgccgtggcctggtccaacaagtccgatttcgcctgcgccaacgccttcaacaacagcattatccccgaggacacattcttcccaagccccgagagcagctgcggctttaccagcgagagctaccagcagggcgtgctgagcgccaccatcctgtacgagatcctgctgggcaaggccaccctgtacgccgtgctggtgtctgccctggtgctgatggctatggtcaagcggaaggacagccgggga

SEQ ID NO: 38780 - DNA, 2679 bp, synthetic construct
  source 1..2679: mol_type = other DNA
atggccttaccagtgaccgccttgctcctgccgctggccttgctgctccacgccgccaggccggaagtgcagctggttgaatctggcggaggactggttcagcctggcggatctctgagactgtcttgtgccgccagcggcttcagcttcagcgacttttggatgagctgggtccgacaggcccctggcaaaggacttgaatgggtcgccacaatcagccaggccggcagcgagaaggactacgtggactctgtgaagggcagattcaccatcagccgggacaacgccaagaagtccctgtacctccagatgaacagcctgagagccgaggacaccgccgtgtactattgtgcctctggcgtgtacagcttcgactacagaggccagggcaccctggtcacagtctcttctggtaccggcggaggcggatctggcggcggaggtagcggtggcggaggatctgaattcgacatccagatgacacagagccctagcagcctgtctgccagcgtgggagacagagtgaccatcacatgcaaggccagcgacctgatccacaactggctggcctggtatcagcagaagcctggcaaggcccctaagctgctgatctacggcgctacctctctggaaacaggcgtgcccagcagattttctggcagcggctctggcaccgacttcaccctgacaatatccagcctccagcctgaggacttcgccacctactactgccagcagtactggaccacacctttcaccttcggccagggcaccaaggtggaaatcaaaagactcgagatccagaaccctgatcctgccgtgtaccagctgcgggatagcaagagcagcgacaagagcgtgtgtctgttcaccgacttcgacagccagaccaacgtgtcccagagcaaggactccgacgtgtacatcaccgataagtgcgtgctggacatgcggagcatggacttcaagagcaactccgccgtggcctggtccaacaagtccgatttcgcctgcgccaacgccttcaacaacagcattatccccgaggacacattcttcccaagccccgagagcagctgcggctttaccagcgagagctaccagcagggcgtgctgagcgccaccatcctgtacgagatcctgctgggcaaggccaccctgtacgccgtgctggtgtctgccctggtgctgatggctatggtcaagcggaaggacagccggggacgcgccaagagaagcggatctggcgtgaagcagaccctgaatttcgacctgctgaagctggctggcgacgtggaatccaacccaggccctactagtatggactggatttggcgcatccttttccttgtcggcgctgctaccggcgcgcattccgggccccagctccagctgcaagagtctggacctggcctggtcaagcctagcgagacactgagcctgacctgtaccgtgtccggcgatagcatcagcagcggcgattactactggggctggatcagacagcctcctggcaaaggactggaatggatcggccacatctactacagcggcgtgacctactacaaccccagcctgaagtccagagtgaccatcagcgtggacaccagccggaaccagttctccctgaagctgtctagcgtgacagccgccgataccgccgtgtactactgcaccagagaggacagcagcaactggcggagtagaggccagggaacactggtcacagttagctctggatccggcggaggcggaagtggaggcggaggatctggcggcggaggctctttcgaagaagtgcagctggttgaatcaggtggcggcctggttcaacctggcggatctctgagactgagctgtgccgccagcggctacagcatcaccaatgactacgcctggaactgggtccgacaggcccctggaaaaggactggaatgggtcggatatatcagctactccggctacaccacctacaatcccagcatcaagagccggttcaccatcagcagagacaccagcaagaacaccctgtacctccagatgaactccctgagagccgaggacaccgccgtgtactattgtgccagatggaccagcggcctggactattggggacagggaacactggtcaccgtgtcctctacgcgtgaggacctgaagaacgtgttcccacctgaggtggccgtgttcgagcctagcgaggccgagatcagccacacccagaaagccaccctcgtgtgcctggctaccggcttctaccccgaccatgtggaactgtcttggtgggtcaacggcaaagaggtgcacagcggcgtgtgtaccgacccccagccactgaaagaacagcccgccctgaacgacagccggtactgcctgagcagcagactgagagtgtccgccaccttctggcagaacccccggaaccacttcagatgccaggtgcagttctacggcctgagcgagaacgacgagtggacccaggacagagccaagcccgtgacccagatcgtgtctgccgaagcctggggcagagccgattgcgacgtgaagctggtggaaaagagcttcgagacagacaccaacctgaacttccagaacctgagcgtgatcggcttcagaatcctgctgctgaaagtggccggctttaacctgctgatgaccctgcggctgtggtccagc

SEQ ID NO: 38781 - DNA, 2061 bp, synthetic construct
  source 1..2061: mol_type = other DNA
atggccttaccagtgaccgccttgctcctgccgctggccttgctgctccacgccgccaggccggacatccagatgacacagagccctagcagcctgtctgccagcgtgggagacagagtgaccatcacatgcaaggccagcgacctgatccacaactggctggcctggtatcagcagaagcctggcaaggcccctaagctgctgatctacggcgctacctctctggaaacaggcgtgcccagcagattttctggcagcggctctggcaccgacttcaccctgacaatatccagcctccagcctgaggacttcgccacctactactgccagcagtactggaccacacctttcaccttcggccagggcaccaaggtggaaatcaaaagactcgaggacctgaagaacgtgttcccacctgaggtggccgtgttcgagcctagcgaggccgagatcagccacacccagaaagccaccctcgtgtgcctggctaccggcttctaccccgaccatgtggaactgtcttggtgggtcaacggcaaagaggtgcacagcggcgtgtgtaccgacccccagccactgaaagaacagcccgccctgaacgacagccggtactgcctgagcagcagactgagagtgtccgccaccttctggcagaacccccggaaccacttcagatgccaggtgcagttctacggcctgagcgagaacgacgagtggacccaggacagagccaagcccgtgacccagatcgtgtctgccgaagcctggggcagagccgattgcgacgtgaagctggtggaaaagagcttcgagacagacaccaacctgaacttccagaacctgagcgtgatcggcttcagaatcctgctgctgaaagtggccggctttaacctgctgatgaccctgcggctgtggtccagcagggccaagcgatctggatctggagcaacaaacttctcactactcaaacaagcaggtgacgtggaggagaatcccgggcctactagtatggactggatttggcgcatccttttccttgtcggcgctgctaccggcgcccattccgggcccatggaccccgacctggaaatcagagccgccttcctgcggcagagaaacacagccctgagaacagaggtggccgagctggaacaagaggtgcagcggctggaaaacgaggtgtcccagtacgagacaagatacggccctctcggaggcggaaaaggatccggcggcggaggatctggcggaggcggatctgggggcggaggctctttcgaagaagtgcagctggttgaatcaggtggcggcctggttcaacctggcggatctctgagactgagctgtgccgccagcggctacagcatcaccaatgactacgcctggaactgggtccgacaggcccctggaaaaggactggaatgggtcggatatatcagctactccggctacaccacctacaatcccagcatcaagagccggttcaccatcagcagagacaccagcaagaacaccctgtacctccagatgaactccctgagagccgaggacaccgccgtgtactattgtgccagatggaccagcggcctggactattggggacagggaacactggtcaccgtgtcctctacgcgtatccagaaccctgatcctgccgtgtaccagctgcgggatagcaagagcagcgacaagagcgtgtgtctgttcaccgacttcgacagccagaccaacgtgtcccagagcaaggactccgacgtgtacatcaccgataagtgcgtgctggacatgcggagcatggacttcaagagcaactccgccgtggcctggtccaacaagtccgatttcgcctgcgccaacgccttcaacaacagcattatccccgaggacacattcttcccaagccccgagagcagctgcggctttaccagcgagagctaccagcagggcgtgctgagcgccaccatcctgtacgagatcctgctgggcaaggccaccctgtacgccgtgctggtgtctgccctggtgctgatggctatggtcaagcggaaggacagccgggga

SEQ ID NO: 38782 - DNA, 2073 bp, synthetic construct
  source 1..2073: mol_type = other DNA
atggccttaccagtgaccgccttgctcctgccgctggccttgctgctccacgccgccaggccggacatccagatgacacagagccctagcagcctgtctgccagcgtgggagacagagtgaccatcacatgcaaggccagcgacctgatccacaactggctggcctggtatcagcagaagcctggcaaggcccctaagctgctgatctacggcgctacctctctggaaacaggcgtgcccagcagattttctggcagcggctctggcaccgacttcaccctgacaatatccagcctccagcctgaggacttcgccacctactactgccagcagtactggaccacacctttcaccttcggccagggcaccaaggtggaaatcaaaagactcgagatccagaaccctgatcctgccgtgtaccagctgcgggatagcaagagcagcgacaagagcgtgtgtctgttcaccgacttcgacagccagaccaacgtgtcccagagcaaggactccgacgtgtacatcaccgataagtgcgtgctggacatgcggagcatggacttcaagagcaactccgccgtggcctggtccaacaagtccgatttcgcctgcgccaacgccttcaacaacagcattatccccgaggacacattcttcccaagccccgagagcagctgcggctttaccagcgagagctaccagcagggcgtgctgagcgccaccatcctgtacgagatcctgctgggcaaggccaccctgtacgccgtgctggtgtctgccctggtgctgatggctatggtcaagcggaaggacagccggggacgcgccaagagaagcggatctggcgtgaagcagaccctgaatttcgacctgctgaagctggctggcgacgtggaatccaacccaggccctactagtatggactggatttggcgcatccttttccttgtcggcgctgctaccggcgcccattccgggcccatggaccccgacctggaaatcagagccgccttcctgcggcagagaaacacagccctgagaacagaggtggccgagctggaacaagaggtgcagcggctggaaaacgaggtgtcccagtacgagacaagatacggccctctcggaggcggaaaaggatccggcggcggaggatctggcggaggcggatctgggggcggaggctctttcgaagaagtgcagctggttgaatcaggtggcggcctggttcaacctggcggatctctgagactgagctgtgccgccagcggctacagcatcaccaatgactacgcctggaactgggtccgacaggcccctggaaaaggactggaatgggtcggatatatcagctactccggctacaccacctacaatcccagcatcaagagccggttcaccatcagcagagacaccagcaagaacaccctgtacctccagatgaactccctgagagccgaggacaccgccgtgtactattgtgccagatggaccagcggcctggactattggggacagggaacactggtcaccgtgtcctctacgcgtgaggacctgaagaacgtgttcccacctgaggtggccgtgttcgagcctagcgaggccgagatcagccacacccagaaagccaccctcgtgtgcctggctaccggcttctaccccgaccatgtggaactgtcttggtgggtcaacggcaaagaggtgcacagcggcgtgtgtaccgacccccagccactgaaagaacagcccgccctgaacgacagccggtactgcctgagcagcagactgagagtgtccgccaccttctggcagaacccccggaaccacttcagatgccaggtgcagttctacggcctgagcgagaacgacgagtggacccaggacagagccaagcccgtgacccagatcgtgtctgccgaagcctggggcagagccgattgcgacgtgaagctggtggaaaagagcttcgagacagacaccaacctgaacttccagaacctgagcgtgatcggcttcagaatcctgctgctgaaagtggccggctttaacctgctgatgaccctgcggctgtggtccagc

SEQ ID NO: 38783 - DNA, 1992 bp, synthetic construct
  source 1..1992: mol_type = other DNA
atggccttaccagtgaccgccttgctcctgccgctggccttgctgctccacgccgccaggccggacatccagatgacacagagccctagcagcctgtctgccagcgtgggagacagagtgaccatcacatgcaaggccagcgacctgatccacaactggctggcctggtatcagcagaagcctggcaaggcccctaagctgctgatctacggcgctacctctctggaaacaggcgtgcccagcagattttctggcagcggctctggcaccgacttcaccctgacaatatccagcctccagcctgaggacttcgccacctactactgccagcagtactggaccacacctttcaccttcggccagggcaccaaggtggaaatcaaaagactcgaggacctgaagaacgtgttcccacctgaggtggccgtgttcgagcctagcgaggccgagatcagccacacccagaaagccaccctcgtgtgcctggctaccggcttctaccccgaccatgtggaactgtcttggtgggtcaacggcaaagaggtgcacagcggcgtgtgtaccgacccccagccactgaaagaacagcccgccctgaacgacagccggtactgcctgagcagcagactgagagtgtccgccaccttctggcagaacccccggaaccacttcagatgccaggtgcagttctacggcctgagcgagaacgacgagtggacccaggacagagccaagcccgtgacccagatcgtgtctgccgaagcctggggcagagccgattgcgacgtgaagctggtggaaaagagcttcgagacagacaccaacctgaacttccagaacctgagcgtgatcggcttcagaatcctgctgctgaaagtggccggctttaacctgctgatgaccctgcggctgtggtccagcagggccaagcgatctggatctggagcaacaaacttctcactactcaaacaagcaggtgacgtggaggagaatcccgggcctactagtatggactggatttggcgcatccttttccttgtcggcgctgctaccggcgcccattccgggcccgaagttgctgccctcgagaaggaggtagcagctttggaaaaagaagtcgcagcccttgagaaagaagttgcggctctggagaagggatccggcggcggaggatctggcggaggcggatctgggggcggaggctctttcgaagaagtgcagctggttgaatcaggtggcggcctggttcaacctggcggatctctgagactgagctgtgccgccagcggctacagcatcaccaatgactacgcctggaactgggtccgacaggcccctggaaaaggactggaatgggtcggatatatcagctactccggctacaccacctacaatcccagcatcaagagccggttcaccatcagcagagacaccagcaagaacaccctgtacctccagatgaactccctgagagccgaggacaccgccgtgtactattgtgccagatggaccagcggcctggactattggggacagggaacactggtcaccgtgtcctctacgcgtatccagaaccctgatcctgccgtgtaccagctgcgggatagcaagagcagcgacaagagcgtgtgtctgttcaccgacttcgacagccagaccaacgtgtcccagagcaaggactccgacgtgtacatcaccgataagtgcgtgctggacatgcggagcatggacttcaagagcaactccgccgtggcctggtccaacaagtccgatttcgcctgcgccaacgccttcaacaacagcattatccccgaggacacattcttcccaagccccgagagcagctgcggctttaccagcgagagctaccagcagggcgtgctgagcgccaccatcctgtacgagatcctgctgggcaaggccaccctgtacgccgtgctggtgtctgccctggtgctgatggctatggtcaagcggaaggacagccgggga

SEQ ID NO: 38784 - DNA, 2004 bp, synthetic construct
  source 1..2004: mol_type = other DNA
atggccttaccagtgaccgccttgctcctgccgctggccttgctgctccacgccgccaggccggacatccagatgacacagagccctagcagcctgtctgccagcgtgggagacagagtgaccatcacatgcaaggccagcgacctgatccacaactggctggcctggtatcagcagaagcctggcaaggcccctaagctgctgatctacggcgctacctctctggaaacaggcgtgcccagcagattttctggcagcggctctggcaccgacttcaccctgacaatatccagcctccagcctgaggacttcgccacctactactgccagcagtactggaccacacctttcaccttcggccagggcaccaaggtggaaatcaaaagactcgagatccagaaccctgatcctgccgtgtaccagctgcgggatagcaagagcagcgacaagagcgtgtgtctgttcaccgacttcgacagccagaccaacgtgtcccagagcaaggactccgacgtgtacatcaccgataagtgcgtgctggacatgcggagcatggacttcaagagcaactccgccgtggcctggtccaacaagtccgatttcgcctgcgccaacgccttcaacaacagcattatccccgaggacacattcttcccaagccccgagagcagctgcggctttaccagcgagagctaccagcagggcgtgctgagcgccaccatcctgtacgagatcctgctgggcaaggccaccctgtacgccgtgctggtgtctgccctggtgctgatggctatggtcaagcggaaggacagccggggacgcgccaagagaagcggatctggcgtgaagcagaccctgaatttcgacctgctgaagctggctggcgacgtggaatccaacccaggccctactagtatggactggatttggcgcatccttttccttgtcggcgctgctaccggcgcccattccgggcccgaagttgctgccctcgagaaggaggtagcagctttggaaaaagaagtcgcagcccttgagaaagaagttgcggctctggagaagggatccggcggcggaggatctggcggaggcggatctgggggcggaggctctttcgaagaagtgcagctggttgaatcaggtggcggcctggttcaacctggcggatctctgagactgagctgtgccgccagcggctacagcatcaccaatgactacgcctggaactgggtccgacaggcccctggaaaaggactggaatgggtcggatatatcagctactccggctacaccacctacaatcccagcatcaagagccggttcaccatcagcagagacaccagcaagaacaccctgtacctccagatgaactccctgagagccgaggacaccgccgtgtactattgtgccagatggaccagcggcctggactattggggacagggaacactggtcaccgtgtcctctacgcgtgaggacctgaagaacgtgttcccacctgaggtggccgtgttcgagcctagcgaggccgagatcagccacacccagaaagccaccctcgtgtgcctggctaccggcttctaccccgaccatgtggaactgtcttggtgggtcaacggcaaagaggtgcacagcggcgtgtgtaccgacccccagccactgaaagaacagcccgccctgaacgacagccggtactgcctgagcagcagactgagagtgtccgccaccttctggcagaacccccggaaccacttcagatgccaggtgcagttctacggcctgagcgagaacgacgagtggacccaggacagagccaagcccgtgacccagatcgtgtctgccgaagcctggggcagagccgattgcgacgtgaagctggtggaaaagagcttcgagacagacaccaacctgaacttccagaacctgagcgtgatcggcttcagaatcctgctgctgaaagtggccggctttaacctgctgatgaccctgcggctgtggtccagc

SEQ ID NO: 38785 - DNA, 2262 bp, synthetic construct
  source 1..2262: mol_type = other DNA
atggccttaccagtgaccgccttgctcctgccgctggccttgctgctccacgccgccaggccggacatccagatgacacagagccctagcagcctgtctgccagcgtgggagacagagtgaccatcacatgcaaggccagcgacctgatccacaactggctggcctggtatcagcagaagcctggcaaggcccctaagctgctgatctacggcgctacctctctggaaacaggcgtgcccagcagattttctggcagcggctctggcaccgacttcaccctgacaatatccagcctccagcctgaggacttcgccacctactactgccagcagtactggaccacacctttcaccttcggccagggcaccaaggtggaaatcaaaagactcgaggacctgaagaacgtgttcccacctgaggtggccgtgttcgagcctagcgaggccgagatcagccacacccagaaagccaccctcgtgtgcctggctaccggcttctaccccgaccatgtggaactgtcttggtgggtcaacggcaaagaggtgcacagcggcgtgtgtaccgacccccagccactgaaagaacagcccgccctgaacgacagccggtactgcctgagcagcagactgagagtgtccgccaccttctggcagaacccccggaaccacttcagatgccaggtgcagttctacggcctgagcgagaacgacgagtggacccaggacagagccaagcccgtgacccagatcgtgtctgccgaagcctggggcagagccgattgcgacgtgaagctggtggaaaagagcttcgagacagacaccaacctgaacttccagaacctgagcgtgatcggcttcagaatcctgctgctgaaagtggccggctttaacctgctgatgaccctgcggctgtggtccagcagggccaagcgatctggatctggagcaacaaacttctcactactcaaacaagcaggtgacgtggaggagaatcccgggcctactagtatggactggatttggcgcatccttttccttgtcggcgctgctaccggcgcccattccgggccccaggttcagctgcaagagtctggcggaggacttgctcaagctggcggaagcctgagactgtcttgtgccgcctctggcagaaccttcagcatgggctggtttagacaggcccctggcaaagagagagagttcgtcgccgccatcacatacagcggcggcagcccttactacgcctcttctgtcagaggccggttcaccatcagccgggacaacgccaagaacaccgtgtacctccagatgaacagcctgaagccagaggacaccgccgtgtactactgtgccgccaatccaacctacggcagcgactggaatgccgagaattggggccagggcacccaagtgacagtgtctagtggatccggcggcggaggatctggcggaggcggatctgggggcggaggctctttcgaagaagtgcagctggttgaatcaggtggcggcctggttcaacctggcggatctctgagactgagctgtgccgccagcggctacagcatcaccaatgactacgcctggaactgggtccgacaggcccctggaaaaggactggaatgggtcggatatatcagctactccggctacaccacctacaatcccagcatcaagagccggttcaccatcagcagagacaccagcaagaacaccctgtacctccagatgaactccctgagagccgaggacaccgccgtgtactattgtgccagatggaccagcggcctggactattggggacagggaacactggtcaccgtgtcctctacgcgtatccagaaccctgatcctgccgtgtaccagctgcgggatagcaagagcagcgacaagagcgtgtgtctgttcaccgacttcgacagccagaccaacgtgtcccagagcaaggactccgacgtgtacatcaccgataagtgcgtgctggacatgcggagcatggacttcaagagcaactccgccgtggcctggtccaacaagtccgatttcgcctgcgccaacgccttcaacaacagcattatccccgaggacacattcttcccaagccccgagagcagctgcggctttaccagcgagagctaccagcagggcgtgctgagcgccaccatcctgtacgagatcctgctgggcaaggccaccctgtacgccgtgctggtgtctgccctggtgctgatggctatggtcaagcggaaggacagccgggga

SEQ ID NO: 38786 - DNA, 2274 bp, synthetic construct
  source 1..2274: mol_type = other DNA
atggccttaccagtgaccgccttgctcctgccgctggccttgctgctccacgccgccaggccggacatccagatgacacagagccctagcagcctgtctgccagcgtgggagacagagtgaccatcacatgcaaggccagcgacctgatccacaactggctggcctggtatcagcagaagcctggcaaggcccctaagctgctgatctacggcgctacctctctggaaacaggcgtgcccagcagattttctggcagcggctctggcaccgacttcaccctgacaatatccagcctccagcctgaggacttcgccacctactactgccagcagtactggaccacacctttcaccttcggccagggcaccaaggtggaaatcaaaagactcgagatccagaaccctgatcctgccgtgtaccagctgcgggatagcaagagcagcgacaagagcgtgtgtctgttcaccgacttcgacagccagaccaacgtgtcccagagcaaggactccgacgtgtacatcaccgataagtgcgtgctggacatgcggagcatggacttcaagagcaactccgccgtggcctggtccaacaagtccgatttcgcctgcgccaacgccttcaacaacagcattatccccgaggacacattcttcccaagccccgagagcagctgcggctttaccagcgagagctaccagcagggcgtgctgagcgccaccatcctgtacgagatcctgctgggcaaggccaccctgtacgccgtgctggtgtctgccctggtgctgatggctatggtcaagcggaaggacagccggggacgcgccaagagaagcggatctggcgtgaagcagaccctgaatttcgacctgctgaagctggctggcgacgtggaatccaacccaggccctactagtatggactggatttggcgcatccttttccttgtcggcgctgctaccggcgcccattccgggccccaggttcagctgcaagagtctggcggaggacttgctcaagctggcggaagcctgagactgtcttgtgccgcctctggcagaaccttcagcatgggctggtttagacaggcccctggcaaagagagagagttcgtcgccgccatcacatacagcggcggcagcccttactacgcctcttctgtcagaggccggttcaccatcagccgggacaacgccaagaacaccgtgtacctccagatgaacagcctgaagccagaggacaccgccgtgtactactgtgccgccaatccaacctacggcagcgactggaatgccgagaattggggccagggcacccaagtgacagtgtctagtggatccggcggcggaggatctggcggaggcggatctgggggcggaggctctttcgaagaagtgcagctggttgaatcaggtggcggcctggttcaacctggcggatctctgagactgagctgtgccgccagcggctacagcatcaccaatgactacgcctggaactgggtccgacaggcccctggaaaaggactggaatgggtcggatatatcagctactccggctacaccacctacaatcccagcatcaagagccggttcaccatcagcagagacaccagcaagaacaccctgtacctccagatgaactccctgagagccgaggacaccgccgtgtactattgtgccagatggaccagcggcctggactattggggacagggaacactggtcaccgtgtcctctacgcgtgaggacctgaagaacgtgttcccacctgaggtggccgtgttcgagcctagcgaggccgagatcagccacacccagaaagccaccctcgtgtgcctggctaccggcttctaccccgaccatgtggaactgtcttggtgggtcaacggcaaagaggtgcacagcggcgtgtgtaccgacccccagccactgaaagaacagcccgccctgaacgacagccggtactgcctgagcagcagactgagagtgtccgccaccttctggcagaacccccggaaccacttcagatgccaggtgcagttctacggcctgagcgagaacgacgagtggacccaggacagagccaagcccgtgacccagatcgtgtctgccgaagcctggggcagagccgattgcgacgtgaagctggtggaaaagagcttcgagacagacaccaacctgaacttccagaacctgagcgtgatcggcttcagaatcctgctgctgaaagtggccggctttaacctgctgatgaccctgcggctgtggtccagc

SEQ ID NO: 38787 - DNA, 2280 bp, synthetic construct
  source 1..2280: mol_type = other DNA
atggccttaccagtgaccgccttgctcctgccgctggccttgctgctccacgccgccaggccggaagtgcaactggtggaatctggaggctctctggtgcagccagggggaagcctgagactgtcttgtgccgcttccggcttcaccttcgacgactacgccatgagctgggtgcgccaggtgccaggcaaaggcctggaatgggtgtccagcatcaactggagcggcacccacaccgattacgccgactccgtgaaaggcagattcacaatcagcagaaacaacgccaacaataccctgtacctgcagatgaactccctgaagtctgaggatacagcagtgtattattgcgccaagaactggcgggacgccggcaccacttggtttgagaaaagcggctctgccggacagggaacccaagtgacagtgtcctccggtaccggcggaggcggatctggcggcggaggtagcggtggcggaggatctgaattcgacatccagatgacacagagccctagcagcctgtctgccagcgtgggagacagagtgaccatcacatgcaaggccagcgacctgatccacaactggctggcctggtatcagcagaagcctggcaaggcccctaagctgctgatctacggcgctacctctctggaaacaggcgtgcccagcagattttctggcagcggctctggcaccgacttcaccctgacaatatccagcctccagcctgaggacttcgccacctactactgccagcagtactggaccacacctttcaccttcggccagggcaccaaggtggaaatcaaaagactcgaggacctgaagaacgtgttcccacctgaggtggccgtgttcgagcctagcgaggccgagatcagccacacccagaaagccaccctcgtgtgcctggctaccggcttctaccccgaccatgtggaactgtcttggtgggtcaacggcaaagaggtgcacagcggcgtgtgtaccgacccccagccactgaaagaacagcccgccctgaacgacagccggtactgcctgagcagcagactgagagtgtccgccaccttctggcagaacccccggaaccacttcagatgccaggtgcagttctacggcctgagcgagaacgacgagtggacccaggacagagccaagcccgtgacccagatcgtgtctgccgaagcctggggcagagccgattgcgacgtgaagctggtggaaaagagcttcgagacagacaccaacctgaacttccagaacctgagcgtgatcggcttcagaatcctgctgctgaaagtggccggctttaacctgctgatgaccctgcggctgtggtccagcagggccaagcgatctggatctggagcaacaaacttctcactactcaaacaagcaggtgacgtggaggagaatcccgggcctactagtatggactggatttggcgcatccttttccttgtcggcgctgctaccggcgcgcattccttcgaagaagtgcagctggttgaatcaggtggcggcctggttcaacctggcggatctctgagactgagctgtgccgccagcggctacagcatcaccaatgactacgcctggaactgggtccgacaggcccctggaaaaggactggaatgggtcggatatatcagctactccggctacaccacctacaatcccagcatcaagagccggttcaccatcagcagagacaccagcaagaacaccctgtacctccagatgaactccctgagagccgaggacaccgccgtgtactattgtgccagatggaccagcggcctggactattggggacagggaacactggtcaccgtgtcctctacgcgtatccagaaccctgatcctgccgtgtaccagctgcgggatagcaagagcagcgacaagagcgtgtgtctgttcaccgacttcgacagccagaccaacgtgtcccagagcaaggactccgacgtgtacatcaccgataagtgcgtgctggacatgcggagcatggacttcaagagcaactccgccgtggcctggtccaacaagtccgatttcgcctgcgccaacgccttcaacaacagcattatccccgaggacacattcttcccaagccccgagagcagctgcggctttaccagcgagagctaccagcagggcgtgctgagcgccaccatcctgtacgagatcctgctgggcaaggccaccctgtacgccgtgctggtgtctgccctggtgctgatggctatggtcaagcggaaggacagccgggga

SEQ ID NO: 38788 - DNA, 2292 bp, synthetic construct
  source 1..2292: mol_type = other DNA
atggccttaccagtgaccgccttgctcctgccgctggccttgctgctccacgccgccaggccggaagtgcaactggtggaatctggaggctctctggtgcagccagggggaagcctgagactgtcttgtgccgcttccggcttcaccttcgacgactacgccatgagctgggtgcgccaggtgccaggcaaaggcctggaatgggtgtccagcatcaactggagcggcacccacaccgattacgccgactccgtgaaaggcagattcacaatcagcagaaacaacgccaacaataccctgtacctgcagatgaactccctgaagtctgaggatacagcagtgtattattgcgccaagaactggcgggacgccggcaccacttggtttgagaaaagcggctctgccggacagggaacccaagtgacagtgtcctccggtaccggcggaggcggatctggcggcggaggtagcggtggcggaggatctgaattcgacatccagatgacacagagccctagcagcctgtctgccagcgtgggagacagagtgaccatcacatgcaaggccagcgacctgatccacaactggctggcctggtatcagcagaagcctggcaaggcccctaagctgctgatctacggcgctacctctctggaaacaggcgtgcccagcagattttctggcagcggctctggcaccgacttcaccctgacaatatccagcctccagcctgaggacttcgccacctactactgccagcagtactggaccacacctttcaccttcggccagggcaccaaggtggaaatcaaaagactcgagatccagaaccctgatcctgccgtgtaccagctgcgggatagcaagagcagcgacaagagcgtgtgtctgttcaccgacttcgacagccagaccaacgtgtcccagagcaaggactccgacgtgtacatcaccgataagtgcgtgctggacatgcggagcatggacttcaagagcaactccgccgtggcctggtccaacaagtccgatttcgcctgcgccaacgccttcaacaacagcattatccccgaggacacattcttcccaagccccgagagcagctgcggctttaccagcgagagctaccagcagggcgtgctgagcgccaccatcctgtacgagatcctgctgggcaaggccaccctgtacgccgtgctggtgtctgccctggtgctgatggctatggtcaagcggaaggacagccggggacgcgccaagagaagcggatctggcgtgaagcagaccctgaatttcgacctgctgaagctggctggcgacgtggaatccaacccaggccctactagtatggactggatttggcgcatccttttccttgtcggcgctgctaccggcgcgcattccttcgaagaagtgcagctggttgaatcaggtggcggcctggttcaacctggcggatctctgagactgagctgtgccgccagcggctacagcatcaccaatgactacgcctggaactgggtccgacaggcccctggaaaaggactggaatgggtcggatatatcagctactccggctacaccacctacaatcccagcatcaagagccggttcaccatcagcagagacaccagcaagaacaccctgtacctccagatgaactccctgagagccgaggacaccgccgtgtactattgtgccagatggaccagcggcctggactattggggacagggaacactggtcaccgtgtcctctacgcgtgaggacctgaagaacgtgttcccacctgaggtggccgtgttcgagcctagcgaggccgagatcagccacacccagaaagccaccctcgtgtgcctggctaccggcttctaccccgaccatgtggaactgtcttggtgggtcaacggcaaagaggtgcacagcggcgtgtgtaccgacccccagccactgaaagaacagcccgccctgaacgacagccggtactgcctgagcagcagactgagagtgtccgccaccttctggcagaacccccggaaccacttcagatgccaggtgcagttctacggcctgagcgagaacgacgagtggacccaggacagagccaagcccgtgacccagatcgtgtctgccgaagcctggggcagagccgattgcgacgtgaagctggtggaaaagagcttcgagacagacaccaacctgaacttccagaacctgagcgtgatcggcttcagaatcctgctgctgaaagtggccggctttaacctgctgatgaccctgcggctgtggtccagc

SEQ ID NO: 38789 - DNA, 2274 bp, synthetic construct
  source 1..2274: mol_type = other DNA
atggccttaccagtgaccgccttgctcctgccgctggccttgctgctccacgccgccaggccggaagttcagctgcttgagtctggcggaggactggttcaacctggcggaagcctgagactgtcttgtgccgccagcggcttcatcttcagcagctacgccatgagctgggtccgacaggctcctggaaagggccaagaatgggtttccggcgttagcggcacaggcgtgaacacctactacgccgatagcgtgaagggcagattcaccatcagccgggacaacagcaagaacaccctgtacctccagatgaacagcctgagagccgaggacaccgccgtgtactattgtgcctctggcaaaggctgggacagcggctcttggtacgaggactatagaggccagggcaccctggtcacagtttcttcaggtaccggcggaggcggatctggcggcggaggtagcggtggcggaggatctgaattcgacatccagatgacacagagccctagcagcctgtctgccagcgtgggagacagagtgaccatcacatgcaaggccagcgacctgatccacaactggctggcctggtatcagcagaagcctggcaaggcccctaagctgctgatctacggcgctacctctctggaaacaggcgtgcccagcagattttctggcagcggctctggcaccgacttcaccctgacaatatccagcctccagcctgaggacttcgccacctactactgccagcagtactggaccacacctttcaccttcggccagggcaccaaggtggaaatcaaaagactcgaggacctgaagaacgtgttcccacctgaggtggccgtgttcgagcctagcgaggccgagatcagccacacccagaaagccaccctcgtgtgcctggctaccggcttctaccccgaccatgtggaactgtcttggtgggtcaacggcaaagaggtgcacagcggcgtgtgtaccgacccccagccactgaaagaacagcccgccctgaacgacagccggtactgcctgagcagcagactgagagtgtccgccaccttctggcagaacccccggaaccacttcagatgccaggtgcagttctacggcctgagcgagaacgacgagtggacccaggacagagccaagcccgtgacccagatcgtgtctgccgaagcctggggcagagccgattgcgacgtgaagctggtggaaaagagcttcgagacagacaccaacctgaacttccagaacctgagcgtgatcggcttcagaatcctgctgctgaaagtggccggctttaacctgctgatgaccctgcggctgtggtccagcagggccaagcgatctggatctggagcaacaaacttctcactactcaaacaagcaggtgacgtggaggagaatcccgggcctactagtatggactggatttggcgcatccttttccttgtcggcgctgctaccggcgcgcattccttcgaagaagtgcagctggttgaatcaggtggcggcctggttcaacctggcggatctctgagactgagctgtgccgccagcggctacagcatcaccaatgactacgcctggaactgggtccgacaggcccctggaaaaggactggaatgggtcggatatatcagctactccggctacaccacctacaatcccagcatcaagagccggttcaccatcagcagagacaccagcaagaacaccctgtacctccagatgaactccctgagagccgaggacaccgccgtgtactattgtgccagatggaccagcggcctggactattggggacagggaacactggtcaccgtgtcctctacgcgtatccagaaccctgatcctgccgtgtaccagctgcgggatagcaagagcagcgacaagagcgtgtgtctgttcaccgacttcgacagccagaccaacgtgtcccagagcaaggactccgacgtgtacatcaccgataagtgcgtgctggacatgcggagcatggacttcaagagcaactccgccgtggcctggtccaacaagtccgatttcgcctgcgccaacgccttcaacaacagcattatccccgaggacacattcttcccaagccccgagagcagctgcggctttaccagcgagagctaccagcagggcgtgctgagcgccaccatcctgtacgagatcctgctgggcaaggccaccctgtacgccgtgctggtgtctgccctggtgctgatggctatggtcaagcggaaggacagccgggga

SEQ ID NO: 38790 - DNA, 2286 bp, synthetic construct
  source 1..2286: mol_type = other DNA
atggccttaccagtgaccgccttgctcctgccgctggccttgctgctccacgccgccaggccggaagttcagctgcttgagtctggcggaggactggttcaacctggcggaagcctgagactgtcttgtgccgccagcggcttcatcttcagcagctacgccatgagctgggtccgacaggctcctggaaagggccaagaatgggtttccggcgttagcggcacaggcgtgaacacctactacgccgatagcgtgaagggcagattcaccatcagccgggacaacagcaagaacaccctgtacctccagatgaacagcctgagagccgaggacaccgccgtgtactattgtgcctctggcaaaggctgggacagcggctcttggtacgaggactatagaggccagggcaccctggtcacagtttcttcaggtaccggcggaggcggatctggcggcggaggtagcggtggcggaggatctgaattcgacatccagatgacacagagccctagcagcctgtctgccagcgtgggagacagagtgaccatcacatgcaaggccagcgacctgatccacaactggctggcctggtatcagcagaagcctggcaaggcccctaagctgctgatctacggcgctacctctctggaaacaggcgtgcccagcagattttctggcagcggctctggcaccgacttcaccctgacaatatccagcctccagcctgaggacttcgccacctactactgccagcagtactggaccacacctttcaccttcggccagggcaccaaggtggaaatcaaaagactcgagatccagaaccctgatcctgccgtgtaccagctgcgggatagcaagagcagcgacaagagcgtgtgtctgttcaccgacttcgacagccagaccaacgtgtcccagagcaaggactccgacgtgtacatcaccgataagtgcgtgctggacatgcggagcatggacttcaagagcaactccgccgtggcctggtccaacaagtccgatttcgcctgcgccaacgccttcaacaacagcattatccccgaggacacattcttcccaagccccgagagcagctgcggctttaccagcgagagctaccagcagggcgtgctgagcgccaccatcctgtacgagatcctgctgggcaaggccaccctgtacgccgtgctggtgtctgccctggtgctgatggctatggtcaagcggaaggacagccggggacgcgccaagagaagcggatctggcgtgaagcagaccctgaatttcgacctgctgaagctggctggcgacgtggaatccaacccaggccctactagtatggactggatttggcgcatccttttccttgtcggcgctgctaccggcgcgcattccttcgaagaagtgcagctggttgaatcaggtggcggcctggttcaacctggcggatctctgagactgagctgtgccgccagcggctacagcatcaccaatgactacgcctggaactgggtccgacaggcccctggaaaaggactggaatgggtcggatatatcagctactccggctacaccacctacaatcccagcatcaagagccggttcaccatcagcagagacaccagcaagaacaccctgtacctccagatgaactccctgagagccgaggacaccgccgtgtactattgtgccagatggaccagcggcctggactattggggacagggaacactggtcaccgtgtcctctacgcgtgaggacctgaagaacgtgttcccacctgaggtggccgtgttcgagcctagcgaggccgagatcagccacacccagaaagccaccctcgtgtgcctggctaccggcttctaccccgaccatgtggaactgtcttggtgggtcaacggcaaagaggtgcacagcggcgtgtgtaccgacccccagccactgaaagaacagcccgccctgaacgacagccggtactgcctgagcagcagactgagagtgtccgccaccttctggcagaacccccggaaccacttcagatgccaggtgcagttctacggcctgagcgagaacgacgagtggacccaggacagagccaagcccgtgacccagatcgtgtctgccgaagcctggggcagagccgattgcgacgtgaagctggtggaaaagagcttcgagacagacaccaacctgaacttccagaacctgagcgtgatcggcttcagaatcctgctgctgaaagtggccggctttaacctgctgatgaccctgcggctgtggtccagc

SEQ ID NO: 38791 - DNA, 2178 bp, synthetic construct
  source 1..2178: mol_type = other DNA
atggccttaccagtgaccgccttgctcctgccgctggccttgctgctccacgccgccaggccgatgctgcccgctcctaagaatctggtggtgtccagaatcaccgaggacagcgccagactgtcttggacagctcctgatgccgccttcgacagcttccccatccggtacatcgagacactgatctggggcgaagccatctggctggatgtgcctggaagcgagagaagctacgacctgaccggactgaagcctggcacagagtatgccgtggtcatcaccggcgtgaaaggcggcagattctctagccctctggtggcctctttcaccaccggtaccggcggaggcggatctggcggcggaggtagcggtggcggaggatctgaattcgacatccagatgacacagagccctagcagcctgtctgccagcgtgggagacagagtgaccatcacatgcaaggccagcgacctgatccacaactggctggcctggtatcagcagaagcctggcaaggcccctaagctgctgatctacggcgctacctctctggaaacaggcgtgcccagcagattttctggcagcggctctggcaccgacttcaccctgacaatatccagcctccagcctgaggacttcgccacctactactgccagcagtactggaccacacctttcaccttcggccagggcaccaaggtggaaatcaaaagactcgaggacctgaagaacgtgttcccacctgaggtggccgtgttcgagcctagcgaggccgagatcagccacacccagaaagccaccctcgtgtgcctggctaccggcttctaccccgaccatgtggaactgtcttggtgggtcaacggcaaagaggtgcacagcggcgtgtgtaccgacccccagccactgaaagaacagcccgccctgaacgacagccggtactgcctgagcagcagactgagagtgtccgccaccttctggcagaacccccggaaccacttcagatgccaggtgcagttctacggcctgagcgagaacgacgagtggacccaggacagagccaagcccgtgacccagatcgtgtctgccgaagcctggggcagagccgattgcgacgtgaagctggtggaaaagagcttcgagacagacaccaacctgaacttccagaacctgagcgtgatcggcttcagaatcctgctgctgaaagtggccggctttaacctgctgatgaccctgcggctgtggtccagcagggccaagcgatctggatctggagcaacaaacttctcactactcaaacaagcaggtgacgtggaggagaatcccgggcctactagtatggactggatttggcgcatccttttccttgtcggcgctgctaccggcgcgcattccttcgaagaagtgcagctggttgaatcaggtggcggcctggttcaacctggcggatctctgagactgagctgtgccgccagcggctacagcatcaccaatgactacgcctggaactgggtccgacaggcccctggaaaaggactggaatgggtcggatatatcagctactccggctacaccacctacaatcccagcatcaagagccggttcaccatcagcagagacaccagcaagaacaccctgtacctccagatgaactccctgagagccgaggacaccgccgtgtactattgtgccagatggaccagcggcctggactattggggacagggaacactggtcaccgtgtcctctacgcgtatccagaaccctgatcctgccgtgtaccagctgcgggatagcaagagcagcgacaagagcgtgtgtctgttcaccgacttcgacagccagaccaacgtgtcccagagcaaggactccgacgtgtacatcaccgataagtgcgtgctggacatgcggagcatggacttcaagagcaactccgccgtggcctggtccaacaagtccgatttcgcctgcgccaacgccttcaacaacagcattatccccgaggacacattcttcccaagccccgagagcagctgcggctttaccagcgagagctaccagcagggcgtgctgagcgccaccatcctgtacgagatcctgctgggcaaggccaccctgtacgccgtgctggtgtctgccctggtgctgatggctatggtcaagcggaaggacagccgggga

SEQ ID NO: 38792 - DNA, 2190 bp, synthetic construct
  source 1..2190: mol_type = other DNA
atggccttaccagtgaccgccttgctcctgccgctggccttgctgctccacgccgccaggccgatgctgcccgctcctaagaatctggtggtgtccagaatcaccgaggacagcgccagactgtcttggacagctcctgatgccgccttcgacagcttccccatccggtacatcgagacactgatctggggcgaagccatctggctggatgtgcctggaagcgagagaagctacgacctgaccggactgaagcctggcacagagtatgccgtggtcatcaccggcgtgaaaggcggcagattctctagccctctggtggcctctttcaccaccggtaccggcggaggcggatctggcggcggaggtagcggtggcggaggatctgaattcgacatccagatgacacagagccctagcagcctgtctgccagcgtgggagacagagtgaccatcacatgcaaggccagcgacctgatccacaactggctggcctggtatcagcagaagcctggcaaggcccctaagctgctgatctacggcgctacctctctggaaacaggcgtgcccagcagattttctggcagcggctctggcaccgacttcaccctgacaatatccagcctccagcctgaggacttcgccacctactactgccagcagtactggaccacacctttcaccttcggccagggcaccaaggtggaaatcaaaagactcgagatccagaaccctgatcctgccgtgtaccagctgcgggatagcaagagcagcgacaagagcgtgtgtctgttcaccgacttcgacagccagaccaacgtgtcccagagcaaggactccgacgtgtacatcaccgataagtgcgtgctggacatgcggagcatggacttcaagagcaactccgccgtggcctggtccaacaagtccgatttcgcctgcgccaacgccttcaacaacagcattatccccgaggacacattcttcccaagccccgagagcagctgcggctttaccagcgagagctaccagcagggcgtgctgagcgccaccatcctgtacgagatcctgctgggcaaggccaccctgtacgccgtgctggtgtctgccctggtgctgatggctatggtcaagcggaaggacagccggggacgcgccaagagaagcggatctggcgtgaagcagaccctgaatttcgacctgctgaagctggctggcgacgtggaatccaacccaggccctactagtatggactggatttggcgcatccttttccttgtcggcgctgctaccggcgcgcattccttcgaagaagtgcagctggttgaatcaggtggcggcctggttcaacctggcggatctctgagactgagctgtgccgccagcggctacagcatcaccaatgactacgcctggaactgggtccgacaggcccctggaaaaggactggaatgggtcggatatatcagctactccggctacaccacctacaatcccagcatcaagagccggttcaccatcagcagagacaccagcaagaacaccctgtacctccagatgaactccctgagagccgaggacaccgccgtgtactattgtgccagatggaccagcggcctggactattggggacagggaacactggtcaccgtgtcctctacgcgtgaggacctgaagaacgtgttcccacctgaggtggccgtgttcgagcctagcgaggccgagatcagccacacccagaaagccaccctcgtgtgcctggctaccggcttctaccccgaccatgtggaactgtcttggtgggtcaacggcaaagaggtgcacagcggcgtgtgtaccgacccccagccactgaaagaacagcccgccctgaacgacagccggtactgcctgagcagcagactgagagtgtccgccaccttctggcagaacccccggaaccacttcagatgccaggtgcagttctacggcctgagcgagaacgacgagtggacccaggacagagccaagcccgtgacccagatcgtgtctgccgaagcctggggcagagccgattgcgacgtgaagctggtggaaaagagcttcgagacagacaccaacctgaacttccagaacctgagcgtgatcggcttcagaatcctgctgctgaaagtggccggctttaacctgctgatgaccctgcggctgtggtccagc

SEQ ID NO: 38793 - DNA, 2265 bp, synthetic construct
  source 1..2265: mol_type = other DNA
atggccttaccagtgaccgccttgctcctgccgctggccttgctgctccacgccgccaggccggaggtgcagctggttgaatctggcggaggactggttcagcctggcggatctctgagactgtcttgtgccgccagcggcttcaacatcaaggatacctgtatcggctgggttcgcagagcccctggcaaagaggaagaactggtcgccaaaatctgcaagtacagcggccacaccagatacgccgacagcgtgaagggcagattcaccatcagcgccgacaccagcaagaacaccgcctacctccagatgaacagcctgagagccgaggacaccgccgtgtactattgtgccgctgtgtccgtcagagatgggcactacaattactggggccagggcaccaccgtgaccgtttcttcaggtaccggcggaggcggatctggcggcggaggtagcggtggcggaggatctgaattcgacatccagatgacacagagccctagcagcctgtctgccagcgtgggagacagagtgaccatcacatgcaaggccagcgacctgatccacaactggctggcctggtatcagcagaagcctggcaaggcccctaagctgctgatctacggcgctacctctctggaaacaggcgtgcccagcagattttctggcagcggctctggcaccgacttcaccctgacaatatccagcctccagcctgaggacttcgccacctactactgccagcagtactggaccacacctttcaccttcggccagggcaccaaggtggaaatcaaaagactcgaggacctgaagaacgtgttcccacctgaggtggccgtgttcgagcctagcgaggccgagatcagccacacccagaaagccaccctcgtgtgcctggctaccggcttctaccccgaccatgtggaactgtcttggtgggtcaacggcaaagaggtgcacagcggcgtgtgtaccgacccccagccactgaaagaacagcccgccctgaacgacagccggtactgcctgagcagcagactgagagtgtccgccaccttctggcagaacccccggaaccacttcagatgccaggtgcagttctacggcctgagcgagaacgacgagtggacccaggacagagccaagcccgtgacccagatcgtgtctgccgaagcctggggcagagccgattgcgacgtgaagctggtggaaaagagcttcgagacagacaccaacctgaacttccagaacctgagcgtgatcggcttcagaatcctgctgctgaaagtggccggctttaacctgctgatgaccctgcggctgtggtccagcagggccaagcgatctggatctggagcaacaaacttctcactactcaaacaagcaggtgacgtggaggagaatcccgggcctactagtatggactggatttggcgcatccttttccttgtcggcgctgctaccggcgcgcattccttcgaagaagtgcagctggttgaatcaggtggcggcctggttcaacctggcggatctctgagactgagctgtgccgccagcggctacagcatcaccaatgactacgcctggaactgggtccgacaggcccctggaaaaggactggaatgggtcggatatatcagctactccggctacaccacctacaatcccagcatcaagagccggttcaccatcagcagagacaccagcaagaacaccctgtacctccagatgaactccctgagagccgaggacaccgccgtgtactattgtgccagatggaccagcggcctggactattggggacagggaacactggtcaccgtgtcctctacgcgtatccagaaccctgatcctgccgtgtaccagctgcgggatagcaagagcagcgacaagagcgtgtgtctgttcaccgacttcgacagccagaccaacgtgtcccagagcaaggactccgacgtgtacatcaccgataagtgcgtgctggacatgcggagcatggacttcaagagcaactccgccgtggcctggtccaacaagtccgatttcgcctgcgccaacgccttcaacaacagcattatccccgaggacacattcttcccaagccccgagagcagctgcggctttaccagcgagagctaccagcagggcgtgctgagcgccaccatcctgtacgagatcctgctgggcaaggccaccctgtacgccgtgctggtgtctgccctggtgctgatggctatggtcaagcggaaggacagccgggga

SEQ ID NO: 38794 - DNA, 2277 bp, synthetic construct
  source 1..2277: mol_type = other DNA
atggccttaccagtgaccgccttgctcctgccgctggccttgctgctccacgccgccaggccggaggtgcagctggttgaatctggcggaggactggttcagcctggcggatctctgagactgtcttgtgccgccagcggcttcaacatcaaggatacctgtatcggctgggttcgcagagcccctggcaaagaggaagaactggtcgccaaaatctgcaagtacagcggccacaccagatacgccgacagcgtgaagggcagattcaccatcagcgccgacaccagcaagaacaccgcctacctccagatgaacagcctgagagccgaggacaccgccgtgtactattgtgccgctgtgtccgtcagagatgggcactacaattactggggccagggcaccaccgtgaccgtttcttcaggtaccggcggaggcggatctggcggcggaggtagcggtggcggaggatctgaattcgacatccagatgacacagagccctagcagcctgtctgccagcgtgggagacagagtgaccatcacatgcaaggccagcgacctgatccacaactggctggcctggtatcagcagaagcctggcaaggcccctaagctgctgatctacggcgctacctctctggaaacaggcgtgcccagcagattttctggcagcggctctggcaccgacttcaccctgacaatatccagcctccagcctgaggacttcgccacctactactgccagcagtactggaccacacctttcaccttcggccagggcaccaaggtggaaatcaaaagactcgagatccagaaccctgatcctgccgtgtaccagctgcgggatagcaagagcagcgacaagagcgtgtgtctgttcaccgacttcgacagccagaccaacgtgtcccagagcaaggactccgacgtgtacatcaccgataagtgcgtgctggacatgcggagcatggacttcaagagcaactccgccgtggcctggtccaacaagtccgatttcgcctgcgccaacgccttcaacaacagcattatccccgaggacacattcttcccaagccccgagagcagctgcggctttaccagcgagagctaccagcagggcgtgctgagcgccaccatcctgtacgagatcctgctgggcaaggccaccctgtacgccgtgctggtgtctgccctggtgctgatggctatggtcaagcggaaggacagccggggacgcgccaagagaagcggatctggcgtgaagcagaccctgaatttcgacctgctgaagctggctggcgacgtggaatccaacccaggccctactagtatggactggatttggcgcatccttttccttgtcggcgctgctaccggcgcgcattccttcgaagaagtgcagctggttgaatcaggtggcggcctggttcaacctggcggatctctgagactgagctgtgccgccagcggctacagcatcaccaatgactacgcctggaactgggtccgacaggcccctggaaaaggactggaatgggtcggatatatcagctactccggctacaccacctacaatcccagcatcaagagccggttcaccatcagcagagacaccagcaagaacaccctgtacctccagatgaactccctgagagccgaggacaccgccgtgtactattgtgccagatggaccagcggcctggactattggggacagggaacactggtcaccgtgtcctctacgcgtgaggacctgaagaacgtgttcccacctgaggtggccgtgttcgagcctagcgaggccgagatcagccacacccagaaagccaccctcgtgtgcctggctaccggcttctaccccgaccatgtggaactgtcttggtgggtcaacggcaaagaggtgcacagcggcgtgtgtaccgacccccagccactgaaagaacagcccgccctgaacgacagccggtactgcctgagcagcagactgagagtgtccgccaccttctggcagaacccccggaaccacttcagatgccaggtgcagttctacggcctgagcgagaacgacgagtggacccaggacagagccaagcccgtgacccagatcgtgtctgccgaagcctggggcagagccgattgcgacgtgaagctggtggaaaagagcttcgagacagacaccaacctgaacttccagaacctgagcgtgatcggcttcagaatcctgctgctgaaagtggccggctttaacctgctgatgaccctgcggctgtggtccagc

SEQ ID NO: 38795 - DNA, 3381 bp, synthetic construct
  source 1..3381: mol_type = other DNA
atggccttaccagtgaccgccttgctcctgccgctggccttgctgctccacgccgccaggccggaagtgcagctggttgaatctggcggaggactggttcaggctggcggatctctgagactgtcttgtgccgccagcggcagaacctttagcatgggctggtttagacaggcccctggcaaagagagagagttcgtcgccgccatcacatactctggcggcagcccttactacgccgactctgtgaagggcagattcaccatcagccgggacaacgccaagaacaccgtgtacctccagatgaacagcctgaagcctgaggacaccgccgtgtactactgcgccgccaatccaacatacggcagcgactggaacgccgagaattggggccagggaacccaagtgacagtgtctagcggtaccggcggaggcggatctggcggcggaggtagcggtggcggaggatctgaattcgacatccagatgacacagagccctagcagcctgtctgccagcgtgggagacagagtgaccatcacatgcaaggccagcgacctgatccacaactggctggcctggtatcagcagaagcctggcaaggcccctaagctgctgatctacggcgctacctctctggaaacaggcgtgcccagcagattttctggcagcggctctggcaccgacttcaccctgacaatatccagcctccagcctgaggacttcgccacctactactgccagcagtactggaccacacctttcaccttcggccagggcaccaaggtggaaatcaaaagactcgaggacctgaagaacgtgttcccacctgaggtggccgtgttcgagcctagcgaggccgagatcagccacacccagaaagccaccctcgtgtgcctggctaccggcttctaccccgaccatgtggaactgtcttggtgggtcaacggcaaagaggtgcacagcggcgtgtgtaccgacccccagccactgaaagaacagcccgccctgaacgacagccggtactgcctgagcagcagactgagagtgtccgccaccttctggcagaacccccggaaccacttcagatgccaggtgcagttctacggcctgagcgagaacgacgagtggacccaggacagagccaagcccgtgacccagatcgtgtctgccgaagcctggggcagagccgattgcgacgtgaagctggtggaaaagagcttcgagacagacaccaacctgaacttccagaacctgagcgtgatcggcttcagaatcctgctgctgaaagtggccggctttaacctgctgatgaccctgcggctgtggtccagcagggccaagcgatctggatctggagcaacaaacttctcactactcaaacaagcaggtgacgtggaggagaatcccgggcctactagtgccaccatggactggatttggcgcatccttttccttgtcggcgctgctaccggcgcccattccgggcccgaagtgcaactggttgaatccggtggcggcctggtgcaagcaggcggatctctcagacttagctgtgccgcctccggcagaaccttcacaatgggatggtttaggcaggctccagggaaagagagagagttcgtcgccgccatctctctgtctcccacactggcctactacgccgactctgtgaaaggccggttcaccatctccagagataatgccaagaacaccgtggtgctgcaaatgaactctctgaaacccgaggatacagccctgtactattgtgccgctgaccggaagtccgtgatgagcatcagacccgattactggggacagggcacacaagtcacagtgtcctctggatccggcggcggaggatctggcggaggcggatctgggggcggaggctctttcgaagaagtgcagctggttgaatcaggtggcggcctggttcaacctggcggatctctgagactgagctgtgccgccagcggctacagcatcaccaatgactacgcctggaactgggtccgacaggcccctggaaaaggactggaatgggtcggatatatcagctactccggctacaccacctacaatcccagcatcaagagccggttcaccatcagcagagacaccagcaagaacaccctgtacctccagatgaactccctgagagccgaggacaccgccgtgtactattgtgccagatggaccagcggcctggactattggggacagggaacactggtcaccgtgtcctctacgcgtatccagaaccctgatcctgccgtgtaccagctgcgggatagcaagagcagcgacaagagcgtgtgtctgttcaccgacttcgacagccagaccaacgtgtcccagagcaaggactccgacgtgtacatcaccgataagtgcgtgctggacatgcggagcatggacttcaagagcaactccgccgtggcctggtccaacaagtccgatttcgcctgcgccaacgccttcaacaacagcattatccccgaggacacattcttcccaagccccgagagcagctgcggctttaccagcgagagctaccagcagggcgtgctgagcgccaccatcctgtacgagatcctgctgggcaaggccaccctgtacgccgtgctggtgtctgccctggtgctgatggctatggtcaagcggaaggacagccggggacgcgccaagagaagcggatctggcgtgaagcagaccctgaatttcgacctgctgaagctggctggcgacgtggaatccaacccaggcccttctagaggccatatgaccgagtacaagcccacggtgcgcctcgccacccgcgacgacgtccccagggccgtacgcaccctcgccgccgcgttcgccgactaccccgccacgcgccacaccgtcgatccggaccgccacatcgagcgggtcaccgagctgcaagaactcttcctcacgcgcgtcgggctcgacatcggcaaggtgtgggtcgcggacgacggcgccgcggtggcggtctggaccacgccggagagcgtcgaagcgggggcggtgttcgccgagatcggcccgcgcatggccgagttgagcggttcccggctggccgcgcagcaacagatggaaggcctcctggcgccgcaccggcccaaggagcccgcgtggttcctggccaccgtcggcgtctcgcccgaccaccagggcaagggtctgggcagcgccgtcgtgctccccggagtggaggcggccgagcgcgccggggtgcccgccttcctggagacctccgcgccccgcaacctccccttctacgagcggctcggcttcaccgtcaccgccgacgtcgaggtgcccgaaggaccgcgcacctggtgcatgacccgcaagcccggtgcctga

SEQ ID NO: 38796 - DNA, 2295 bp, synthetic construct
  source 1..2295: mol_type = other DNA
atggccttaccagtgaccgccttgctcctgccgctggccttgctgctccacgccgccaggccggaagtgcagctggttgaatctggcggaggactggttcagcctggcggatctctgagactgtcttgtgccgcctctggcttcgccagcgactactatatcatcggctggttcagacaggcccctggcaaagagagagagggcgtcagctgtatcagcagcagatacgccaacaccaactacgccgacagcgtgaagggcagattcaccatcagccgggacaacgccaagaacaccgtgtacctccagatgaacagcctgaagcctgaggacaccgccgtgtactactgtgccgccgacaccagaagatacacctgtcctgacattgccaccatgcaccggaacttcgattcttggggccagggcacactggtcaccgtttcttctggtaccggcggaggcggatctggcggcggaggtagcggtggcggaggatctgaattcgacatccagatgacacagagccctagcagcctgtctgccagcgtgggagacagagtgaccatcacatgcaaggccagcgacctgatccacaactggctggcctggtatcagcagaagcctggcaaggcccctaagctgctgatctacggcgctacctctctggaaacaggcgtgcccagcagattttctggcagcggctctggcaccgacttcaccctgacaatatccagcctccagcctgaggacttcgccacctactactgccagcagtactggaccacacctttcaccttcggccagggcaccaaggtggaaatcaaaagactcgaggacctgaagaacgtgttcccacctgaggtggccgtgttcgagcctagcgaggccgagatcagccacacccagaaagccaccctcgtgtgcctggctaccggcttctaccccgaccatgtggaactgtcttggtgggtcaacggcaaagaggtgcacagcggcgtgtgtaccgacccccagccactgaaagaacagcccgccctgaacgacagccggtactgcctgagcagcagactgagagtgtccgccaccttctggcagaacccccggaaccacttcagatgccaggtgcagttctacggcctgagcgagaacgacgagtggacccaggacagagccaagcccgtgacccagatcgtgtctgccgaagcctggggcagagccgattgcgacgtgaagctggtggaaaagagcttcgagacagacaccaacctgaacttccagaacctgagcgtgatcggcttcagaatcctgctgctgaaagtggccggctttaacctgctgatgaccctgcggctgtggtccagcagggccaagcgatctggatctggagcaacaaacttctcactactcaaacaagcaggtgacgtggaggagaatcccgggcctactagtatggactggatttggcgcatccttttccttgtcggcgctgctaccggcgcgcattccttcgaagaagtgcagctggttgaatcaggtggcggcctggttcaacctggcggatctctgagactgagctgtgccgccagcggctacagcatcaccaatgactacgcctggaactgggtccgacaggcccctggaaaaggactggaatgggtcggatatatcagctactccggctacaccacctacaatcccagcatcaagagccggttcaccatcagcagagacaccagcaagaacaccctgtacctccagatgaactccctgagagccgaggacaccgccgtgtactattgtgccagatggaccagcggcctggactattggggacagggaacactggtcaccgtgtcctctacgcgtatccagaaccctgatcctgccgtgtaccagctgcgggatagcaagagcagcgacaagagcgtgtgtctgttcaccgacttcgacagccagaccaacgtgtcccagagcaaggactccgacgtgtacatcaccgataagtgcgtgctggacatgcggagcatggacttcaagagcaactccgccgtggcctggtccaacaagtccgatttcgcctgcgccaacgccttcaacaacagcattatccccgaggacacattcttcccaagccccgagagcagctgcggctttaccagcgagagctaccagcagggcgtgctgagcgccaccatcctgtacgagatcctgctgggcaaggccaccctgtacgccgtgctggtgtctgccctggtgctgatggctatggtcaagcggaaggacagccggggataa

SEQ ID NO: 38797 - DNA, 2295 bp, synthetic construct
  source 1..2295: mol_type = other DNA
atggccttaccagtgaccgccttgctcctgccgctggccttgctgctccacgccgccaggccggaagtgcagctggttgaatctggcggaggactggttcagcctggcggatctctgagactgagctgtgaagccagcggcttcgccagcgacgattacatcatcggctggttcagacaggcccctggcaaagagagagagggcgtcagctgcatcagctctaagtacgccaacaccgtgtacaccgacagcgtgaagggcagattcagactgagcagaggcaccgccaagaataccgtgtacctccagatgagcgccctgaagcctgaggataccgccgtgtactactgcgctatggacagccgcagagtgacatgccctgagatcagcaccatgcaccggaacttcgattcttggggccagggcacactggtcacagtgtcatctggtaccggcggaggcggatctggcggcggaggtagcggtggcggaggatctgaattcgacatccagatgacacagagccctagcagcctgtctgccagcgtgggagacagagtgaccatcacatgcaaggccagcgacctgatccacaactggctggcctggtatcagcagaagcctggcaaggcccctaagctgctgatctacggcgctacctctctggaaacaggcgtgcccagcagattttctggcagcggctctggcaccgacttcaccctgacaatatccagcctccagcctgaggacttcgccacctactactgccagcagtactggaccacacctttcaccttcggccagggcaccaaggtggaaatcaaaagactcgaggacctgaagaacgtgttcccacctgaggtggccgtgttcgagcctagcgaggccgagatcagccacacccagaaagccaccctcgtgtgcctggctaccggcttctaccccgaccatgtggaactgtcttggtgggtcaacggcaaagaggtgcacagcggcgtgtgtaccgacccccagccactgaaagaacagcccgccctgaacgacagccggtactgcctgagcagcagactgagagtgtccgccaccttctggcagaacccccggaaccacttcagatgccaggtgcagttctacggcctgagcgagaacgacgagtggacccaggacagagccaagcccgtgacccagatcgtgtctgccgaagcctggggcagagccgattgcgacgtgaagctggtggaaaagagcttcgagacagacaccaacctgaacttccagaacctgagcgtgatcggcttcagaatcctgctgctgaaagtggccggctttaacctgctgatgaccctgcggctgtggtccagcagggccaagcgatctggatctggagcaacaaacttctcactactcaaacaagcaggtgacgtggaggagaatcccgggcctactagtatggactggatttggcgcatccttttccttgtcggcgctgctaccggcgcgcattccttcgaagaagtgcagctggttgaatcaggtggcggcctggttcaacctggcggatctctgagactgagctgtgccgccagcggctacagcatcaccaatgactacgcctggaactgggtccgacaggcccctggaaaaggactggaatgggtcggatatatcagctactccggctacaccacctacaatcccagcatcaagagccggttcaccatcagcagagacaccagcaagaacaccctgtacctccagatgaactccctgagagccgaggacaccgccgtgtactattgtgccagatggaccagcggcctggactattggggacagggaacactggtcaccgtgtcctctacgcgtatccagaaccctgatcctgccgtgtaccagctgcgggatagcaagagcagcgacaagagcgtgtgtctgttcaccgacttcgacagccagaccaacgtgtcccagagcaaggactccgacgtgtacatcaccgataagtgcgtgctggacatgcggagcatggacttcaagagcaactccgccgtggcctggtccaacaagtccgatttcgcctgcgccaacgccttcaacaacagcattatccccgaggacacattcttcccaagccccgagagcagctgcggctttaccagcgagagctaccagcagggcgtgctgagcgccaccatcctgtacgagatcctgctgggcaaggccaccctgtacgccgtgctggtgtctgccctggtgctgatggctatggtcaagcggaaggacagccggggataa

SEQ ID NO: 38798 - DNA, 2292 bp, synthetic construct
  source 1..2292: mol_type = other DNA
atggccttaccagtgaccgccttgctcctgccgctggccttgctgctccacgccgccaggccggaagtgcagctggttgaatctggcggaggactggttcagcctggcggatctctgagactgtcttgtgccgcctctggcttcgccagcgactactatatcatcggctggttcagacaggcccctggcaaagagagagagggcgtcagctgtatcagcagcagatacgccaacaccaactacgccgacagcgtgaagggcagattcaccatcagccgggacaacgccaagaacaccgtgtacctccagatgaacagcctgaagcctgaggacaccgccgtgtactactgtgccgccgacaccagaagatacacctgtcctgacattgccaccatgcaccggaacttcgattcttggggccagggcacactggtcaccgtttcttctggtaccggcggaggcggatctggcggcggaggtagcggtggcggaggatctgaattcgacatccagatgacacagagccctagcagcctgtctgccagcgtgggagacagagtgaccatcacatgcaaggccagcgacctgatccacaactggctggcctggtatcagcagaagcctggcaaggcccctaagctgctgatctacggcgctacctctctggaaacaggcgtgcccagcagattttctggcagcggctctggcaccgacttcaccctgacaatatccagcctccagcctgaggacttcgccacctactactgccagcagtactggaccacacctttcaccttcggccagggcaccaaggtggaaatcaaaagactcgagatccagaaccctgatcctgccgtgtaccagctgcgggatagcaagagcagcgacaagagcgtgtgtctgttcaccgacttcgacagccagaccaacgtgtcccagagcaaggactccgacgtgtacatcaccgataagtgcgtgctggacatgcggagcatggacttcaagagcaactccgccgtggcctggtccaacaagtccgatttcgcctgcgccaacgccttcaacaacagcattatccccgaggacacattcttcccaagccccgagagcagctgcggctttaccagcgagagctaccagcagggcgtgctgagcgccaccatcctgtacgagatcctgctgggcaaggccaccctgtacgccgtgctggtgtctgccctggtgctgatggctatggtcaagcggaaggacagccggggaagggccaagcgatctggatctggagcaacaaacttctcactactcaaacaagcaggtgacgtggaggagaatcccgggcctactagtatggactggatttggcgcatccttttccttgtcggcgctgctaccggcgcgcattccttcgaagaagtgcagctggttgaatcaggtggcggcctggttcaacctggcggatctctgagactgagctgtgccgccagcggctacagcatcaccaatgactacgcctggaactgggtccgacaggcccctggaaaaggactggaatgggtcggatatatcagctactccggctacaccacctacaatcccagcatcaagagccggttcaccatcagcagagacaccagcaagaacaccctgtacctccagatgaactccctgagagccgaggacaccgccgtgtactattgtgccagatggaccagcggcctggactattggggacagggaacactggtcaccgtgtcctctacgcgtgacctgaagaacgtgttcccacctgaggtggccgtgttcgagcctagcgaggccgagatcagccacacccagaaagccaccctcgtgtgcctggctaccggcttctaccccgaccatgtggaactgtcttggtgggtcaacggcaaagaggtgcacagcggcgtgtgtaccgacccccagccactgaaagaacagcccgccctgaacgacagccggtactgcctgagcagcagactgagagtgtccgccaccttctggcagaacccccggaaccacttcagatgccaggtgcagttctacggcctgagcgagaacgacgagtggacccaggacagagccaagcccgtgacccagatcgtgtctgccgaagcctggggcagagccgattgcgacgtgaagctggtggaaaagagcttcgagacagacaccaacctgaacttccagaacctgagcgtgatcggcttcagaatcctgctgctgaaagtggccggctttaacctgctgatgaccctgcggctgtggtccagc

SEQ ID NO: 38799 - DNA, 2292 bp, synthetic construct
  source 1..2292: mol_type = other DNA
atggccttaccagtgaccgccttgctcctgccgctggccttgctgctccacgccgccaggccggaagtgcagctggttgaatctggcggaggactggttcagcctggcggatctctgagactgagctgtgaagccagcggcttcgccagcgacgattacatcatcggctggttcagacaggcccctggcaaagagagagagggcgtcagctgcatcagctctaagtacgccaacaccgtgtacaccgacagcgtgaagggcagattcagactgagcagaggcaccgccaagaataccgtgtacctccagatgagcgccctgaagcctgaggataccgccgtgtactactgcgctatggacagccgcagagtgacatgccctgagatcagcaccatgcaccggaacttcgattcttggggccagggcacactggtcacagtgtcatctggtaccggcggaggcggatctggcggcggaggtagcggtggcggaggatctgaattcgacatccagatgacacagagccctagcagcctgtctgccagcgtgggagacagagtgaccatcacatgcaaggccagcgacctgatccacaactggctggcctggtatcagcagaagcctggcaaggcccctaagctgctgatctacggcgctacctctctggaaacaggcgtgcccagcagattttctggcagcggctctggcaccgacttcaccctgacaatatccagcctccagcctgaggacttcgccacctactactgccagcagtactggaccacacctttcaccttcggccagggcaccaaggtggaaatcaaaagactcgagatccagaaccctgatcctgccgtgtaccagctgcgggatagcaagagcagcgacaagagcgtgtgtctgttcaccgacttcgacagccagaccaacgtgtcccagagcaaggactccgacgtgtacatcaccgataagtgcgtgctggacatgcggagcatggacttcaagagcaactccgccgtggcctggtccaacaagtccgatttcgcctgcgccaacgccttcaacaacagcattatccccgaggacacattcttcccaagccccgagagcagctgcggctttaccagcgagagctaccagcagggcgtgctgagcgccaccatcctgtacgagatcctgctgggcaaggccaccctgtacgccgtgctggtgtctgccctggtgctgatggctatggtcaagcggaaggacagccggggaagggccaagcgatctggatctggagcaacaaacttctcactactcaaacaagcaggtgacgtggaggagaatcccgggcctactagtatggactggatttggcgcatccttttccttgtcggcgctgctaccggcgcgcattccttcgaagaagtgcagctggttgaatcaggtggcggcctggttcaacctggcggatctctgagactgagctgtgccgccagcggctacagcatcaccaatgactacgcctggaactgggtccgacaggcccctggaaaaggactggaatgggtcggatatatcagctactccggctacaccacctacaatcccagcatcaagagccggttcaccatcagcagagacaccagcaagaacaccctgtacctccagatgaactccctgagagccgaggacaccgccgtgtactattgtgccagatggaccagcggcctggactattggggacagggaacactggtcaccgtgtcctctacgcgtgacctgaagaacgtgttcccacctgaggtggccgtgttcgagcctagcgaggccgagatcagccacacccagaaagccaccctcgtgtgcctggctaccggcttctaccccgaccatgtggaactgtcttggtgggtcaacggcaaagaggtgcacagcggcgtgtgtaccgacccccagccactgaaagaacagcccgccctgaacgacagccggtactgcctgagcagcagactgagagtgtccgccaccttctggcagaacccccggaaccacttcagatgccaggtgcagttctacggcctgagcgagaacgacgagtggacccaggacagagccaagcccgtgacccagatcgtgtctgccgaagcctggggcagagccgattgcgacgtgaagctggtggaaaagagcttcgagacagacaccaacctgaacttccagaacctgagcgtgatcggcttcagaatcctgctgctgaaagtggccggctttaacctgctgatgaccctgcggctgtggtccagc

SEQ ID NO: 38800 - DNA, 2265 bp, synthetic construct
  source 1..2265: mol_type = other DNA
atggccttaccagtgaccgccttgctcctgccgctggccttgctgctccacgccgccaggccgcaagtcaaactggaagaaagcggtggcggcctggtgcaacctggcgaatctctgagactgagctgtagcgccagcggctccatcttcaaggtgttcagagtgttcgccatgagctggtacaggcaaggccctggcaagcagagagagctggtcgcctctatcagcagcggcgagacaaccacatacgccgaatctgtgaaaggccggttcaccatcagccgggataatgccaagaataccgcctatctccagatggactccctgaagcctgaagatacagctgtgtactactgcaacgccgaccataccttcaccggcgatttttggggccagggaacccaagtgaccgtgtctagtggtaccggcggaggcggatctggcggcggaggtagcggtggcggaggatctgaattcgacatccagatgacacagagccctagcagcctgtctgccagcgtgggagacagagtgaccatcacatgcaaggccagcgacctgatccacaactggctggcctggtatcagcagaagcctggcaaggcccctaagctgctgatctacggcgctacctctctggaaacaggcgtgcccagcagattttctggcagcggctctggcaccgacttcaccctgacaatatccagcctccagcctgaggacttcgccacctactactgccagcagtactggaccacacctttcaccttcggccagggcaccaaggtggaaatcaaaagactcgagatccagaaccctgatcctgccgtgtaccagctgcgggatagcaagagcagcgacaagagcgtgtgtctgttcaccgacttcgacagccagaccaacgtgtcccagagcaaggactccgacgtgtacatcaccgataagtgcgtgctggacatgcggagcatggacttcaagagcaactccgccgtggcctggtccaacaagtccgatttcgcctgcgccaacgccttcaacaacagcattatccccgaggacacattcttcccaagccccgagagcagctgcggctttaccagcgagagctaccagcagggcgtgctgagcgccaccatcctgtacgagatcctgctgggcaaggccaccctgtacgccgtgctggtgtctgccctggtgctgatggctatggtcaagcggaaggacagccggggaagggccaagcgatctggatctggagcaacaaacttctcactactcaaacaagcaggtgacgtggaggagaatcccgggcctactagtatggactggatttggcgcatccttttccttgtcggcgctgctaccggcgcgcattccttcgaagaagtgcagctggttgaatcaggtggcggcctggttcaacctggcggatctctgagactgagctgtgccgccagcggctacagcatcaccaatgactacgcctggaactgggtccgacaggcccctggaaaaggactggaatgggtcggatatatcagctactccggctacaccacctacaatcccagcatcaagagccggttcaccatcagcagagacaccagcaagaacaccctgtacctccagatgaactccctgagagccgaggacaccgccgtgtactattgtgccagatggaccagcggcctggactattggggacagggaacactggtcaccgtgtcctctacgcgtgacctgaagaacgtgttcccacctgaggtggccgtgttcgagcctagcgaggccgagatcagccacacccagaaagccaccctcgtgtgcctggctaccggcttctaccccgaccatgtggaactgtcttggtgggtcaacggcaaagaggtgcacagcggcgtgtgtaccgacccccagccactgaaagaacagcccgccctgaacgacagccggtactgcctgagcagcagactgagagtgtccgccaccttctggcagaacccccggaaccacttcagatgccaggtgcagttctacggcctgagcgagaacgacgagtggacccaggacagagccaagcccgtgacccagatcgtgtctgccgaagcctggggcagagccgattgcgacgtgaagctggtggaaaagagcttcgagacagacaccaacctgaacttccagaacctgagcgtgatcggcttcagaatcctgctgctgaaagtggccggctttaacctgctgatgaccctgcggctgtggtccagc

SEQ ID NO: 38801 - DNA, 2271 bp, synthetic construct
  source 1..2271: mol_type = other DNA
atggccttaccagtgaccgccttgctcctgccgctggccttgctgctccacgccgccaggccggacatccagatgacacagagccctagcagcctgtctgccagcgtgggagacagagtgaccatcacatgcaaggccagcgacctgatccacaactggctggcctggtatcagcagaagcctggcaaggcccctaagctgctgatctacggcgctacctctctggaaacaggcgtgcccagcagattttctggcagcggctctggcaccgacttcaccctgacaatatccagcctccagcctgaggacttcgccacctactactgccagcagtactggaccacacctttcaccttcggccagggcaccaaggtggaaatcaaaagactcgaggacctgaagaacgtgttcccacctgaggtggccgtgttcgagcctagcgaggccgagatcagccacacccagaaagccaccctcgtgtgcctggctaccggcttctaccccgaccatgtggaactgtcttggtgggtcaacggcaaagaggtgcacagcggcgtgtgtaccgacccccagccactgaaagaacagcccgccctgaacgacagccggtactgcctgagcagcagactgagagtgtccgccaccttctggcagaacccccggaaccacttcagatgccaggtgcagttctacggcctgagcgagaacgacgagtggacccaggacagagccaagcccgtgacccagatcgtgtctgccgaagcctggggcagagccgattgcgacgtgaagctggtggaaaagagcttcgagacagacaccaacctgaacttccagaacctgagcgtgatcggcttcagaatcctgctgctgaaagtggccggctttaacctgctgatgaccctgcggctgtggtccagcagggccaagcgatctggatctggagcaacaaacttctcactactcaaacaagcaggtgacgtggaggagaatcccgggcctactagtgccaccatggactggatttggcgcatccttttccttgtcggcgctgctaccggcgcccattccgggcccgaagtgcagctggttgaatctggcggaggactggttcaggctggcggatctctgagactgtcttgtgccgccagcggcagaacctttagcatgggctggtttagacaggcccctggcaaagagagagagttcgtcgccgccatcacatactctggcggcagcccttactacgccgactctgtgaagggcagattcaccatcagccgggacaacgccaagaacaccgtgtacctccagatgaacagcctgaagcctgaggacaccgccgtgtactactgcgccgccaatccaacatacggcagcgactggaacgccgagaattggggccagggaacccaagtgacagtgtctagcggatccggcggcggaggatctggcggaggcggatctgggggcggaggctctttcgaagaagtgcagctggttgaatcaggtggcggcctggttcaacctggcggatctctgagactgagctgtgccgccagcggctacagcatcaccaatgactacgcctggaactgggtccgacaggcccctggaaaaggactggaatgggtcggatatatcagctactccggctacaccacctacaatcccagcatcaagagccggttcaccatcagcagagacaccagcaagaacaccctgtacctccagatgaactccctgagagccgaggacaccgccgtgtactattgtgccagatggaccagcggcctggactattggggacagggaacactggtcaccgtgtcctctacgcgtatccagaaccctgatcctgccgtgtaccagctgcgggatagcaagagcagcgacaagagcgtgtgtctgttcaccgacttcgacagccagaccaacgtgtcccagagcaaggactccgacgtgtacatcaccgataagtgcgtgctggacatgcggagcatggacttcaagagcaactccgccgtggcctggtccaacaagtccgatttcgcctgcgccaacgccttcaacaacagcattatccccgaggacacattcttcccaagccccgagagcagctgcggctttaccagcgagagctaccagcagggcgtgctgagcgccaccatcctgtacgagatcctgctgggcaaggccaccctgtacgccgtgctggtgtctgccctggtgctgatggctatggtcaagcggaaggacagccggggataa

SEQ ID NO: 38802 - DNA, 2274 bp, synthetic construct
  source 1..2274: mol_type = other DNA
atggccttaccagtgaccgccttgctcctgccgctggccttgctgctccacgccgccaggccggacatccagatgacacagagccctagcagcctgtctgccagcgtgggagacagagtgaccatcacatgcaaggccagcgacctgatccacaactggctggcctggtatcagcagaagcctggcaaggcccctaagctgctgatctacggcgctacctctctggaaacaggcgtgcccagcagattttctggcagcggctctggcaccgacttcaccctgacaatatccagcctccagcctgaggacttcgccacctactactgccagcagtactggaccacacctttcaccttcggccagggcaccaaggtggaaatcaaaagactcgaggacctgaagaacgtgttcccacctgaggtggccgtgttcgagcctagcgaggccgagatcagccacacccagaaagccaccctcgtgtgcctggctaccggcttctaccccgaccatgtggaactgtcttggtgggtcaacggcaaagaggtgcacagcggcgtgtgtaccgacccccagccactgaaagaacagcccgccctgaacgacagccggtactgcctgagcagcagactgagagtgtccgccaccttctggcagaacccccggaaccacttcagatgccaggtgcagttctacggcctgagcgagaacgacgagtggacccaggacagagccaagcccgtgacccagatcgtgtctgccgaagcctggggcagagccgattgcgacgtgaagctggtggaaaagagcttcgagacagacaccaacctgaacttccagaacctgagcgtgatcggcttcagaatcctgctgctgaaagtggccggctttaacctgctgatgaccctgcggctgtggtccagcagggccaagcgatctggatctggagcaacaaacttctcactactcaaacaagcaggtgacgtggaggagaatcccgggcctactagtgccaccatggactggatttggcgcatccttttccttgtcggcgctgctaccggcgcccattccgggcccgaagtgcaactggtggaatctgggggcggactggtgcagccaggcggaagtctgaggctgtcttgtgccgcctccggcagcatcttcggcttcaacgacatggcctggtatcggcaggctcccggaaaacagcgcgagctggtggctctgattagcagagtgggcgtgaccagcagcgccgactctgtgaagggcagattcacaatctccagagtgaacgccaaggatacagtgtacctccagatgaactctctgaaacctgaggatacagcagtgtactattgctacatggaccagcggctggacggcagcacactggcctactggggacagggaactcaagtgacagtgtctagcggatccggcggcggaggatctggcggaggcggatctgggggcggaggctctttcgaagaagtgcagctggttgaatcaggtggcggcctggttcaacctggcggatctctgagactgagctgtgccgccagcggctacagcatcaccaatgactacgcctggaactgggtccgacaggcccctggaaaaggactggaatgggtcggatatatcagctactccggctacaccacctacaatcccagcatcaagagccggttcaccatcagcagagacaccagcaagaacaccctgtacctccagatgaactccctgagagccgaggacaccgccgtgtactattgtgccagatggaccagcggcctggactattggggacagggaacactggtcaccgtgtcctctacgcgtatccagaaccctgatcctgccgtgtaccagctgcgggatagcaagagcagcgacaagagcgtgtgtctgttcaccgacttcgacagccagaccaacgtgtcccagagcaaggactccgacgtgtacatcaccgataagtgcgtgctggacatgcggagcatggacttcaagagcaactccgccgtggcctggtccaacaagtccgatttcgcctgcgccaacgccttcaacaacagcattatccccgaggacacattcttcccaagccccgagagcagctgcggctttaccagcgagagctaccagcagggcgtgctgagcgccaccatcctgtacgagatcctgctgggcaaggccaccctgtacgccgtgctggtgtctgccctggtgctgatggctatggtcaagcggaaggacagccggggataa

SEQ ID NO: 38803 - DNA, 2262 bp, synthetic construct
  source 1..2262: mol_type = other DNA
atggccttaccagtgaccgccttgctcctgccgctggccttgctgctccacgccgccaggccggacatccagatgacacagagccctagcagcctgtctgccagcgtgggagacagagtgaccatcacatgcaaggccagcgacctgatccacaactggctggcctggtatcagcagaagcctggcaaggcccctaagctgctgatctacggcgctacctctctggaaacaggcgtgcccagcagattttctggcagcggctctggcaccgacttcaccctgacaatatccagcctccagcctgaggacttcgccacctactactgccagcagtactggaccacacctttcaccttcggccagggcaccaaggtggaaatcaaaagactcgaggacctgaagaacgtgttcccacctgaggtggccgtgttcgagcctagcgaggccgagatcagccacacccagaaagccaccctcgtgtgcctggctaccggcttctaccccgaccatgtggaactgtcttggtgggtcaacggcaaagaggtgcacagcggcgtgtgtaccgacccccagccactgaaagaacagcccgccctgaacgacagccggtactgcctgagcagcagactgagagtgtccgccaccttctggcagaacccccggaaccacttcagatgccaggtgcagttctacggcctgagcgagaacgacgagtggacccaggacagagccaagcccgtgacccagatcgtgtctgccgaagcctggggcagagccgattgcgacgtgaagctggtggaaaagagcttcgagacagacaccaacctgaacttccagaacctgagcgtgatcggcttcagaatcctgctgctgaaagtggccggctttaacctgctgatgaccctgcggctgtggtccagcagggccaagcgatctggatctggagcaacaaacttctcactactcaaacaagcaggtgacgtggaggagaatcccgggcctactagtgccaccatggactggatttggcgcatccttttccttgtcggcgctgctaccggcgcccattccgggcccgaggtgcagctggttgaatctggcggaggactggttcaggctggcggatctctgagactgtcttgtgccgccagcggctctgtgttcagcggcaatgtgatgggctggtacagacaggcccctggcaaagaaagagagtgggttgccgccattgccagcggcggcagcatctactacagagactctgtgaagggcagattcaccatcagccgggacaacgccaagaacaccgtgtacctccagatgaacagcctgaagcctgaggacaccgccgtgtactactgcaactctcaccctcctacactgccctattggggcctgggaacccaagtgacagtgtcctctggatccggcggcggaggatctggcggaggcggatctgggggcggaggctctttcgaagaagtgcagctggttgaatcaggtggcggcctggttcaacctggcggatctctgagactgagctgtgccgccagcggctacagcatcaccaatgactacgcctggaactgggtccgacaggcccctggaaaaggactggaatgggtcggatatatcagctactccggctacaccacctacaatcccagcatcaagagccggttcaccatcagcagagacaccagcaagaacaccctgtacctccagatgaactccctgagagccgaggacaccgccgtgtactattgtgccagatggaccagcggcctggactattggggacagggaacactggtcaccgtgtcctctacgcgtatccagaaccctgatcctgccgtgtaccagctgcgggatagcaagagcagcgacaagagcgtgtgtctgttcaccgacttcgacagccagaccaacgtgtcccagagcaaggactccgacgtgtacatcaccgataagtgcgtgctggacatgcggagcatggacttcaagagcaactccgccgtggcctggtccaacaagtccgatttcgcctgcgccaacgccttcaacaacagcattatccccgaggacacattcttcccaagccccgagagcagctgcggctttaccagcgagagctaccagcagggcgtgctgagcgccaccatcctgtacgagatcctgctgggcaaggccaccctgtacgccgtgctggtgtctgccctggtgctgatggctatggtcaagcggaaggacagccggggataa

SEQ ID NO: 38804 - DNA, 2256 bp, synthetic construct
  source 1..2256: mol_type = other DNA
atggccttaccagtgaccgccttgctcctgccgctggccttgctgctccacgccgccaggccggacatccagatgacacagagccctagcagcctgtctgccagcgtgggagacagagtgaccatcacatgcaaggccagcgacctgatccacaactggctggcctggtatcagcagaagcctggcaaggcccctaagctgctgatctacggcgctacctctctggaaacaggcgtgcccagcagattttctggcagcggctctggcaccgacttcaccctgacaatatccagcctccagcctgaggacttcgccacctactactgccagcagtactggaccacacctttcaccttcggccagggcaccaaggtggaaatcaaaagactcgaggacctgaagaacgtgttcccacctgaggtggccgtgttcgagcctagcgaggccgagatcagccacacccagaaagccaccctcgtgtgcctggctaccggcttctaccccgaccatgtggaactgtcttggtgggtcaacggcaaagaggtgcacagcggcgtgtgtaccgacccccagccactgaaagaacagcccgccctgaacgacagccggtactgcctgagcagcagactgagagtgtccgccaccttctggcagaacccccggaaccacttcagatgccaggtgcagttctacggcctgagcgagaacgacgagtggacccaggacagagccaagcccgtgacccagatcgtgtctgccgaagcctggggcagagccgattgcgacgtgaagctggtggaaaagagcttcgagacagacaccaacctgaacttccagaacctgagcgtgatcggcttcagaatcctgctgctgaaagtggccggctttaacctgctgatgaccctgcggctgtggtccagcagggccaagcgatctggatctggagcaacaaacttctcactactcaaacaagcaggtgacgtggaggagaatcccgggcctactagtgccaccatggactggatttggcgcatccttttccttgtcggcgctgctaccggcgcccattccgggcccgaagttcagctgctggaatctggcggaggactcgttcaacctggcggctctctgagactgagctgtgccgcttctggcttcagcttctctagctacgccctgagctgggttcgacaagctcccggaaagggccttgaatgggtgtccagcatcggcgagaatgacggcaccacagactatgccgatgccgtgaaaggccggtttaccatcagcagagacaattccaagaacacgctctatctgcaaatgaactccctgcgcgtggaagatacagccgtgtattattgcgtgaaggacggcatccactggggacagggaaccctggttacagtgtctagcggatccggcggcggaggatctggcggaggcggatctgggggcggaggctctttcgaagaagtgcagctggttgaatcaggtggcggcctggttcaacctggcggatctctgagactgagctgtgccgccagcggctacagcatcaccaatgactacgcctggaactgggtccgacaggcccctggaaaaggactggaatgggtcggatatatcagctactccggctacaccacctacaatcccagcatcaagagccggttcaccatcagcagagacaccagcaagaacaccctgtacctccagatgaactccctgagagccgaggacaccgccgtgtactattgtgccagatggaccagcggcctggactattggggacagggaacactggtcaccgtgtcctctacgcgtatccagaaccctgatcctgccgtgtaccagctgcgggatagcaagagcagcgacaagagcgtgtgtctgttcaccgacttcgacagccagaccaacgtgtcccagagcaaggactccgacgtgtacatcaccgataagtgcgtgctggacatgcggagcatggacttcaagagcaactccgccgtggcctggtccaacaagtccgatttcgcctgcgccaacgccttcaacaacagcattatccccgaggacacattcttcccaagccccgagagcagctgcggctttaccagcgagagctaccagcagggcgtgctgagcgccaccatcctgtacgagatcctgctgggcaaggccaccctgtacgccgtgctggtgtctgccctggtgctgatggctatggtcaagcggaaggacagccggggataa

SEQ ID NO: 38805 - DNA, 3363 bp, synthetic construct
  source 1..3363: mol_type = other DNA
atgggacccagactgctgttttgggctctgctgtgtctgctcggcacaggacctgttgaagctggcgtgacacagagccccacacacctgattaagaccagaggccagcaggccacactgagatgcagccctatcagcggccacaccagcgtgtactggtatcagcaggctctcggactgggcctccagttcctgctttggtacgacgagggcgaagagagaaaccggggcaacttccctcctcggttttccggcagacagttccccaactacagcagcgagctgaacgtgaacgccctggaactggaagatagcgccctgtacctgtgtgcctcttctcttggtggacctcgcggactggctggactgagaggggatgagcagtttttcggccctggcaccagactgaccgtgctggaaggtaccggcggaggcggatctggcggcggagaattcgacatccagatgacacagagccctagcagcctgtctgccagcgtgggagacagagtgaccatcacatgcaaggccagcgacctgatccacaactggctggcctggtatcagcagaagcctggcaaggcccctaagctgctgatctacggcgctacctctctggaaacaggcgtgcccagcagattttctggcagcggctctggcaccgacttcaccctgacaatatccagcctccagcctgaggacttcgccacctactactgccagcagtactggaccacacctttcaccttcggccagggcaccaaggtggaaatcaaaagactcgaggacctgaagaacgtgttcccacctgaggtggccgtgttcgagcctagcgaggccgagatcagccacacccagaaagccaccctcgtgtgcctggctaccggcttctaccccgaccatgtggaactgtcttggtgggtcaacggcaaagaggtgcacagcggcgtgtgtaccgacccccagccactgaaagaacagcccgccctgaacgacagccggtactgcctgagcagcagactgagagtgtccgccaccttctggcagaacccccggaaccacttcagatgccaggtgcagttctacggcctgagcgagaacgacgagtggacccaggacagagccaagcccgtgacccagatcgtgtctgccgaagcctggggcagagccgattgcgacgtgaagctggtggaaaagagcttcgagacagacaccaacctgaacttccagaacctgagcgtgatcggcttcagaatcctgctgctgaaagtggccggctttaacctgctgatgaccctgcggctgtggtccagcagggccaagcgatctggatctggagcaacaaacttctcactactcaaacaagcaggtgacgtggaggagaatcccgggcctactagtgccaccatggactggatttggcgcatccttttccttgtcggcgctgctaccggcgcccattccgggcccgaagtgcagctggttgaatctggcggaggactggttcaggctggcggatctctgagactgtcttgtgccgccagcggcagaacctttagcatgggctggtttagacaggcccctggcaaagagagagagttcgtcgccgccatcacatactctggcggcagcccttactacgccgactctgtgaagggcagattcaccatcagccgggacaacgccaagaacaccgtgtacctccagatgaacagcctgaagcctgaggacaccgccgtgtactactgcgccgccaatccaacatacggcagcgactggaacgccgagaattggggccagggaacccaagtgacagtgtctagcggatccggcggcggaggatctggcggaggcggatctgggggcggaggctctttcgaagaagtgcagctggttgaatcaggtggcggcctggttcaacctggcggatctctgagactgagctgtgccgccagcggctacagcatcaccaatgactacgcctggaactgggtccgacaggcccctggaaaaggactggaatgggtcggatatatcagctactccggctacaccacctacaatcccagcatcaagagccggttcaccatcagcagagacaccagcaagaacaccctgtacctccagatgaactccctgagagccgaggacaccgccgtgtactattgtgccagatggaccagcggcctggactattggggacagggaacactggtcaccgtgtcctctacgcgtatccagaaccctgatcctgccgtgtaccagctgcgggatagcaagagcagcgacaagagcgtgtgtctgttcaccgacttcgacagccagaccaacgtgtcccagagcaaggactccgacgtgtacatcaccgataagtgcgtgctggacatgcggagcatggacttcaagagcaactccgccgtggcctggtccaacaagtccgatttcgcctgcgccaacgccttcaacaacagcattatccccgaggacacattcttcccaagccccgagagcagctgcggctttaccagcgagagctaccagcagggcgtgctgagcgccaccatcctgtacgagatcctgctgggcaaggccaccctgtacgccgtgctggtgtctgccctggtgctgatggctatggtcaagcggaaggacagccggggacgcgccaagagaagcggatctggcgtgaagcagaccctgaatttcgacctgctgaagctggctggcgacgtggaatccaacccaggcccttctagaggccatatgaccgagtacaagcccacggtgcgcctcgccacccgcgacgacgtccccagggccgtacgcaccctcgccgccgcgttcgccgactaccccgccacgcgccacaccgtcgatccggaccgccacatcgagcgggtcaccgagctgcaagaactcttcctcacgcgcgtcgggctcgacatcggcaaggtgtgggtcgcggacgacggcgccgcggtggcggtctggaccacgccggagagcgtcgaagcgggggcggtgttcgccgagatcggcccgcgcatggccgagttgagcggttcccggctggccgcgcagcaacagatggaaggcctcctggcgccgcaccggcccaaggagcccgcgtggttcctggccaccgtcggcgtctcgcccgaccaccagggcaagggtctgggcagcgccgtcgtgctccccggagtggaggcggccgagcgcgccggggtgcccgccttcctggagacctccgcgccccgcaacctccccttctacgagcggctcggcttcaccgtcaccgccgacgtcgaggtgcccgaaggaccgcgcacctggtgcatgacccgcaagcccggtgcctga

SEQ ID NO: 38806 - DNA, 3360 bp, synthetic construct
  source 1..3360: mol_type = other DNA
atgggacccagactgctgttttgggctctgctgtgtctgctcggcacaggacctgttgaagctggcgtgacacagagccccacacacctgattaagaccagaggccagcaggccacactgagatgcagccctatcagcggccacaccagcgtgtactggtatcagcaggctctcggactgggcctccagttcctgctttggtacgacgagggcgaagagagaaaccggggcaacttccctcctcggttttccggcagacagttccccaactacagcagcgagctgaacgtgaacgccctggaactggaagatagcgccctgtacctgtgtgccagctctctcggcggagatgaactgggagccgatggcaacgagcagttctttggccctggcaccagactgaccgtgctggaaggtaccggcggaggcggatctggcggcggaagcgaattcgacatccagatgacacagagccctagcagcctgtctgccagcgtgggagacagagtgaccatcacatgcaaggccagcgacctgatccacaactggctggcctggtatcagcagaagcctggcaaggcccctaagctgctgatctacggcgctacctctctggaaacaggcgtgcccagcagattttctggcagcggctctggcaccgacttcaccctgacaatatccagcctccagcctgaggacttcgccacctactactgccagcagtactggaccacacctttcaccttcggccagggcaccaaggtggaaatcaaaagactcgaggacctgaagaacgtgttcccacctgaggtggccgtgttcgagcctagcgaggccgagatcagccacacccagaaagccaccctcgtgtgcctggctaccggcttctaccccgaccatgtggaactgtcttggtgggtcaacggcaaagaggtgcacagcggcgtgtgtaccgacccccagccactgaaagaacagcccgccctgaacgacagccggtactgcctgagcagcagactgagagtgtccgccaccttctggcagaacccccggaaccacttcagatgccaggtgcagttctacggcctgagcgagaacgacgagtggacccaggacagagccaagcccgtgacccagatcgtgtctgccgaagcctggggcagagccgattgcgacgtgaagctggtggaaaagagcttcgagacagacaccaacctgaacttccagaacctgagcgtgatcggcttcagaatcctgctgctgaaagtggccggctttaacctgctgatgaccctgcggctgtggtccagcagggccaagcgatctggatctggagcaacaaacttctcactactcaaacaagcaggtgacgtggaggagaatcccgggcctactagtgccaccatggactggatttggcgcatccttttccttgtcggcgctgctaccggcgcccattccgggcccgaagtgcagctggttgaatctggcggaggactggttcaggctggcggatctctgagactgtcttgtgccgccagcggcagaacctttagcatgggctggtttagacaggcccctggcaaagagagagagttcgtcgccgccatcacatactctggcggcagcccttactacgccgactctgtgaagggcagattcaccatcagccgggacaacgccaagaacaccgtgtacctccagatgaacagcctgaagcctgaggacaccgccgtgtactactgcgccgccaatccaacatacggcagcgactggaacgccgagaattggggccagggaacccaagtgacagtgtctagcggatccggcggcggaggatctggcggaggcggatctgggggcggaggctctttcgaagaagtgcagctggttgaatcaggtggcggcctggttcaacctggcggatctctgagactgagctgtgccgccagcggctacagcatcaccaatgactacgcctggaactgggtccgacaggcccctggaaaaggactggaatgggtcggatatatcagctactccggctacaccacctacaatcccagcatcaagagccggttcaccatcagcagagacaccagcaagaacaccctgtacctccagatgaactccctgagagccgaggacaccgccgtgtactattgtgccagatggaccagcggcctggactattggggacagggaacactggtcaccgtgtcctctacgcgtatccagaaccctgatcctgccgtgtaccagctgcgggatagcaagagcagcgacaagagcgtgtgtctgttcaccgacttcgacagccagaccaacgtgtcccagagcaaggactccgacgtgtacatcaccgataagtgcgtgctggacatgcggagcatggacttcaagagcaactccgccgtggcctggtccaacaagtccgatttcgcctgcgccaacgccttcaacaacagcattatccccgaggacacattcttcccaagccccgagagcagctgcggctttaccagcgagagctaccagcagggcgtgctgagcgccaccatcctgtacgagatcctgctgggcaaggccaccctgtacgccgtgctggtgtctgccctggtgctgatggctatggtcaagcggaaggacagccggggacgcgccaagagaagcggatctggcgtgaagcagaccctgaatttcgacctgctgaagctggctggcgacgtggaatccaacccaggcccttctagaggccatatgaccgagtacaagcccacggtgcgcctcgccacccgcgacgacgtccccagggccgtacgcaccctcgccgccgcgttcgccgactaccccgccacgcgccacaccgtcgatccggaccgccacatcgagcgggtcaccgagctgcaagaactcttcctcacgcgcgtcgggctcgacatcggcaaggtgtgggtcgcggacgacggcgccgcggtggcggtctggaccacgccggagagcgtcgaagcgggggcggtgttcgccgagatcggcccgcgcatggccgagttgagcggttcccggctggccgcgcagcaacagatggaaggcctcctggcgccgcaccggcccaaggagcccgcgtggttcctggccaccgtcggcgtctcgcccgaccaccagggcaagggtctgggcagcgccgtcgtgctccccggagtggaggcggccgagcgcgccggggtgcccgccttcctggagacctccgcgccccgcaacctccccttctacgagcggctcggcttcaccgtcaccgccgacgtcgaggtgcccgaaggaccgcgcacctggtgcatgacccgcaagcccggtgcctga

SEQ ID NO: 38807 - DNA, 2835 bp, synthetic construct
  source 1..2835: mol_type = other DNA
atggccttaccagtgaccgccttgctcctgccgctggccttgctgctccacgccgccaggccggacatccagatgacacagagccctagcagcctgtctgccagcgtgggagacagagtgaccatcacatgcaaggccagcgacctgatccacaactggctggcctggtatcagcagaagcctggcaaggcccctaagctgctgatctacggcgctacctctctggaaacaggcgtgcccagcagattttctggcagcggctctggcaccgacttcaccctgacaatatccagcctccagcctgaggacttcgccacctactactgccagcagtactggaccacacctttcaccttcggccagggcaccaaggtggaaatcaaaagactcgaggacctgaagaacgtgttcccacctgaggtggccgtgttcgagcctagcgaggccgagatcagccacacccagaaagccaccctcgtgtgcctggctaccggcttctaccccgaccatgtggaactgtcttggtgggtcaacggcaaagaggtgcacagcggcgtgtgtaccgacccccagccactgaaagaacagcccgccctgaacgacagccggtactgcctgagcagcagactgagagtgtccgccaccttctggcagaacccccggaaccacttcagatgccaggtgcagttctacggcctgagcgagaacgacgagtggacccaggacagagccaagcccgtgacccagatcgtgtctgccgaagcctggggcagagccgattgcgacgtgaagctggtggaaaagagcttcgagacagacaccaacctgaacttccagaacctgagcgtgatcggcttcagaatcctgctgctgaaagtggccggctttaacctgctgatgaccctgcggctgtggtccagcagggccaagcgatctggatctggagcaacaaacttctcactactcaaacaagcaggtgacgtggaggagaatcccgggcctactagtgccaccatggactggatttggcgcatccttttccttgtcggcgctgctaccggcgcccattccgggcccatgggaagctggcttgagttctaccacagactcaacgccattgacagcaggctgtgggcacttggcggaagcgaagctgaactcgccgcttttgaaaaagaaattgccgctttcgagtccgagcttcaggcttacaaaggcaaagggaatcctgaggtcgagagcctgagagatcacgctgcccacattagagagtggttgcaggcataccggcacaatggatccggcggcggaggatctggcggaggcggatctgggggcggaggctctttcgaagaagtgcagctggttgaatcaggtggcggcctggttcaacctggcggatctctgagactgagctgtgccgccagcggctacagcatcaccaatgactacgcctggaactgggtccgacaggcccctggaaaaggactggaatgggtcggatatatcagctactccggctacaccacctacaatcccagcatcaagagccggttcaccatcagcagagacaccagcaagaacaccctgtacctccagatgaactccctgagagccgaggacaccgccgtgtactattgtgccagatggaccagcggcctggactattggggacagggaacactggtcaccgtgtcctctacgcgtatccagaaccctgatcctgccgtgtaccagctgcgggatagcaagagcagcgacaagagcgtgtgtctgttcaccgacttcgacagccagaccaacgtgtcccagagcaaggactccgacgtgtacatcaccgataagtgcgtgctggacatgcggagcatggacttcaagagcaactccgccgtggcctggtccaacaagtccgatttcgcctgcgccaacgccttcaacaacagcattatccccgaggacacattcttcccaagccccgagagcagctgcggctttaccagcgagagctaccagcagggcgtgctgagcgccaccatcctgtacgagatcctgctgggcaaggccaccctgtacgccgtgctggtgtctgccctggtgctgatggctatggtcaagcggaaggacagccggggacgcgccaagagaagcggatctggcgtgaagcagaccctgaatttcgacctgctgaagctggctggcgacgtggaatccaacccaggcccttctagaggccatatgaccgagtacaagcccacggtgcgcctcgccacccgcgacgacgtccccagggccgtacgcaccctcgccgccgcgttcgccgactaccccgccacgcgccacaccgtcgatccggaccgccacatcgagcgggtcaccgagctgcaagaactcttcctcacgcgcgtcgggctcgacatcggcaaggtgtgggtcgcggacgacggcgccgcggtggcggtctggaccacgccggagagcgtcgaagcgggggcggtgttcgccgagatcggcccgcgcatggccgagttgagcggttcccggctggccgcgcagcaacagatggaaggcctcctggcgccgcaccggcccaaggagcccgcgtggttcctggccaccgtcggcgtctcgcccgaccaccagggcaagggtctgggcagcgccgtcgtgctccccggagtggaggcggccgagcgcgccggggtgcccgccttcctggagacctccgcgccccgcaacctccccttctacgagcggctcggcttcaccgtcaccgccgacgtcgaggtgcccgaaggaccgcgcacctggtgcatgacccgcaagcccggtgcctga

SEQ ID NO: 38808 - DNA, 2835 bp, synthetic construct
  source 1..2835: mol_type = other DNA
atggccttaccagtgaccgccttgctcctgccgctggccttgctgctccacgccgccaggccggcatgcatgggcagttggttcgagttctacgaccggctgaatgccatcgacgccagactgtgggctctcggaggatctgaagctgagctggccgccttcgagaaagagatcgccgcctttgagagcgagctgcaagcctacaaaggcaagggcaaccccgaggtggaaaacctgagagtgcacgccgctgccatcagagaatggctccaggcttacagacacaacggtaccggcggaggcggatctggcggcggaggtagcggtggcggaggatctgaattcgacatccagatgacacagagccctagcagcctgtctgccagcgtgggagacagagtgaccatcacatgcaaggccagcgacctgatccacaactggctggcctggtatcagcagaagcctggcaaggcccctaagctgctgatctacggcgctacctctctggaaacaggcgtgcccagcagattttctggcagcggctctggcaccgacttcaccctgacaatatccagcctccagcctgaggacttcgccacctactactgccagcagtactggaccacacctttcaccttcggccagggcaccaaggtggaaatcaaaagactcgaggacctgaagaacgtgttcccacctgaggtggccgtgttcgagcctagcgaggccgagatcagccacacccagaaagccaccctcgtgtgcctggctaccggcttctaccccgaccatgtggaactgtcttggtgggtcaacggcaaagaggtgcacagcggcgtgtgtaccgacccccagccactgaaagaacagcccgccctgaacgacagccggtactgcctgagcagcagactgagagtgtccgccaccttctggcagaacccccggaaccacttcagatgccaggtgcagttctacggcctgagcgagaacgacgagtggacccaggacagagccaagcccgtgacccagatcgtgtctgccgaagcctggggcagagccgattgcgacgtgaagctggtggaaaagagcttcgagacagacaccaacctgaacttccagaacctgagcgtgatcggcttcagaatcctgctgctgaaagtggccggctttaacctgctgatgaccctgcggctgtggtccagcagggccaagcgatctggatctggagcaacaaacttctcactactcaaacaagcaggtgacgtggaggagaatcccgggcctactagtatggactggatttggcgcatccttttccttgtcggcgctgctaccggcgcgcattccttcgaagaagtgcagctggttgaatcaggtggcggcctggttcaacctggcggatctctgagactgagctgtgccgccagcggctacagcatcaccaatgactacgcctggaactgggtccgacaggcccctggaaaaggactggaatgggtcggatatatcagctactccggctacaccacctacaatcccagcatcaagagccggttcaccatcagcagagacaccagcaagaacaccctgtacctccagatgaactccctgagagccgaggacaccgccgtgtactattgtgccagatggaccagcggcctggactattggggacagggaacactggtcaccgtgtcctctacgcgtatccagaaccctgatcctgccgtgtaccagctgcgggatagcaagagcagcgacaagagcgtgtgtctgttcaccgacttcgacagccagaccaacgtgtcccagagcaaggactccgacgtgtacatcaccgataagtgcgtgctggacatgcggagcatggacttcaagagcaactccgccgtggcctggtccaacaagtccgatttcgcctgcgccaacgccttcaacaacagcattatccccgaggacacattcttcccaagccccgagagcagctgcggctttaccagcgagagctaccagcagggcgtgctgagcgccaccatcctgtacgagatcctgctgggcaaggccaccctgtacgccgtgctggtgtctgccctggtgctgatggctatggtcaagcggaaggacagccggggacgcgccaagagaagcggatctggcgtgaagcagaccctgaatttcgacctgctgaagctggctggcgacgtggaatccaacccaggcccttctagaggccatatgaccgagtacaagcccacggtgcgcctcgccacccgcgacgacgtccccagggccgtacgcaccctcgccgccgcgttcgccgactaccccgccacgcgccacaccgtcgatccggaccgccacatcgagcgggtcaccgagctgcaagaactcttcctcacgcgcgtcgggctcgacatcggcaaggtgtgggtcgcggacgacggcgccgcggtggcggtctggaccacgccggagagcgtcgaagcgggggcggtgttcgccgagatcggcccgcgcatggccgagttgagcggttcccggctggccgcgcagcaacagatggaaggcctcctggcgccgcaccggcccaaggagcccgcgtggttcctggccaccgtcggcgtctcgcccgaccaccagggcaagggtctgggcagcgccgtcgtgctccccggagtggaggcggccgagcgcgccggggtgcccgccttcctggagacctccgcgccccgcaacctccccttctacgagcggctcggcttcaccgtcaccgccgacgtcgaggtgcccgaaggaccgcgcacctggtgcatgacccgcaagcccggtgcctga

SEQ ID NO: 38809 - DNA, 3186 bp, synthetic construct
  source 1..3186: mol_type = other DNA
atggccttaccagtgaccgccttgctcctgccgctggccttgctgctccacgccgccaggccggcatgcatggaccccgacctggaaatcagagccgccttcctgcggcagagaaacacagccctgagaacagaggtggccgagctggaacaagaggtgcagcggctggaaaacgaggtgtcccagtacgagacaagatacggccctctcggaggcggaaaaggtaccggcggaggcggatctggcggcggaggtagcggtggcggaggatctgaattcgacatccagatgacacagagccctagcagcctgtctgccagcgtgggagacagagtgaccatcacatgcaaggccagcgacctgatccacaactggctggcctggtatcagcagaagcctggcaaggcccctaagctgctgatctacggcgctacctctctggaaacaggcgtgcccagcagattttctggcagcggctctggcaccgacttcaccctgacaatatccagcctccagcctgaggacttcgccacctactactgccagcagtactggaccacacctttcaccttcggccagggcaccaaggtggaaatcaaaagactcgaggacctgaagaacgtgttcccacctgaggtggccgtgttcgagcctagcgaggccgagatcagccacacccagaaagccaccctcgtgtgcctggctaccggcttctaccccgaccatgtggaactgtcttggtgggtcaacggcaaagaggtgcacagcggcgtgtgtaccgacccccagccactgaaagaacagcccgccctgaacgacagccggtactgcctgagcagcagactgagagtgtccgccaccttctggcagaacccccggaaccacttcagatgccaggtgcagttctacggcctgagcgagaacgacgagtggacccaggacagagccaagcccgtgacccagatcgtgtctgccgaagcctggggcagagccgattgcgacgtgaagctggtggaaaagagcttcgagacagacaccaacctgaacttccagaacctgagcgtgatcggcttcagaatcctgctgctgaaagtggccggctttaacctgctgatgaccctgcggctgtggtccagcagggccaagcgatctggatctggagcaacaaacttctcactactcaaacaagcaggtgacgtggaggagaatcccgggcctactagtgccaccatggactggatttggcgcatccttttccttgtcggcgctgctaccggcgcccattccgggcccgaagtgcagctggttgaatctggcggaggactggttcaggctggcggatctctgagactgtcttgtgccgccagcggcagaacctttagcatgggctggtttagacaggcccctggcaaagagagagagttcgtcgccgccatcacatactctggcggcagcccttactacgccgactctgtgaagggcagattcaccatcagccgggacaacgccaagaacaccgtgtacctccagatgaacagcctgaagcctgaggacaccgccgtgtactactgcgccgccaatccaacatacggcagcgactggaacgccgagaattggggccagggaacccaagtgacagtgtctagcggatccggcggcggaggatctggcggaggcggatctgggggcggaggctctttcgaagaagtgcagctggttgaatcaggtggcggcctggttcaacctggcggatctctgagactgagctgtgccgccagcggctacagcatcaccaatgactacgcctggaactgggtccgacaggcccctggaaaaggactggaatgggtcggatatatcagctactccggctacaccacctacaatcccagcatcaagagccggttcaccatcagcagagacaccagcaagaacaccctgtacctccagatgaactccctgagagccgaggacaccgccgtgtactattgtgccagatggaccagcggcctggactattggggacagggaacactggtcaccgtgtcctctacgcgtatccagaaccctgatcctgccgtgtaccagctgcgggatagcaagagcagcgacaagagcgtgtgtctgttcaccgacttcgacagccagaccaacgtgtcccagagcaaggactccgacgtgtacatcaccgataagtgcgtgctggacatgcggagcatggacttcaagagcaactccgccgtggcctggtccaacaagtccgatttcgcctgcgccaacgccttcaacaacagcattatccccgaggacacattcttcccaagccccgagagcagctgcggctttaccagcgagagctaccagcagggcgtgctgagcgccaccatcctgtacgagatcctgctgggcaaggccaccctgtacgccgtgctggtgtctgccctggtgctgatggctatggtcaagcggaaggacagccggggacgcgccaagagaagcggatctggcgtgaagcagaccctgaatttcgacctgctgaagctggctggcgacgtggaatccaacccaggcccttctagaggccatatgaccgagtacaagcccacggtgcgcctcgccacccgcgacgacgtccccagggccgtacgcaccctcgccgccgcgttcgccgactaccccgccacgcgccacaccgtcgatccggaccgccacatcgagcgggtcaccgagctgcaagaactcttcctcacgcgcgtcgggctcgacatcggcaaggtgtgggtcgcggacgacggcgccgcggtggcggtctggaccacgccggagagcgtcgaagcgggggcggtgttcgccgagatcggcccgcgcatggccgagttgagcggttcccggctggccgcgcagcaacagatggaaggcctcctggcgccgcaccggcccaaggagcccgcgtggttcctggccaccgtcggcgtctcgcccgaccaccagggcaagggtctgggcagcgccgtcgtgctccccggagtggaggcggccgagcgcgccggggtgcccgccttcctggagacctccgcgccccgcaacctccccttctacgagcggctcggcttcaccgtcaccgccgacgtcgaggtgcccgaaggaccgcgcacctggtgcatgacccgcaagcccggtgcctga

SEQ ID NO: 38810 - DNA, 2835 bp, synthetic construct
  source 1..2835: mol_type = other DNA
atggccttaccagtgaccgccttgctcctgccgctggccttgctgctccacgccgccaggccggacatccagatgacacagagccctagcagcctgtctgccagcgtgggagacagagtgaccatcacatgcaaggccagcgacctgatccacaactggctggcctggtatcagcagaagcctggcaaggcccctaagctgctgatctacggcgctacctctctggaaacaggcgtgcccagcagattttctggcagcggctctggcaccgacttcaccctgacaatatccagcctccagcctgaggacttcgccacctactactgccagcagtactggaccacacctttcaccttcggccagggcaccaaggtggaaatcaaaagactcgaggacctgaagaacgtgttcccacctgaggtggccgtgttcgagcctagcgaggccgagatcagccacacccagaaagccaccctcgtgtgcctggctaccggcttctaccccgaccatgtggaactgtcttggtgggtcaacggcaaagaggtgcacagcggcgtgtgtaccgacccccagccactgaaagaacagcccgccctgaacgacagccggtactgcctgagcagcagactgagagtgtccgccaccttctggcagaacccccggaaccacttcagatgccaggtgcagttctacggcctgagcgagaacgacgagtggacccaggacagagccaagcccgtgacccagatcgtgtctgccgaagcctggggcagagccgattgcgacgtgaagctggtggaaaagagcttcgagacagacaccaacctgaacttccagaacctgagcgtgatcggcttcagaatcctgctgctgaaagtggccggctttaacctgctgatgaccctgcggctgtggtccagcagggccaagcgatctggatctggagcaacaaacttctcactactcaaacaagcaggtgacgtggaggagaatcccgggcctactagtgccaccatggactggatttggcgcatccttttccttgtcggcgctgctaccggcgcccattccgggcccatgggatcttggagcgagttttacgatcggctgcacgccattcaccaccggctgtatgctctcggaggaagcgaagctgagctggccgcttttgaaaaagaaattgccgctttcgagtccgagcttcaggcttacaaaggcaaagggaatcctgaggtcgaggccctgagagataccgccgccttcatcagaacccggttgcaggcataccggcacaacggatccggcggcggaggatctggcggaggcggatctgggggcggaggctctttcgaagaagtgcagctggttgaatcaggtggcggcctggttcaacctggcggatctctgagactgagctgtgccgccagcggctacagcatcaccaatgactacgcctggaactgggtccgacaggcccctggaaaaggactggaatgggtcggatatatcagctactccggctacaccacctacaatcccagcatcaagagccggttcaccatcagcagagacaccagcaagaacaccctgtacctccagatgaactccctgagagccgaggacaccgccgtgtactattgtgccagatggaccagcggcctggactattggggacagggaacactggtcaccgtgtcctctacgcgtatccagaaccctgatcctgccgtgtaccagctgcgggatagcaagagcagcgacaagagcgtgtgtctgttcaccgacttcgacagccagaccaacgtgtcccagagcaaggactccgacgtgtacatcaccgataagtgcgtgctggacatgcggagcatggacttcaagagcaactccgccgtggcctggtccaacaagtccgatttcgcctgcgccaacgccttcaacaacagcattatccccgaggacacattcttcccaagccccgagagcagctgcggctttaccagcgagagctaccagcagggcgtgctgagcgccaccatcctgtacgagatcctgctgggcaaggccaccctgtacgccgtgctggtgtctgccctggtgctgatggctatggtcaagcggaaggacagccggggacgcgccaagagaagcggatctggcgtgaagcagaccctgaatttcgacctgctgaagctggctggcgacgtggaatccaacccaggcccttctagaggccatatgaccgagtacaagcccacggtgcgcctcgccacccgcgacgacgtccccagggccgtacgcaccctcgccgccgcgttcgccgactaccccgccacgcgccacaccgtcgatccggaccgccacatcgagcgggtcaccgagctgcaagaactcttcctcacgcgcgtcgggctcgacatcggcaaggtgtgggtcgcggacgacggcgccgcggtggcggtctggaccacgccggagagcgtcgaagcgggggcggtgttcgccgagatcggcccgcgcatggccgagttgagcggttcccggctggccgcgcagcaacagatggaaggcctcctggcgccgcaccggcccaaggagcccgcgtggttcctggccaccgtcggcgtctcgcccgaccaccagggcaagggtctgggcagcgccgtcgtgctccccggagtggaggcggccgagcgcgccggggtgcccgccttcctggagacctccgcgccccgcaacctccccttctacgagcggctcggcttcaccgtcaccgccgacgtcgaggtgcccgaaggaccgcgcacctggtgcatgacccgcaagcccggtgcctga

SEQ ID NO: 38811 - DNA, 3465 bp, synthetic construct
  source 1..3465: mol_type = other DNA
atggccttaccagtgaccgccttgctcctgccgctggccttgctgctccacgccgccaggccggacatccagatgacacagagccctagcagcctgtctgccagcgtgggagacagagtgaccatcacatgcaaggccagcgacctgatccacaactggctggcctggtatcagcagaagcctggcaaggcccctaagctgctgatctacggcgctacctctctggaaacaggcgtgcccagcagattttctggcagcggctctggcaccgacttcaccctgacaatatccagcctccagcctgaggacttcgccacctactactgccagcagtactggaccacacctttcaccttcggccagggcaccaaggtggaaatcaaaagactcgaggacctgaagaacgtgttcccacctgaggtggccgtgttcgagcctagcgaggccgagatcagccacacccagaaagccaccctcgtgtgcctggctaccggcttctaccccgaccatgtggaactgtcttggtgggtcaacggcaaagaggtgcacagcggcgtgtgtaccgacccccagccactgaaagaacagcccgccctgaacgacagccggtactgcctgagcagcagactgagagtgtccgccaccttctggcagaacccccggaaccacttcagatgccaggtgcagttctacggcctgagcgagaacgacgagtggacccaggacagagccaagcccgtgacccagatcgtgtctgccgaagcctggggcagagccgattgcgacgtgaagctggtggaaaagagcttcgagacagacaccaacctgaacttccagaacctgagcgtgatcggcttcagaatcctgctgctgaaagtggccggctttaacctgctgatgaccctgcggctgtggtccagcagggccaagcgatctggatctggagcaacaaacttctcactactcaaacaagcaggtgacgtggaggagaatcccgggcctactagtaccatggactggatttggcgcatccttttccttgtcggcgctgctaccggcgcccattccctgttcaatcaagaggtgcagatccctctgaccgagagctactgtggcccctgtcctaagaactggatctgctacaagaacaactgctaccagttcttcgacgagagcaagaattggtacgagagccaggccagctgcatgagccagaatgccagcctgctgaaggtgtacagcaaagaggaccaggacctgctgaaactggtcaagagcgcccactggatgggccttgtgcacatccccaccaatggctcttggcagtgggaggacggcagcattctgagccctaacctgctgaccatcatcgagatgcagaagggcgactgcgccctgtacgccagcagctttaagggctacatcgagaattgcagcaccccgaacacctacatctgtatgcagagaaccgtttctggcggaggcggctctggaggaggcggaagtggcggcggaggcgacctctttaatcaagaagtccagattccactcaccgaatcctactgcggaccttgtccaaaaaattggatttgttataagaacaactgttatcaattctttgatgagtctaaaaattggtatgagtcccaggcttcctgcatgtctcagaacgcttctctgctgaaagtctactctaaagaagatcaggatctcctgaagctcgtcaagtctgcccattggatggggctcgtccacattcctaccaacggaagctggcaatgggaagatggctccatcctgtctccaaatctgctcacgattattgaaatgcagaaaggggattgtgctctctacgccagctccttcaagggatatattgagaactgtagcacgcccaatacttatatctgtatgcaacggaccgtgggatccggcggcggaggatctggcggaggcggatctgggggcggaggctctttcgaagaagtgcagctggttgaatcaggtggcggcctggttcaacctggcggatctctgagactgagctgtgccgccagcggctacagcatcaccaatgactacgcctggaactgggtccgacaggcccctggaaaaggactggaatgggtcggatatatcagctactccggctacaccacctacaatcccagcatcaagagccggttcaccatcagcagagacaccagcaagaacaccctgtacctccagatgaactccctgagagccgaggacaccgccgtgtactattgtgccagatggaccagcggcctggactattggggacagggaacactggtcaccgtgtcctctacgcgtatccagaaccctgatcctgccgtgtaccagctgcgggatagcaagagcagcgacaagagcgtgtgtctgttcaccgacttcgacagccagaccaacgtgtcccagagcaaggactccgacgtgtacatcaccgataagtgcgtgctggacatgcggagcatggacttcaagagcaactccgccgtggcctggtccaacaagtccgatttcgcctgcgccaacgccttcaacaacagcattatccccgaggacacattcttcccaagccccgagagcagctgcggctttaccagcgagagctaccagcagggcgtgctgagcgccaccatcctgtacgagatcctgctgggcaaggccaccctgtacgccgtgctggtgtctgccctggtgctgatggctatggtcaagcggaaggacagccggggacgcgccaagagaagcggatctggcgtgaagcagaccctgaatttcgacctgctgaagctggctggcgacgtggaatccaacccaggcccttctagaggccatatgaccgagtacaagcccacggtgcgcctcgccacccgcgacgacgtccccagggccgtacgcaccctcgccgccgcgttcgccgactaccccgccacgcgccacaccgtcgatccggaccgccacatcgagcgggtcaccgagctgcaagaactcttcctcacgcgcgtcgggctcgacatcggcaaggtgtgggtcgcggacgacggcgccgcggtggcggtctggaccacgccggagagcgtcgaagcgggggcggtgttcgccgagatcggcccgcgcatggccgagttgagcggttcccggctggccgcgcagcaacagatggaaggcctcctggcgccgcaccggcccaaggagcccgcgtggttcctggccaccgtcggcgtctcgcccgaccaccagggcaagggtctgggcagcgccgtcgtgctccccggagtggaggcggccgagcgcgccggggtgcccgccttcctggagacctccgcgccccgcaacctccccttctacgagcggctcggcttcaccgtcaccgccgacgtcgaggtgcccgaaggaccgcgcacctggtgcatgacccgcaagcccggtgcctga

SEQ ID NO: 38812 - DNA, 1851 bp, synthetic construct
  source 1..1851: mol_type = other DNA
atggccttaccagtgaccgccttgctcctgccgctggccttgctgctccacgccgccaggccggacatccagatgacacagagccctagcagcctgtctgccagcgtgggagacagagtgaccatcacatgcaaggccagcgacctgatccacaactggctggcctggtatcagcagaagcctggcaaggcccctaagctgctgatctacggcgctacctctctggaaacaggcgtgcccagcagattttctggcagcggctctggcaccgacttcaccctgacaatatccagcctccagcctgaggacttcgccacctactactgccagcagtactggaccacacctttcaccttcggccagggcaccaaggtggaaatcaaaagactcgaggacctgaagaacgtgttcccacctgaggtggccgtgttcgagcctagcgaggccgagatcagccacacccagaaagccaccctcgtgtgcctggctaccggcttctaccccgaccatgtggaactgtcttggtgggtcaacggcaaagaggtgcacagcggcgtgtgtaccgacccccagccactgaaagaacagcccgccctgaacgacagccggtactgcctgagcagcagactgagagtgtccgccaccttctggcagaacccccggaaccacttcagatgccaggtgcagttctacggcctgagcgagaacgacgagtggacccaggacagagccaagcccgtgacccagatcgtgtctgccgaagcctggggcagagccgattgcggctttaccagcgagagctaccagcagggcgtgctgagcgccaccaacctgagcgtgatcggcttcagaatcctgctgctgaaagtggccggctttaacctgctgatgaccctgcggctgtggtccagcagggccaagcgatctggatctggagcaacaaacttctcactactcaaacaagcaggtgacgtggaggagaatcccgggcctactagtatggactggatttggcgcatccttttccttgtcggcgctgctaccggcgcgcattccttcgaagaagtgcagctggttgaatcaggtggcggcctggttcaacctggcggatctctgagactgagctgtgccgccagcggctacagcatcaccaatgactacgcctggaactgggtccgacaggcccctggaaaaggactggaatgggtcggatatatcagctactccggctacaccacctacaatcccagcatcaagagccggttcaccatcagcagagacaccagcaagaacaccctgtacctccagatgaactccctgagagccgaggacaccgccgtgtactattgtgccagatggaccagcggcctggactattggggacagggaacactggtcaccgtgtcctctacgcgtatccagaaccctgatcctgccgtgtaccagctgcgggatagcaagagcagcgacaagagcgtgtgtctgttcaccgacttcgacagccagaccaacgtgtcccagagcaaggactccgacgtgtacatcaccgataagtgcgtgctggacatgcggagcatggacttcaagagcaactccgccgtggcctggtccaacaagtccgatttcgcctgcgccaacgccttcaacaacagcattatccccgaggacacattcttcccaagccccgagagcagctgcgacgtgaagctggtggaaaagagcttcgagacagacaccaacctgaacttccagatcctgtacgagatcctgctgggcaaggccaccctgtacgccgtgctggtgtctgccctggtgctgatggctatggtcaagcggaaggacagccgggga

SEQ ID NO: 38813 - DNA, 1863 bp, synthetic construct
  source 1..1863: mol_type = other DNA
atggccttaccagtgaccgccttgctcctgccgctggccttgctgctccacgccgccaggccggacatccagatgacacagagccctagcagcctgtctgccagcgtgggagacagagtgaccatcacatgcaaggccagcgacctgatccacaactggctggcctggtatcagcagaagcctggcaaggcccctaagctgctgatctacggcgctacctctctggaaacaggcgtgcccagcagattttctggcagcggctctggcaccgacttcaccctgacaatatccagcctccagcctgaggacttcgccacctactactgccagcagtactggaccacacctttcaccttcggccagggcaccaaggtggaaatcaaaagactcgagatccagaaccctgatcctgccgtgtaccagctgcgggatagcaagagcagcgacaagagcgtgtgtctgttcaccgacttcgacagccagaccaacgtgtcccagagcaaggactccgacgtgtacatcaccgataagtgcgtgctggacatgcggagcatggacttcaagagcaactccgccgtggcctggtccaacaagtccgatttcgcctgcgccaacgccttcaacaacagcattatccccgaggacacattcttcccaagccccgagagcagctgcgacgtgaagctggtggaaaagagcttcgagacagacaccaacctgaacttccagatcctgtacgagatcctgctgggcaaggccaccctgtacgccgtgctggtgtctgccctggtgctgatggctatggtcaagcggaaggacagccggggacgcgccaagagaagcggatctggcgtgaagcagaccctgaatttcgacctgctgaagctggctggcgacgtggaatccaacccaggccctactagtatggactggatttggcgcatccttttccttgtcggcgctgctaccggcgcgcattccttcgaagaagtgcagctggttgaatcaggtggcggcctggttcaacctggcggatctctgagactgagctgtgccgccagcggctacagcatcaccaatgactacgcctggaactgggtccgacaggcccctggaaaaggactggaatgggtcggatatatcagctactccggctacaccacctacaatcccagcatcaagagccggttcaccatcagcagagacaccagcaagaacaccctgtacctccagatgaactccctgagagccgaggacaccgccgtgtactattgtgccagatggaccagcggcctggactattggggacagggaacactggtcaccgtgtcctctacgcgtgaggacctgaagaacgtgttcccacctgaggtggccgtgttcgagcctagcgaggccgagatcagccacacccagaaagccaccctcgtgtgcctggctaccggcttctaccccgaccatgtggaactgtcttggtgggtcaacggcaaagaggtgcacagcggcgtgtgtaccgacccccagccactgaaagaacagcccgccctgaacgacagccggtactgcctgagcagcagactgagagtgtccgccaccttctggcagaacccccggaaccacttcagatgccaggtgcagttctacggcctgagcgagaacgacgagtggacccaggacagagccaagcccgtgacccagatcgtgtctgccgaagcctggggcagagccgattgcggctttaccagcgagagctaccagcagggcgtgctgagcgccaccaacctgagcgtgatcggcttcagaatcctgctgctgaaagtggccggctttaacctgctgatgaccctgcggctgtggtccagc

SEQ ID NO: 38814 - DNA, 2256 bp, synthetic construct
  source 1..2256: mol_type = other DNA
atggccttaccagtgaccgccttgctcctgccgctggccttgctgctccacgccgccaggccggaagtgcagctggttgaatctggcggaggactggttcagcctggcggatctctgagactgtcttgtgccgccagcggcttcagcttcagcgacttttggatgagctgggtccgacaggcccctggcaaaggacttgaatgggtcgccacaatcagccaggccggcagcgagaaggactacgtggactctgtgaagggcagattcaccatcagccgggacaacgccaagaagtccctgtacctccagatgaacagcctgagagccgaggacaccgccgtgtactattgtgcctctggcgtgtacagcttcgactacagaggccagggcaccctggtcacagtctcttctggtaccggcggaggcggatctggcggcggaggtagcggtggcggaggatctgaattcgacatccagatgacacagagccctagcagcctgtctgccagcgtgggagacagagtgaccatcacatgcaaggccagcgacctgatccacaactggctggcctggtatcagcagaagcctggcaaggcccctaagctgctgatctacggcgctacctctctggaaacaggcgtgcccagcagattttctggcagcggctctggcaccgacttcaccctgacaatatccagcctccagcctgaggacttcgccacctactactgccagcagtactggaccacacctttcaccttcggccagggcaccaaggtggaaatcaaaagactcgaggacctgaagaacgtgttcccacctgaggtggccgtgttcgagcctagcgaggccgagatcagccacacccagaaagccaccctcgtgtgcctggctaccggcttctaccccgaccatgtggaactgtcttggtgggtcaacggcaaagaggtgcacagcggcgtgtgtaccgacccccagccactgaaagaacagcccgccctgaacgacagccggtactgcctgagcagcagactgagagtgtccgccaccttctggcagaacccccggaaccacttcagatgccaggtgcagttctacggcctgagcgagaacgacgagtggacccaggacagagccaagcccgtgacccagatcgtgtctgccgaagcctggggcagagccgattgcggctttaccagcgagagctaccagcagggcgtgctgagcgccaccaacctgagcgtgatcggcttcagaatcctgctgctgaaagtggccggctttaacctgctgatgaccctgcggctgtggtccagcagggccaagcgatctggatctggagcaacaaacttctcactactcaaacaagcaggtgacgtggaggagaatcccgggcctactagtatggactggatttggcgcatccttttccttgtcggcgctgctaccggcgcgcattccttcgaagaagtgcagctggttgaatcaggtggcggcctggttcaacctggcggatctctgagactgagctgtgccgccagcggctacagcatcaccaatgactacgcctggaactgggtccgacaggcccctggaaaaggactggaatgggtcggatatatcagctactccggctacaccacctacaatcccagcatcaagagccggttcaccatcagcagagacaccagcaagaacaccctgtacctccagatgaactccctgagagccgaggacaccgccgtgtactattgtgccagatggaccagcggcctggactattggggacagggaacactggtcaccgtgtcctctacgcgtatccagaaccctgatcctgccgtgtaccagctgcgggatagcaagagcagcgacaagagcgtgtgtctgttcaccgacttcgacagccagaccaacgtgtcccagagcaaggactccgacgtgtacatcaccgataagtgcgtgctggacatgcggagcatggacttcaagagcaactccgccgtggcctggtccaacaagtccgatttcgcctgcgccaacgccttcaacaacagcattatccccgaggacacattcttcccaagccccgagagcagctgcgacgtgaagctggtggaaaagagcttcgagacagacaccaacctgaacttccagatcctgtacgagatcctgctgggcaaggccaccctgtacgccgtgctggtgtctgccctggtgctgatggctatggtcaagcggaaggacagccgggga

SEQ ID NO: 38815 - DNA, 2268 bp, synthetic construct
  source 1..2268: mol_type = other DNA
atggccttaccagtgaccgccttgctcctgccgctggccttgctgctccacgccgccaggccggaagtgcagctggttgaatctggcggaggactggttcagcctggcggatctctgagactgtcttgtgccgccagcggcttcagcttcagcgacttttggatgagctgggtccgacaggcccctggcaaaggacttgaatgggtcgccacaatcagccaggccggcagcgagaaggactacgtggactctgtgaagggcagattcaccatcagccgggacaacgccaagaagtccctgtacctccagatgaacagcctgagagccgaggacaccgccgtgtactattgtgcctctggcgtgtacagcttcgactacagaggccagggcaccctggtcacagtctcttctggtaccggcggaggcggatctggcggcggaggtagcggtggcggaggatctgaattcgacatccagatgacacagagccctagcagcctgtctgccagcgtgggagacagagtgaccatcacatgcaaggccagcgacctgatccacaactggctggcctggtatcagcagaagcctggcaaggcccctaagctgctgatctacggcgctacctctctggaaacaggcgtgcccagcagattttctggcagcggctctggcaccgacttcaccctgacaatatccagcctccagcctgaggacttcgccacctactactgccagcagtactggaccacacctttcaccttcggccagggcaccaaggtggaaatcaaaagactcgagatccagaaccctgatcctgccgtgtaccagctgcgggatagcaagagcagcgacaagagcgtgtgtctgttcaccgacttcgacagccagaccaacgtgtcccagagcaaggactccgacgtgtacatcaccgataagtgcgtgctggacatgcggagcatggacttcaagagcaactccgccgtggcctggtccaacaagtccgatttcgcctgcgccaacgccttcaacaacagcattatccccgaggacacattcttcccaagccccgagagcagctgcgacgtgaagctggtggaaaagagcttcgagacagacaccaacctgaacttccagatcctgtacgagatcctgctgggcaaggccaccctgtacgccgtgctggtgtctgccctggtgctgatggctatggtcaagcggaaggacagccggggacgcgccaagagaagcggatctggcgtgaagcagaccctgaatttcgacctgctgaagctggctggcgacgtggaatccaacccaggccctactagtatggactggatttggcgcatccttttccttgtcggcgctgctaccggcgcgcattccttcgaagaagtgcagctggttgaatcaggtggcggcctggttcaacctggcggatctctgagactgagctgtgccgccagcggctacagcatcaccaatgactacgcctggaactgggtccgacaggcccctggaaaaggactggaatgggtcggatatatcagctactccggctacaccacctacaatcccagcatcaagagccggttcaccatcagcagagacaccagcaagaacaccctgtacctccagatgaactccctgagagccgaggacaccgccgtgtactattgtgccagatggaccagcggcctggactattggggacagggaacactggtcaccgtgtcctctacgcgtgaggacctgaagaacgtgttcccacctgaggtggccgtgttcgagcctagcgaggccgagatcagccacacccagaaagccaccctcgtgtgcctggctaccggcttctaccccgaccatgtggaactgtcttggtgggtcaacggcaaagaggtgcacagcggcgtgtgtaccgacccccagccactgaaagaacagcccgccctgaacgacagccggtactgcctgagcagcagactgagagtgtccgccaccttctggcagaacccccggaaccacttcagatgccaggtgcagttctacggcctgagcgagaacgacgagtggacccaggacagagccaagcccgtgacccagatcgtgtctgccgaagcctggggcagagccgattgcggctttaccagcgagagctaccagcagggcgtgctgagcgccaccaacctgagcgtgatcggcttcagaatcctgctgctgaaagtggccggctttaacctgctgatgaccctgcggctgtggtccagc

SEQ ID NO: 38816 - DNA, 2667 bp, synthetic construct
  source 1..2667: mol_type = other DNA
atggccttaccagtgaccgccttgctcctgccgctggccttgctgctccacgccgccaggccggaagtgcagctggttgaatctggcggaggactggttcagcctggcggatctctgagactgtcttgtgccgccagcggcttcagcttcagcgacttttggatgagctgggtccgacaggcccctggcaaaggacttgaatgggtcgccacaatcagccaggccggcagcgagaaggactacgtggactctgtgaagggcagattcaccatcagccgggacaacgccaagaagtccctgtacctccagatgaacagcctgagagccgaggacaccgccgtgtactattgtgcctctggcgtgtacagcttcgactacagaggccagggcaccctggtcacagtctcttctggtaccggcggaggcggatctggcggcggaggtagcggtggcggaggatctgaattcgacatccagatgacacagagccctagcagcctgtctgccagcgtgggagacagagtgaccatcacatgcaaggccagcgacctgatccacaactggctggcctggtatcagcagaagcctggcaaggcccctaagctgctgatctacggcgctacctctctggaaacaggcgtgcccagcagattttctggcagcggctctggcaccgacttcaccctgacaatatccagcctccagcctgaggacttcgccacctactactgccagcagtactggaccacacctttcaccttcggccagggcaccaaggtggaaatcaaaagactcgaggacctgaagaacgtgttcccacctgaggtggccgtgttcgagcctagcgaggccgagatcagccacacccagaaagccaccctcgtgtgcctggctaccggcttctaccccgaccatgtggaactgtcttggtgggtcaacggcaaagaggtgcacagcggcgtgtgtaccgacccccagccactgaaagaacagcccgccctgaacgacagccggtactgcctgagcagcagactgagagtgtccgccaccttctggcagaacccccggaaccacttcagatgccaggtgcagttctacggcctgagcgagaacgacgagtggacccaggacagagccaagcccgtgacccagatcgtgtctgccgaagcctggggcagagccgattgcggctttaccagcgagagctaccagcagggcgtgctgagcgccaccaacctgagcgtgatcggcttcagaatcctgctgctgaaagtggccggctttaacctgctgatgaccctgcggctgtggtccagcagggccaagcgatctggatctggagcaacaaacttctcactactcaaacaagcaggtgacgtggaggagaatcccgggcctactagtatggactggatttggcgcatccttttccttgtcggcgctgctaccggcgcgcattccgggccccagctccagctgcaagagtctggacctggcctggtcaagcctagcgagacactgagcctgacctgtaccgtgtccggcgatagcatcagcagcggcgattactactggggctggatcagacagcctcctggcaaaggactggaatggatcggccacatctactacagcggcgtgacctactacaaccccagcctgaagtccagagtgaccatcagcgtggacaccagccggaaccagttctccctgaagctgtctagcgtgacagccgccgataccgccgtgtactactgcaccagagaggacagcagcaactggcggagtagaggccagggaacactggtcacagttagctctggatccggcggaggcggaagtggaggcggaggatctggcggcggaggctctttcgaagaagtgcagctggttgaatcaggtggcggcctggttcaacctggcggatctctgagactgagctgtgccgccagcggctacagcatcaccaatgactacgcctggaactgggtccgacaggcccctggaaaaggactggaatgggtcggatatatcagctactccggctacaccacctacaatcccagcatcaagagccggttcaccatcagcagagacaccagcaagaacaccctgtacctccagatgaactccctgagagccgaggacaccgccgtgtactattgtgccagatggaccagcggcctggactattggggacagggaacactggtcaccgtgtcctctacgcgtatccagaaccctgatcctgccgtgtaccagctgcgggatagcaagagcagcgacaagagcgtgtgtctgttcaccgacttcgacagccagaccaacgtgtcccagagcaaggactccgacgtgtacatcaccgataagtgcgtgctggacatgcggagcatggacttcaagagcaactccgccgtggcctggtccaacaagtccgatttcgcctgcgccaacgccttcaacaacagcattatccccgaggacacattcttcccaagccccgagagcagctgcgacgtgaagctggtggaaaagagcttcgagacagacaccaacctgaacttccagatcctgtacgagatcctgctgggcaaggccaccctgtacgccgtgctggtgtctgccctggtgctgatggctatggtcaagcggaaggacagccgggga

SEQ ID NO: 38817 - DNA, 2679 bp, synthetic construct
  source 1..2679: mol_type = other DNA
atggccttaccagtgaccgccttgctcctgccgctggccttgctgctccacgccgccaggccggaagtgcagctggttgaatctggcggaggactggttcagcctggcggatctctgagactgtcttgtgccgccagcggcttcagcttcagcgacttttggatgagctgggtccgacaggcccctggcaaaggacttgaatgggtcgccacaatcagccaggccggcagcgagaaggactacgtggactctgtgaagggcagattcaccatcagccgggacaacgccaagaagtccctgtacctccagatgaacagcctgagagccgaggacaccgccgtgtactattgtgcctctggcgtgtacagcttcgactacagaggccagggcaccctggtcacagtctcttctggtaccggcggaggcggatctggcggcggaggtagcggtggcggaggatctgaattcgacatccagatgacacagagccctagcagcctgtctgccagcgtgggagacagagtgaccatcacatgcaaggccagcgacctgatccacaactggctggcctggtatcagcagaagcctggcaaggcccctaagctgctgatctacggcgctacctctctggaaacaggcgtgcccagcagattttctggcagcggctctggcaccgacttcaccctgacaatatccagcctccagcctgaggacttcgccacctactactgccagcagtactggaccacacctttcaccttcggccagggcaccaaggtggaaatcaaaagactcgagatccagaaccctgatcctgccgtgtaccagctgcgggatagcaagagcagcgacaagagcgtgtgtctgttcaccgacttcgacagccagaccaacgtgtcccagagcaaggactccgacgtgtacatcaccgataagtgcgtgctggacatgcggagcatggacttcaagagcaactccgccgtggcctggtccaacaagtccgatttcgcctgcgccaacgccttcaacaacagcattatccccgaggacacattcttcccaagccccgagagcagctgcgacgtgaagctggtggaaaagagcttcgagacagacaccaacctgaacttccagatcctgtacgagatcctgctgggcaaggccaccctgtacgccgtgctggtgtctgccctggtgctgatggctatggtcaagcggaaggacagccggggacgcgccaagagaagcggatctggcgtgaagcagaccctgaatttcgacctgctgaagctggctggcgacgtggaatccaacccaggccctactagtatggactggatttggcgcatccttttccttgtcggcgctgctaccggcgcgcattccgggccccagctccagctgcaagagtctggacctggcctggtcaagcctagcgagacactgagcctgacctgtaccgtgtccggcgatagcatcagcagcggcgattactactggggctggatcagacagcctcctggcaaaggactggaatggatcggccacatctactacagcggcgtgacctactacaaccccagcctgaagtccagagtgaccatcagcgtggacaccagccggaaccagttctccctgaagctgtctagcgtgacagccgccgataccgccgtgtactactgcaccagagaggacagcagcaactggcggagtagaggccagggaacactggtcacagttagctctggatccggcggaggcggaagtggaggcggaggatctggcggcggaggctctttcgaagaagtgcagctggttgaatcaggtggcggcctggttcaacctggcggatctctgagactgagctgtgccgccagcggctacagcatcaccaatgactacgcctggaactgggtccgacaggcccctggaaaaggactggaatgggtcggatatatcagctactccggctacaccacctacaatcccagcatcaagagccggttcaccatcagcagagacaccagcaagaacaccctgtacctccagatgaactccctgagagccgaggacaccgccgtgtactattgtgccagatggaccagcggcctggactattggggacagggaacactggtcaccgtgtcctctacgcgtgaggacctgaagaacgtgttcccacctgaggtggccgtgttcgagcctagcgaggccgagatcagccacacccagaaagccaccctcgtgtgcctggctaccggcttctaccccgaccatgtggaactgtcttggtgggtcaacggcaaagaggtgcacagcggcgtgtgtaccgacccccagccactgaaagaacagcccgccctgaacgacagccggtactgcctgagcagcagactgagagtgtccgccaccttctggcagaacccccggaaccacttcagatgccaggtgcagttctacggcctgagcgagaacgacgagtggacccaggacagagccaagcccgtgacccagatcgtgtctgccgaagcctggggcagagccgattgcggctttaccagcgagagctaccagcagggcgtgctgagcgccaccaacctgagcgtgatcggcttcagaatcctgctgctgaaagtggccggctttaacctgctgatgaccctgcggctgtggtccagc

SEQ ID NO: 38818 - DNA, 2163 bp, synthetic construct
  source 1..2163: mol_type = other DNA
atggccttaccagtgaccgccttgctcctgccgctggccttgctgctccacgccgccaggccggacatccagatgacacagagccctagcagcctgtctgccagcgtgggagacagagtgaccatcacatgcaaggccagcgacctgatccacaactggctggcctggtatcagcagaagcctggcaaggcccctaagctgctgatctacggcgctacctctctggaaacaggcgtgcccagcagattttctggcagcggctctggcaccgacttcaccctgacaatatccagcctccagcctgaggacttcgccacctactactgccagcagtactggaccacacctttcaccttcggccagggcaccaaggtggaaatcaaaagactcgaggacctgaagaacgtgttcccacctgaggtggccgtgttcgagcctagcgaggccgagatcagccacacccagaaagccaccctcgtgtgcctggctaccggcttctaccccgaccatgtggaactgtcttggtgggtcaacggcaaagaggtgcacagcggcgtgtgtaccgacccccagccactgaaagaacagcccgccctgaacgacagccggtactgcctgagcagcagactgagagtgtccgccaccttctggcagaacccccggaaccacttcagatgccaggtgcagttctacggcctgagcgagaacgacgagtggacccaggacagagccaagcccgtgacccagatcgtgtctgccgaagcctggggcagagccgatgatgtgattaagatccactggcaggaaaagaagtccaacaccatcctgggcagccaggaaggcaacaccatgaagaccaacgacacctacatgaagttcagctggctgaccgtgcccgagaagtccctggacaaagaacacagatgcatcgtgcggcacgaaaacaacaagaacggcgtggaccaggaaatcatcttcccacccatcaagaccgatgtgattacaatggaccccaaggacaactgctccaaggacgccaacgataccctgctgctccagctgaccaacaccagcgcctactacatgtacttgttgctgctgctgaagtccgtggtgtacttcgccatcatcacatgctgcctgctgatggctatggtcaagcggaaggacagccggggaagggccaagcgatctggatctggagcaacaaacttctcactactcaaacaagcaggtgacgtggaggagaatcccgggcctactagtatggactggatttggcgcatccttttccttgtcggcgctgctaccggcgcgcattccttcgaagaagtgcagctggttgaatcaggtggcggcctggttcaacctggcggatctctgagactgagctgtgccgccagcggctacagcatcaccaatgactacgcctggaactgggtccgacaggcccctggaaaaggactggaatgggtcggatatatcagctactccggctacaccacctacaatcccagcatcaagagccggttcaccatcagcagagacaccagcaagaacaccctgtacctccagatgaactccctgagagccgaggacaccgccgtgtactattgtgccagatggaccagcggcctggactattggggacagggaacactggtcaccgtgtcctctacgcgtatccagaaccctgatcctgccgtgtaccagctgcgggatagcaagagcagcgacaagagcgtgtgtctgttcaccgacttcgacagccagaccaacgtgtcccagagcaaggactccgacgtgtacatcaccgataagtgcgtgctggacatgcggagcatggacttcaagagcaactccgccgtggcctggtccaacaagtccgatttcgcctgcgccaacgccttcaacaacagcattatccccgaggacacattcttcccaagccccgagagcagcgactccaccgaccacgtgaagcccaaagagacagagaacaccaagcagcccagcaagagctgccacaagcccaaggccatcgtgcacaccgagaaagtgaacatgatgagcctgaccgtgctgggcctgcggatgctgttcgccaaaaccgtggccgtgaacttcctgctgaccgccaagctgttcttcctcctcaccgcc

SEQ ID NO: 38819 - DNA, 2175 bp, synthetic construct
  source 1..2175: mol_type = other DNA
atggccttaccagtgaccgccttgctcctgccgctggccttgctgctccacgccgccaggccggacatccagatgacacagagccctagcagcctgtctgccagcgtgggagacagagtgaccatcacatgcaaggccagcgacctgatccacaactggctggcctggtatcagcagaagcctggcaaggcccctaagctgctgatctacggcgctacctctctggaaacaggcgtgcccagcagattttctggcagcggctctggcaccgacttcaccctgacaatatccagcctccagcctgaggacttcgccacctactactgccagcagtactggaccacacctttcaccttcggccagggcaccaaggtggaaatcaaaagactcgagatccagaaccctgatcctgccgtgtaccagctgcgggatagcaagagcagcgacaagagcgtgtgtctgttcaccgacttcgacagccagaccaacgtgtcccagagcaaggactccgacgtgtacatcaccgataagtgcgtgctggacatgcggagcatggacttcaagagcaactccgccgtggcctggtccaacaagtccgatttcgcctgcgccaacgccttcaacaacagcattatccccgaggacacattcttcccaagccccgagagcagcgactccaccgaccacgtgaagcccaaagagacagagaacaccaagcagcccagcaagagctgccacaagcccaaggccatcgtgcacaccgagaaagtgaacatgatgagcctgaccgtgctgggcctgcggatgctgttcgccaaaaccgtggccgtgaacttcctgctgaccgccaagctgttcttcctcctcaccgcccgcgccaagagaagcggatctggcgtgaagcagaccctgaatttcgacctgctgaagctggctggcgacgtggaatccaacccaggccctactagtatggactggatttggcgcatccttttccttgtcggcgctgctaccggcgcgcattccttcgaagaagtgcagctggttgaatcaggtggcggcctggttcaacctggcggatctctgagactgagctgtgccgccagcggctacagcatcaccaatgactacgcctggaactgggtccgacaggcccctggaaaaggactggaatgggtcggatatatcagctactccggctacaccacctacaatcccagcatcaagagccggttcaccatcagcagagacaccagcaagaacaccctgtacctccagatgaactccctgagagccgaggacaccgccgtgtactattgtgccagatggaccagcggcctggactattggggacagggaacactggtcaccgtgtcctctacgcgtgaggacctgaagaacgtgttcccacctgaggtggccgtgttcgagcctagcgaggccgagatcagccacacccagaaagccaccctcgtgtgcctggctaccggcttctaccccgaccatgtggaactgtcttggtgggtcaacggcaaagaggtgcacagcggcgtgtgtaccgacccccagccactgaaagaacagcccgccctgaacgacagccggtactgcctgagcagcagactgagagtgtccgccaccttctggcagaacccccggaaccacttcagatgccaggtgcagttctacggcctgagcgagaacgacgagtggacccaggacagagccaagcccgtgacccagatcgtgtctgccgaagcctggggcagagccgatgatgtgattaagatccactggcaggaaaagaagtccaacaccatcctgggcagccaggaaggcaacaccatgaagaccaacgacacctacatgaagttcagctggctgaccgtgcccgagaagtccctggacaaagaacacagatgcatcgtgcggcacgaaaacaacaagaacggcgtggaccaggaaatcatcttcccacccatcaagaccgatgtgattacaatggaccccaaggacaactgctccaaggacgccaacgataccctgctgctccagctgaccaacaccagcgcctactacatgtacttgttgctgctgctgaagtccgtggtgtacttcgccatcatcacatgctgcctgctgatggctatggtcaagcggaaggacagccgggga

SEQ ID NO: 38820 - DNA, 2568 bp, synthetic construct
  source 1..2568: mol_type = other DNA
atggccttaccagtgaccgccttgctcctgccgctggccttgctgctccacgccgccaggccggaagtgcagctggttgaatctggcggaggactggttcagcctggcggatctctgagactgtcttgtgccgccagcggcttcagcttcagcgacttttggatgagctgggtccgacaggcccctggcaaaggacttgaatgggtcgccacaatcagccaggccggcagcgagaaggactacgtggactctgtgaagggcagattcaccatcagccgggacaacgccaagaagtccctgtacctccagatgaacagcctgagagccgaggacaccgccgtgtactattgtgcctctggcgtgtacagcttcgactacagaggccagggcaccctggtcacagtctcttctggtaccggcggaggcggatctggcggcggaggtagcggtggcggaggatctgaattcgacatccagatgacacagagccctagcagcctgtctgccagcgtgggagacagagtgaccatcacatgcaaggccagcgacctgatccacaactggctggcctggtatcagcagaagcctggcaaggcccctaagctgctgatctacggcgctacctctctggaaacaggcgtgcccagcagattttctggcagcggctctggcaccgacttcaccctgacaatatccagcctccagcctgaggacttcgccacctactactgccagcagtactggaccacacctttcaccttcggccagggcaccaaggtggaaatcaaaagactcgaggacctgaagaacgtgttcccacctgaggtggccgtgttcgagcctagcgaggccgagatcagccacacccagaaagccaccctcgtgtgcctggctaccggcttctaccccgaccatgtggaactgtcttggtgggtcaacggcaaagaggtgcacagcggcgtgtgtaccgacccccagccactgaaagaacagcccgccctgaacgacagccggtactgcctgagcagcagactgagagtgtccgccaccttctggcagaacccccggaaccacttcagatgccaggtgcagttctacggcctgagcgagaacgacgagtggacccaggacagagccaagcccgtgacccagatcgtgtctgccgaagcctggggcagagccgatgatgtgattaagatccactggcaggaaaagaagtccaacaccatcctgggcagccaggaaggcaacaccatgaagaccaacgacacctacatgaagttcagctggctgaccgtgcccgagaagtccctggacaaagaacacagatgcatcgtgcggcacgaaaacaacaagaacggcgtggaccaggaaatcatcttcccacccatcaagaccgatgtgattacaatggaccccaaggacaactgctccaaggacgccaacgataccctgctgctccagctgaccaacaccagcgcctactacatgtacttgttgctgctgctgaagtccgtggtgtacttcgccatcatcacatgctgcctgctgatggctatggtcaagcggaaggacagccggggaagggccaagcgatctggatctggagcaacaaacttctcactactcaaacaagcaggtgacgtggaggagaatcccgggcctactagtatggactggatttggcgcatccttttccttgtcggcgctgctaccggcgcgcattccttcgaagaagtgcagctggttgaatcaggtggcggcctggttcaacctggcggatctctgagactgagctgtgccgccagcggctacagcatcaccaatgactacgcctggaactgggtccgacaggcccctggaaaaggactggaatgggtcggatatatcagctactccggctacaccacctacaatcccagcatcaagagccggttcaccatcagcagagacaccagcaagaacaccctgtacctccagatgaactccctgagagccgaggacaccgccgtgtactattgtgccagatggaccagcggcctggactattggggacagggaacactggtcaccgtgtcctctacgcgtatccagaaccctgatcctgccgtgtaccagctgcgggatagcaagagcagcgacaagagcgtgtgtctgttcaccgacttcgacagccagaccaacgtgtcccagagcaaggactccgacgtgtacatcaccgataagtgcgtgctggacatgcggagcatggacttcaagagcaactccgccgtggcctggtccaacaagtccgatttcgcctgcgccaacgccttcaacaacagcattatccccgaggacacattcttcccaagccccgagagcagcgactccaccgaccacgtgaagcccaaagagacagagaacaccaagcagcccagcaagagctgccacaagcccaaggccatcgtgcacaccgagaaagtgaacatgatgagcctgaccgtgctgggcctgcggatgctgttcgccaaaaccgtggccgtgaacttcctgctgaccgccaagctgttcttcctcctcaccgcc

SEQ ID NO: 38821 - DNA, 2580 bp, synthetic construct
  source 1..2580: mol_type = other DNA
atggccttaccagtgaccgccttgctcctgccgctggccttgctgctccacgccgccaggccggaagtgcagctggttgaatctggcggaggactggttcagcctggcggatctctgagactgtcttgtgccgccagcggcttcagcttcagcgacttttggatgagctgggtccgacaggcccctggcaaaggacttgaatgggtcgccacaatcagccaggccggcagcgagaaggactacgtggactctgtgaagggcagattcaccatcagccgggacaacgccaagaagtccctgtacctccagatgaacagcctgagagccgaggacaccgccgtgtactattgtgcctctggcgtgtacagcttcgactacagaggccagggcaccctggtcacagtctcttctggtaccggcggaggcggatctggcggcggaggtagcggtggcggaggatctgaattcgacatccagatgacacagagccctagcagcctgtctgccagcgtgggagacagagtgaccatcacatgcaaggccagcgacctgatccacaactggctggcctggtatcagcagaagcctggcaaggcccctaagctgctgatctacggcgctacctctctggaaacaggcgtgcccagcagattttctggcagcggctctggcaccgacttcaccctgacaatatccagcctccagcctgaggacttcgccacctactactgccagcagtactggaccacacctttcaccttcggccagggcaccaaggtggaaatcaaaagactcgagatccagaaccctgatcctgccgtgtaccagctgcgggatagcaagagcagcgacaagagcgtgtgtctgttcaccgacttcgacagccagaccaacgtgtcccagagcaaggactccgacgtgtacatcaccgataagtgcgtgctggacatgcggagcatggacttcaagagcaactccgccgtggcctggtccaacaagtccgatttcgcctgcgccaacgccttcaacaacagcattatccccgaggacacattcttcccaagccccgagagcagcgactccaccgaccacgtgaagcccaaagagacagagaacaccaagcagcccagcaagagctgccacaagcccaaggccatcgtgcacaccgagaaagtgaacatgatgagcctgaccgtgctgggcctgcggatgctgttcgccaaaaccgtggccgtgaacttcctgctgaccgccaagctgttcttcctcctcaccgcccgcgccaagagaagcggatctggcgtgaagcagaccctgaatttcgacctgctgaagctggctggcgacgtggaatccaacccaggccctactagtatggactggatttggcgcatccttttccttgtcggcgctgctaccggcgcgcattccttcgaagaagtgcagctggttgaatcaggtggcggcctggttcaacctggcggatctctgagactgagctgtgccgccagcggctacagcatcaccaatgactacgcctggaactgggtccgacaggcccctggaaaaggactggaatgggtcggatatatcagctactccggctacaccacctacaatcccagcatcaagagccggttcaccatcagcagagacaccagcaagaacaccctgtacctccagatgaactccctgagagccgaggacaccgccgtgtactattgtgccagatggaccagcggcctggactattggggacagggaacactggtcaccgtgtcctctacgcgtgaggacctgaagaacgtgttcccacctgaggtggccgtgttcgagcctagcgaggccgagatcagccacacccagaaagccaccctcgtgtgcctggctaccggcttctaccccgaccatgtggaactgtcttggtgggtcaacggcaaagaggtgcacagcggcgtgtgtaccgacccccagccactgaaagaacagcccgccctgaacgacagccggtactgcctgagcagcagactgagagtgtccgccaccttctggcagaacccccggaaccacttcagatgccaggtgcagttctacggcctgagcgagaacgacgagtggacccaggacagagccaagcccgtgacccagatcgtgtctgccgaagcctggggcagagccgatgatgtgattaagatccactggcaggaaaagaagtccaacaccatcctgggcagccaggaaggcaacaccatgaagaccaacgacacctacatgaagttcagctggctgaccgtgcccgagaagtccctggacaaagaacacagatgcatcgtgcggcacgaaaacaacaagaacggcgtggaccaggaaatcatcttcccacccatcaagaccgatgtgattacaatggaccccaaggacaactgctccaaggacgccaacgataccctgctgctccagctgaccaacaccagcgcctactacatgtacttgttgctgctgctgaagtccgtggtgtacttcgccatcatcacatgctgcctgctgatggctatggtcaagcggaaggacagccgggga

SEQ ID NO: 38822 - DNA, 2979 bp, synthetic construct
  source 1..2979: mol_type = other DNA
atggccttaccagtgaccgccttgctcctgccgctggccttgctgctccacgccgccaggccggaagtgcagctggttgaatctggcggaggactggttcagcctggcggatctctgagactgtcttgtgccgccagcggcttcagcttcagcgacttttggatgagctgggtccgacaggcccctggcaaaggacttgaatgggtcgccacaatcagccaggccggcagcgagaaggactacgtggactctgtgaagggcagattcaccatcagccgggacaacgccaagaagtccctgtacctccagatgaacagcctgagagccgaggacaccgccgtgtactattgtgcctctggcgtgtacagcttcgactacagaggccagggcaccctggtcacagtctcttctggtaccggcggaggcggatctggcggcggaggtagcggtggcggaggatctgaattcgacatccagatgacacagagccctagcagcctgtctgccagcgtgggagacagagtgaccatcacatgcaaggccagcgacctgatccacaactggctggcctggtatcagcagaagcctggcaaggcccctaagctgctgatctacggcgctacctctctggaaacaggcgtgcccagcagattttctggcagcggctctggcaccgacttcaccctgacaatatccagcctccagcctgaggacttcgccacctactactgccagcagtactggaccacacctttcaccttcggccagggcaccaaggtggaaatcaaaagactcgaggacctgaagaacgtgttcccacctgaggtggccgtgttcgagcctagcgaggccgagatcagccacacccagaaagccaccctcgtgtgcctggctaccggcttctaccccgaccatgtggaactgtcttggtgggtcaacggcaaagaggtgcacagcggcgtgtgtaccgacccccagccactgaaagaacagcccgccctgaacgacagccggtactgcctgagcagcagactgagagtgtccgccaccttctggcagaacccccggaaccacttcagatgccaggtgcagttctacggcctgagcgagaacgacgagtggacccaggacagagccaagcccgtgacccagatcgtgtctgccgaagcctggggcagagccgatgatgtgattaagatccactggcaggaaaagaagtccaacaccatcctgggcagccaggaaggcaacaccatgaagaccaacgacacctacatgaagttcagctggctgaccgtgcccgagaagtccctggacaaagaacacagatgcatcgtgcggcacgaaaacaacaagaacggcgtggaccaggaaatcatcttcccacccatcaagaccgatgtgattacaatggaccccaaggacaactgctccaaggacgccaacgataccctgctgctccagctgaccaacaccagcgcctactacatgtacttgttgctgctgctgaagtccgtggtgtacttcgccatcatcacatgctgcctgctgatggctatggtcaagcggaaggacagccggggaagggccaagcgatctggatctggagcaacaaacttctcactactcaaacaagcaggtgacgtggaggagaatcccgggcctactagtatggactggatttggcgcatccttttccttgtcggcgctgctaccggcgcgcattccgggccccagctccagctgcaagagtctggacctggcctggtcaagcctagcgagacactgagcctgacctgtaccgtgtccggcgatagcatcagcagcggcgattactactggggctggatcagacagcctcctggcaaaggactggaatggatcggccacatctactacagcggcgtgacctactacaaccccagcctgaagtccagagtgaccatcagcgtggacaccagccggaaccagttctccctgaagctgtctagcgtgacagccgccgataccgccgtgtactactgcaccagagaggacagcagcaactggcggagtagaggccagggaacactggtcacagttagctctggatccggcggaggcggaagtggaggcggaggatctggcggcggaggctctttcgaagaagtgcagctggttgaatcaggtggcggcctggttcaacctggcggatctctgagactgagctgtgccgccagcggctacagcatcaccaatgactacgcctggaactgggtccgacaggcccctggaaaaggactggaatgggtcggatatatcagctactccggctacaccacctacaatcccagcatcaagagccggttcaccatcagcagagacaccagcaagaacaccctgtacctccagatgaactccctgagagccgaggacaccgccgtgtactattgtgccagatggaccagcggcctggactattggggacagggaacactggtcaccgtgtcctctacgcgtatccagaaccctgatcctgccgtgtaccagctgcgggatagcaagagcagcgacaagagcgtgtgtctgttcaccgacttcgacagccagaccaacgtgtcccagagcaaggactccgacgtgtacatcaccgataagtgcgtgctggacatgcggagcatggacttcaagagcaactccgccgtggcctggtccaacaagtccgatttcgcctgcgccaacgccttcaacaacagcattatccccgaggacacattcttcccaagccccgagagcagcgactccaccgaccacgtgaagcccaaagagacagagaacaccaagcagcccagcaagagctgccacaagcccaaggccatcgtgcacaccgagaaagtgaacatgatgagcctgaccgtgctgggcctgcggatgctgttcgccaaaaccgtggccgtgaacttcctgctgaccgccaagctgttcttcctcctcaccgcc

SEQ ID NO: 38823 - DNA, 2991 bp, synthetic construct
  source 1..2991: mol_type = other DNA
atggccttaccagtgaccgccttgctcctgccgctggccttgctgctccacgccgccaggccggaagtgcagctggttgaatctggcggaggactggttcagcctggcggatctctgagactgtcttgtgccgccagcggcttcagcttcagcgacttttggatgagctgggtccgacaggcccctggcaaaggacttgaatgggtcgccacaatcagccaggccggcagcgagaaggactacgtggactctgtgaagggcagattcaccatcagccgggacaacgccaagaagtccctgtacctccagatgaacagcctgagagccgaggacaccgccgtgtactattgtgcctctggcgtgtacagcttcgactacagaggccagggcaccctggtcacagtctcttctggtaccggcggaggcggatctggcggcggaggtagcggtggcggaggatctgaattcgacatccagatgacacagagccctagcagcctgtctgccagcgtgggagacagagtgaccatcacatgcaaggccagcgacctgatccacaactggctggcctggtatcagcagaagcctggcaaggcccctaagctgctgatctacggcgctacctctctggaaacaggcgtgcccagcagattttctggcagcggctctggcaccgacttcaccctgacaatatccagcctccagcctgaggacttcgccacctactactgccagcagtactggaccacacctttcaccttcggccagggcaccaaggtggaaatcaaaagactcgagatccagaaccctgatcctgccgtgtaccagctgcgggatagcaagagcagcgacaagagcgtgtgtctgttcaccgacttcgacagccagaccaacgtgtcccagagcaaggactccgacgtgtacatcaccgataagtgcgtgctggacatgcggagcatggacttcaagagcaactccgccgtggcctggtccaacaagtccgatttcgcctgcgccaacgccttcaacaacagcattatccccgaggacacattcttcccaagccccgagagcagcgactccaccgaccacgtgaagcccaaagagacagagaacaccaagcagcccagcaagagctgccacaagcccaaggccatcgtgcacaccgagaaagtgaacatgatgagcctgaccgtgctgggcctgcggatgctgttcgccaaaaccgtggccgtgaacttcctgctgaccgccaagctgttcttcctcctcaccgcccgcgccaagagaagcggatctggcgtgaagcagaccctgaatttcgacctgctgaagctggctggcgacgtggaatccaacccaggccctactagtatggactggatttggcgcatccttttccttgtcggcgctgctaccggcgcgcattccgggccccagctccagctgcaagagtctggacctggcctggtcaagcctagcgagacactgagcctgacctgtaccgtgtccggcgatagcatcagcagcggcgattactactggggctggatcagacagcctcctggcaaaggactggaatggatcggccacatctactacagcggcgtgacctactacaaccccagcctgaagtccagagtgaccatcagcgtggacaccagccggaaccagttctccctgaagctgtctagcgtgacagccgccgataccgccgtgtactactgcaccagagaggacagcagcaactggcggagtagaggccagggaacactggtcacagttagctctggatccggcggaggcggaagtggaggcggaggatctggcggcggaggctctttcgaagaagtgcagctggttgaatcaggtggcggcctggttcaacctggcggatctctgagactgagctgtgccgccagcggctacagcatcaccaatgactacgcctggaactgggtccgacaggcccctggaaaaggactggaatgggtcggatatatcagctactccggctacaccacctacaatcccagcatcaagagccggttcaccatcagcagagacaccagcaagaacaccctgtacctccagatgaactccctgagagccgaggacaccgccgtgtactattgtgccagatggaccagcggcctggactattggggacagggaacactggtcaccgtgtcctctacgcgtgaggacctgaagaacgtgttcccacctgaggtggccgtgttcgagcctagcgaggccgagatcagccacacccagaaagccaccctcgtgtgcctggctaccggcttctaccccgaccatgtggaactgtcttggtgggtcaacggcaaagaggtgcacagcggcgtgtgtaccgacccccagccactgaaagaacagcccgccctgaacgacagccggtactgcctgagcagcagactgagagtgtccgccaccttctggcagaacccccggaaccacttcagatgccaggtgcagttctacggcctgagcgagaacgacgagtggacccaggacagagccaagcccgtgacccagatcgtgtctgccgaagcctggggcagagccgatgatgtgattaagatccactggcaggaaaagaagtccaacaccatcctgggcagccaggaaggcaacaccatgaagaccaacgacacctacatgaagttcagctggctgaccgtgcccgagaagtccctggacaaagaacacagatgcatcgtgcggcacgaaaacaacaagaacggcgtggaccaggaaatcatcttcccacccatcaagaccgatgtgattacaatggaccccaaggacaactgctccaaggacgccaacgataccctgctgctccagctgaccaacaccagcgcctactacatgtacttgttgctgctgctgaagtccgtggtgtacttcgccatcatcacatgctgcctgctgatggctatggtcaagcggaaggacagccgggga

SEQ ID NO: 38824 - DNA, 2157 bp, synthetic construct
  source 1..2157: mol_type = other DNA
atggccttaccagtgaccgccttgctcctgccgctggccttgctgctccacgccgccaggccggacatccagatgacacagagccctagcagcctgtctgccagcgtgggagacagagtgaccatcacatgcaaggccagcgacctgatccacaactggctggcctggtatcagcagaagcctggcaaggcccctaagctgctgatctacggcgctacctctctggaaacaggcgtgcccagcagattttctggcagcggctctggcaccgacttcaccctgacaatatccagcctccagcctgaggacttcgccacctactactgccagcagtactggaccacacctttcaccttcggccagggcaccaaggtggaaatcaaaagactcgaggacctgaagaacgtgttcccacctgaggtggccgtgttcgagcctagcgaggccgagatcagccacacccagaaagccaccctcgtgtgcctggctaccggcttctaccccgaccatgtggaactgtcttggtgggtcaacggcaaagaggtgcacagcggcgtgtgtaccgacccccagccactgaaagaacagcccgccctgaacgacagccggtactgcctgagcagcagactgagagtgtccgccaccttctggcagaacccccggaaccacttcagatgccaggtgcagttctacggcctgagcgagaacgacgagtggacccaggacagagccaagcccgtgacccagatcgtgtctgccgaagcctggggcagagccgatgatgtgattaagatccactggcaggaaaagaagtccaacaccatcctgggcagccaggaaggcaacaccatgaagaccaacgacacctacatgaagttcagctggctgaccgtgcccgagaagtccctggacaaagaacacagatgcatcgtgcggcacgaaaacaacaagaacggcgtggaccaggaaatcatcttcccacccatcaagaccgatgtgattacaatggaccccaaggacaactgctccaaggacgccaacgataccctgctgctccagctgaccaacaccagcgcctactacatgtacttgttgctgctgctgaagtccgtggtgtacttcgccatcatcacatgctgcctgctgcggagaaccgccttctgctgcaacggcgagaagtctagggccaagcgatctggatctggagcaacaaacttctcactactcaaacaagcaggtgacgtggaggagaatcccgggcctactagtatggactggatttggcgcatccttttccttgtcggcgctgctaccggcgcgcattccttcgaagaagtgcagctggttgaatcaggtggcggcctggttcaacctggcggatctctgagactgagctgtgccgccagcggctacagcatcaccaatgactacgcctggaactgggtccgacaggcccctggaaaaggactggaatgggtcggatatatcagctactccggctacaccacctacaatcccagcatcaagagccggttcaccatcagcagagacaccagcaagaacaccctgtacctccagatgaactccctgagagccgaggacaccgccgtgtactattgtgccagatggaccagcggcctggactattggggacagggaacactggtcaccgtgtcctctacgcgtatccagaaccctgatcctgccgtgtaccagctgcgggatagcaagagcagcgacaagagcgtgtgtctgttcaccgacttcgacagccagaccaacgtgtcccagagcaaggactccgacgtgtacatcaccgataagtgcgtgctggacatgcggagcatggacttcaagagcaactccgccgtggcctggtccaacaagtccgatttcgcctgcgccaacgccttcaacaacagcattatccccgaggacacattcttcccaagccccgagagcagcgactccaccgaccacgtgaagcccaaagagacagagaacaccaagcagcccagcaagagctgccacaagcccaaggccatcgtgcacaccgagaaagtgaacatgatgagcctgaccgtgctgggcctgcggatgctgttcgccaaaaccgtggccgtgaacttcctgctgaccgccaagctgttcttcctc

SEQ ID NO: 38825 - DNA, 2169 bp, synthetic construct
  source 1..2169: mol_type = other DNA
atggccttaccagtgaccgccttgctcctgccgctggccttgctgctccacgccgccaggccggacatccagatgacacagagccctagcagcctgtctgccagcgtgggagacagagtgaccatcacatgcaaggccagcgacctgatccacaactggctggcctggtatcagcagaagcctggcaaggcccctaagctgctgatctacggcgctacctctctggaaacaggcgtgcccagcagattttctggcagcggctctggcaccgacttcaccctgacaatatccagcctccagcctgaggacttcgccacctactactgccagcagtactggaccacacctttcaccttcggccagggcaccaaggtggaaatcaaaagactcgagatccagaaccctgatcctgccgtgtaccagctgcgggatagcaagagcagcgacaagagcgtgtgtctgttcaccgacttcgacagccagaccaacgtgtcccagagcaaggactccgacgtgtacatcaccgataagtgcgtgctggacatgcggagcatggacttcaagagcaactccgccgtggcctggtccaacaagtccgatttcgcctgcgccaacgccttcaacaacagcattatccccgaggacacattcttcccaagccccgagagcagcgactccaccgaccacgtgaagcccaaagagacagagaacaccaagcagcccagcaagagctgccacaagcccaaggccatcgtgcacaccgagaaagtgaacatgatgagcctgaccgtgctgggcctgcggatgctgttcgccaaaaccgtggccgtgaacttcctgctgaccgccaagctgttcttcctccgcgccaagagaagcggatctggcgtgaagcagaccctgaatttcgacctgctgaagctggctggcgacgtggaatccaacccaggccctactagtatggactggatttggcgcatccttttccttgtcggcgctgctaccggcgcgcattccttcgaagaagtgcagctggttgaatcaggtggcggcctggttcaacctggcggatctctgagactgagctgtgccgccagcggctacagcatcaccaatgactacgcctggaactgggtccgacaggcccctggaaaaggactggaatgggtcggatatatcagctactccggctacaccacctacaatcccagcatcaagagccggttcaccatcagcagagacaccagcaagaacaccctgtacctccagatgaactccctgagagccgaggacaccgccgtgtactattgtgccagatggaccagcggcctggactattggggacagggaacactggtcaccgtgtcctctacgcgtgaggacctgaagaacgtgttcccacctgaggtggccgtgttcgagcctagcgaggccgagatcagccacacccagaaagccaccctcgtgtgcctggctaccggcttctaccccgaccatgtggaactgtcttggtgggtcaacggcaaagaggtgcacagcggcgtgtgtaccgacccccagccactgaaagaacagcccgccctgaacgacagccggtactgcctgagcagcagactgagagtgtccgccaccttctggcagaacccccggaaccacttcagatgccaggtgcagttctacggcctgagcgagaacgacgagtggacccaggacagagccaagcccgtgacccagatcgtgtctgccgaagcctggggcagagccgatgatgtgattaagatccactggcaggaaaagaagtccaacaccatcctgggcagccaggaaggcaacaccatgaagaccaacgacacctacatgaagttcagctggctgaccgtgcccgagaagtccctggacaaagaacacagatgcatcgtgcggcacgaaaacaacaagaacggcgtggaccaggaaatcatcttcccacccatcaagaccgatgtgattacaatggaccccaaggacaactgctccaaggacgccaacgataccctgctgctccagctgaccaacaccagcgcctactacatgtacttgttgctgctgctgaagtccgtggtgtacttcgccatcatcacatgctgcctgctgcggagaaccgccttctgctgcaacggcgagaagtct

SEQ ID NO: 38826 - DNA, 2562 bp, synthetic construct
  source 1..2562: mol_type = other DNA
atggccttaccagtgaccgccttgctcctgccgctggccttgctgctccacgccgccaggccggaagtgcagctggttgaatctggcggaggactggttcagcctggcggatctctgagactgtcttgtgccgccagcggcttcagcttcagcgacttttggatgagctgggtccgacaggcccctggcaaaggacttgaatgggtcgccacaatcagccaggccggcagcgagaaggactacgtggactctgtgaagggcagattcaccatcagccgggacaacgccaagaagtccctgtacctccagatgaacagcctgagagccgaggacaccgccgtgtactattgtgcctctggcgtgtacagcttcgactacagaggccagggcaccctggtcacagtctcttctggtaccggcggaggcggatctggcggcggaggtagcggtggcggaggatctgaattcgacatccagatgacacagagccctagcagcctgtctgccagcgtgggagacagagtgaccatcacatgcaaggccagcgacctgatccacaactggctggcctggtatcagcagaagcctggcaaggcccctaagctgctgatctacggcgctacctctctggaaacaggcgtgcccagcagattttctggcagcggctctggcaccgacttcaccctgacaatatccagcctccagcctgaggacttcgccacctactactgccagcagtactggaccacacctttcaccttcggccagggcaccaaggtggaaatcaaaagactcgaggacctgaagaacgtgttcccacctgaggtggccgtgttcgagcctagcgaggccgagatcagccacacccagaaagccaccctcgtgtgcctggctaccggcttctaccccgaccatgtggaactgtcttggtgggtcaacggcaaagaggtgcacagcggcgtgtgtaccgacccccagccactgaaagaacagcccgccctgaacgacagccggtactgcctgagcagcagactgagagtgtccgccaccttctggcagaacccccggaaccacttcagatgccaggtgcagttctacggcctgagcgagaacgacgagtggacccaggacagagccaagcccgtgacccagatcgtgtctgccgaagcctggggcagagccgatgatgtgattaagatccactggcaggaaaagaagtccaacaccatcctgggcagccaggaaggcaacaccatgaagaccaacgacacctacatgaagttcagctggctgaccgtgcccgagaagtccctggacaaagaacacagatgcatcgtgcggcacgaaaacaacaagaacggcgtggaccaggaaatcatcttcccacccatcaagaccgatgtgattacaatggaccccaaggacaactgctccaaggacgccaacgataccctgctgctccagctgaccaacaccagcgcctactacatgtacttgttgctgctgctgaagtccgtggtgtacttcgccatcatcacatgctgcctgctgcggagaaccgccttctgctgcaacggcgagaagtctagggccaagcgatctggatctggagcaacaaacttctcactactcaaacaagcaggtgacgtggaggagaatcccgggcctactagtatggactggatttggcgcatccttttccttgtcggcgctgctaccggcgcgcattccttcgaagaagtgcagctggttgaatcaggtggcggcctggttcaacctggcggatctctgagactgagctgtgccgccagcggctacagcatcaccaatgactacgcctggaactgggtccgacaggcccctggaaaaggactggaatgggtcggatatatcagctactccggctacaccacctacaatcccagcatcaagagccggttcaccatcagcagagacaccagcaagaacaccctgtacctccagatgaactccctgagagccgaggacaccgccgtgtactattgtgccagatggaccagcggcctggactattggggacagggaacactggtcaccgtgtcctctacgcgtatccagaaccctgatcctgccgtgtaccagctgcgggatagcaagagcagcgacaagagcgtgtgtctgttcaccgacttcgacagccagaccaacgtgtcccagagcaaggactccgacgtgtacatcaccgataagtgcgtgctggacatgcggagcatggacttcaagagcaactccgccgtggcctggtccaacaagtccgatttcgcctgcgccaacgccttcaacaacagcattatccccgaggacacattcttcccaagccccgagagcagcgactccaccgaccacgtgaagcccaaagagacagagaacaccaagcagcccagcaagagctgccacaagcccaaggccatcgtgcacaccgagaaagtgaacatgatgagcctgaccgtgctgggcctgcggatgctgttcgccaaaaccgtggccgtgaacttcctgctgaccgccaagctgttcttcctc

SEQ ID NO: 38827 - DNA, 2973 bp, synthetic construct
  source 1..2973: mol_type = other DNA
atggccttaccagtgaccgccttgctcctgccgctggccttgctgctccacgccgccaggccggaagtgcagctggttgaatctggcggaggactggttcagcctggcggatctctgagactgtcttgtgccgccagcggcttcagcttcagcgacttttggatgagctgggtccgacaggcccctggcaaaggacttgaatgggtcgccacaatcagccaggccggcagcgagaaggactacgtggactctgtgaagggcagattcaccatcagccgggacaacgccaagaagtccctgtacctccagatgaacagcctgagagccgaggacaccgccgtgtactattgtgcctctggcgtgtacagcttcgactacagaggccagggcaccctggtcacagtctcttctggtaccggcggaggcggatctggcggcggaggtagcggtggcggaggatctgaattcgacatccagatgacacagagccctagcagcctgtctgccagcgtgggagacagagtgaccatcacatgcaaggccagcgacctgatccacaactggctggcctggtatcagcagaagcctggcaaggcccctaagctgctgatctacggcgctacctctctggaaacaggcgtgcccagcagattttctggcagcggctctggcaccgacttcaccctgacaatatccagcctccagcctgaggacttcgccacctactactgccagcagtactggaccacacctttcaccttcggccagggcaccaaggtggaaatcaaaagactcgaggacctgaagaacgtgttcccacctgaggtggccgtgttcgagcctagcgaggccgagatcagccacacccagaaagccaccctcgtgtgcctggctaccggcttctaccccgaccatgtggaactgtcttggtgggtcaacggcaaagaggtgcacagcggcgtgtgtaccgacccccagccactgaaagaacagcccgccctgaacgacagccggtactgcctgagcagcagactgagagtgtccgccaccttctggcagaacccccggaaccacttcagatgccaggtgcagttctacggcctgagcgagaacgacgagtggacccaggacagagccaagcccgtgacccagatcgtgtctgccgaagcctggggcagagccgatgatgtgattaagatccactggcaggaaaagaagtccaacaccatcctgggcagccaggaaggcaacaccatgaagaccaacgacacctacatgaagttcagctggctgaccgtgcccgagaagtccctggacaaagaacacagatgcatcgtgcggcacgaaaacaacaagaacggcgtggaccaggaaatcatcttcccacccatcaagaccgatgtgattacaatggaccccaaggacaactgctccaaggacgccaacgataccctgctgctccagctgaccaacaccagcgcctactacatgtacttgttgctgctgctgaagtccgtggtgtacttcgccatcatcacatgctgcctgctgcggagaaccgccttctgctgcaacggcgagaagtctagggccaagcgatctggatctggagcaacaaacttctcactactcaaacaagcaggtgacgtggaggagaatcccgggcctactagtatggactggatttggcgcatccttttccttgtcggcgctgctaccggcgcgcattccgggccccagctccagctgcaagagtctggacctggcctggtcaagcctagcgagacactgagcctgacctgtaccgtgtccggcgatagcatcagcagcggcgattactactggggctggatcagacagcctcctggcaaaggactggaatggatcggccacatctactacagcggcgtgacctactacaaccccagcctgaagtccagagtgaccatcagcgtggacaccagccggaaccagttctccctgaagctgtctagcgtgacagccgccgataccgccgtgtactactgcaccagagaggacagcagcaactggcggagtagaggccagggaacactggtcacagttagctctggatccggcggaggcggaagtggaggcggaggatctggcggcggaggctctttcgaagaagtgcagctggttgaatcaggtggcggcctggttcaacctggcggatctctgagactgagctgtgccgccagcggctacagcatcaccaatgactacgcctggaactgggtccgacaggcccctggaaaaggactggaatgggtcggatatatcagctactccggctacaccacctacaatcccagcatcaagagccggttcaccatcagcagagacaccagcaagaacaccctgtacctccagatgaactccctgagagccgaggacaccgccgtgtactattgtgccagatggaccagcggcctggactattggggacagggaacactggtcaccgtgtcctctacgcgtatccagaaccctgatcctgccgtgtaccagctgcgggatagcaagagcagcgacaagagcgtgtgtctgttcaccgacttcgacagccagaccaacgtgtcccagagcaaggactccgacgtgtacatcaccgataagtgcgtgctggacatgcggagcatggacttcaagagcaactccgccgtggcctggtccaacaagtccgatttcgcctgcgccaacgccttcaacaacagcattatccccgaggacacattcttcccaagccccgagagcagcgactccaccgaccacgtgaagcccaaagagacagagaacaccaagcagcccagcaagagctgccacaagcccaaggccatcgtgcacaccgagaaagtgaacatgatgagcctgaccgtgctgggcctgcggatgctgttcgccaaaaccgtggccgtgaacttcctgctgaccgccaagctgttcttcctc

SEQ ID NO: 38828 - DNA, 1851 bp, synthetic construct
  source 1..1851: mol_type = other DNA
atggccttaccagtgaccgccttgctcctgccgctggccttgctgctccacgccgccaggccggacatccagatgacacagagccctagcagcctgtctgccagcgtgggagacagagtgaccatcacatgcaaggccagcgacctgatccacaactggctggcctggtatcagcagaagcctggcaaggcccctaagctgctgatctacggcgctacctctctggaaacaggcgtgcccagcagattttctggcagcggctctggcaccgacttcaccctgacaatatccagcctccagcctgaggacttcgccacctactactgccagcagtactggaccacacctttcaccttcggccagggcaccaaggtggaaatcaaaagactcgaggacctgaagaacgtgttcccacctgaggtggccgtgttcgagcctagcgaggccgagatcagccacacccagaaagccaccctcgtgtgcctggctaccggcttctaccccgaccatgtggaactgtcttggtgggtcaacggcaaagaggtgcacagcggcgtgtctaccgacccccagccactgaaagaacagcccgccctgaacgacagccggtactgcctgagcagcagactgagagtgtccgccaccttctggcagaacccccggaaccacttcagatgccaggtgcagttctacggcctgagcgagaacgacgagtggacccaggacagagccaagcccgtgacccagatcgtgtctgccgaagcctggggcagagccgattgcgacgtgaagctggtggaaaagagcttcgagacagacaccaacctgaacttccagaacctgagcgtgatcggcttcagaatcctgctgctgaaagtggccggctttaacctgctgatgaccctgcggctgtggtccagcagggccaagcgatctggatctggagcaacaaacttctcactactcaaacaagcaggtgacgtggaggagaatcccgggcctactagtatggactggatttggcgcatccttttccttgtcggcgctgctaccggcgcgcattccttcgaagaagtgcagctggttgaatcaggtggcggcctggttcaacctggcggatctctgagactgagctgtgccgccagcggctacagcatcaccaatgactacgcctggaactgggtccgacaggcccctggaaaaggactggaatgggtcggatatatcagctactccggctacaccacctacaatcccagcatcaagagccggttcaccatcagcagagacaccagcaagaacaccctgtacctccagatgaactccctgagagccgaggacaccgccgtgtactattgtgccagatggaccagcggcctggactattggggacagggaacactggtcaccgtgtcctctacgcgtatccagaaccctgatcctgccgtgtaccagctgcgggatagcaagagcagcgacaagagcgtgtgtctgttcaccgacttcgacagccagaccaacgtgtcccagagcaaggactccgacgtgtacatcaccgataagaccgtgctggacatgcggagcatggacttcaagagcaactccgccgtggcctggtccaacaagtccgatttcgcctgcgccaacgccttcaacaacagcattatccccgaggacacattcttcccaagccccgagagcagctgcggctttaccagcgagagctaccagcagggcgtgctgagcgccaccatcctgtacgagatcctgctgggcaaggccaccctgtacgccgtgctggtgtctgccctggtgctgatggctatggtcaagcggaaggacagccgggga

SEQ ID NO: 38829 - DNA, 1851 bp, synthetic construct
  source 1..1851: mol_type = other DNA
atggccttaccagtgaccgccttgctcctgccgctggccttgctgctccacgccgccaggccggacatccagatgacacagagccctagcagcctgtctgccagcgtgggagacagagtgaccatcacatgcaaggccagcgacctgatccacaactggctggcctggtatcagcagaagcctggcaaggcccctaagctgctgatctacggcgctacctctctggaaacaggcgtgcccagcagattttctggcagcggctctggcaccgacttcaccctgacaatatccagcctccagcctgaggacttcgccacctactactgccagcagtactggaccacacctttcaccttcggccagggcaccaaggtggaaatcaaaagactcgaggacctgaagaacgtgttcccacctgaggtggccgtgttcgagcctagcgaggccgagatcagccacacccagaaagccaccctcgtgtgcctggctaccggcttctaccccgaccatgtggaactgtcttggtgggtcaacggcaaagaggtgcacagcggcgtgtctaccgacccccagccactgaaagaacagcccgccctgaacgacagccggtactgcctgagcagcagactgagagtgtccgccaccttctggcagaacccccggaaccacttcagatgccaggtgcagttctacggcctgagcgagaacgacgagtggacccaggacagagccaagcccgtgacccagatcgtgtctgccgaagcctggggcagagccgattgcggctttaccagcgagagctaccagcagggcgtgctgagcgccaccaacctgagcgtgatcggcttcagaatcctgctgctgaaagtggccggctttaacctgctgatgaccctgcggctgtggtccagcagggccaagcgatctggatctggagcaacaaacttctcactactcaaacaagcaggtgacgtggaggagaatcccgggcctactagtatggactggatttggcgcatccttttccttgtcggcgctgctaccggcgcgcattccttcgaagaagtgcagctggttgaatcaggtggcggcctggttcaacctggcggatctctgagactgagctgtgccgccagcggctacagcatcaccaatgactacgcctggaactgggtccgacaggcccctggaaaaggactggaatgggtcggatatatcagctactccggctacaccacctacaatcccagcatcaagagccggttcaccatcagcagagacaccagcaagaacaccctgtacctccagatgaactccctgagagccgaggacaccgccgtgtactattgtgccagatggaccagcggcctggactattggggacagggaacactggtcaccgtgtcctctacgcgtatccagaaccctgatcctgccgtgtaccagctgcgggatagcaagagcagcgacaagagcgtgtgtctgttcaccgacttcgacagccagaccaacgtgtcccagagcaaggactccgacgtgtacatcaccgataagaccgtgctggacatgcggagcatggacttcaagagcaactccgccgtggcctggtccaacaagtccgatttcgcctgcgccaacgccttcaacaacagcattatccccgaggacacattcttcccaagccccgagagcagctgcgacgtgaagctggtggaaaagagcttcgagacagacaccaacctgaacttccagatcctgtacgagatcctgctgggcaaggccaccctgtacgccgtgctggtgtctgccctggtgctgatggctatggtcaagcggaaggacagccgggga

SEQ ID NO: 38830 - DNA, 2163 bp, synthetic construct
  source 1..2163: mol_type = other DNA
atggccttaccagtgaccgccttgctcctgccgctggccttgctgctccacgccgccaggccggacatccagatgacacagagccctagcagcctgtctgccagcgtgggagacagagtgaccatcacatgcaaggccagcgacctgatccacaactggctggcctggtatcagcagaagcctggcaaggcccctaagctgctgatctacggcgctacctctctggaaacaggcgtgcccagcagattttctggcagcggctctggcaccgacttcaccctgacaatatccagcctccagcctgaggacttcgccacctactactgccagcagtactggaccacacctttcaccttcggccagggcaccaaggtggaaatcaaaagactcgaggacctgaagaacgtgttcccacctgaggtggccgtgttcgagcctagcgaggccgagatcagccacacccagaaagccaccctcgtgtgcctggctaccggcttctaccccgaccatgtggaactgtcttggtgggtcaacggcaaagaggtgcacagcggcgtgtctaccgacccccagccactgaaagaacagcccgccctgaacgacagccggtactgcctgagcagcagactgagagtgtccgccaccttctggcagaacccccggaaccacttcagatgccaggtgcagttctacggcctgagcgagaacgacgagtggacccaggacagagccaagcccgtgacccagatcgtgtctgccgaagcctggggcagagccgatgatgtgattaagatccactggcaggaaaagaagtccaacaccatcctgggcagccaggaaggcaacaccatgaagaccaacgacacctacatgaagttcagctggctgaccgtgcccgagaagtccctggacaaagaacacagatgcatcgtgcggcacgaaaacaacaagaacggcgtggaccaggaaatcatcttcccacccatcaagaccgatgtgattacaatggaccccaaggacaactgctccaaggacgccaacgataccctgctgctccagctgaccaacaccagcgcctactacatgtacttgttgctgctgctgaagtccgtggtgtacttcgccatcatcacatgctgcctgctgatggctatggtcaagcggaaggacagccggggaagggccaagcgatctggatctggagcaacaaacttctcactactcaaacaagcaggtgacgtggaggagaatcccgggcctactagtatggactggatttggcgcatccttttccttgtcggcgctgctaccggcgcgcattccttcgaagaagtgcagctggttgaatcaggtggcggcctggttcaacctggcggatctctgagactgagctgtgccgccagcggctacagcatcaccaatgactacgcctggaactgggtccgacaggcccctggaaaaggactggaatgggtcggatatatcagctactccggctacaccacctacaatcccagcatcaagagccggttcaccatcagcagagacaccagcaagaacaccctgtacctccagatgaactccctgagagccgaggacaccgccgtgtactattgtgccagatggaccagcggcctggactattggggacagggaacactggtcaccgtgtcctctacgcgtatccagaaccctgatcctgccgtgtaccagctgcgggatagcaagagcagcgacaagagcgtgtgtctgttcaccgacttcgacagccagaccaacgtgtcccagagcaaggactccgacgtgtacatcaccgataagaccgtgctggacatgcggagcatggacttcaagagcaactccgccgtggcctggtccaacaagtccgatttcgcctgcgccaacgccttcaacaacagcattatccccgaggacacattcttcccaagccccgagagcagcgactccaccgaccacgtgaagcccaaagagacagagaacaccaagcagcccagcaagagctgccacaagcccaaggccatcgtgcacaccgagaaagtgaacatgatgagcctgaccgtgctgggcctgcggatgctgttcgccaaaaccgtggccgtgaacttcctgctgaccgccaagctgttcttcctcctcaccgcc

SEQ ID NO: 38831 - DNA, 2157 bp, synthetic construct
  source 1..2157: mol_type = other DNA
atggccttaccagtgaccgccttgctcctgccgctggccttgctgctccacgccgccaggccggacatccagatgacacagagccctagcagcctgtctgccagcgtgggagacagagtgaccatcacatgcaaggccagcgacctgatccacaactggctggcctggtatcagcagaagcctggcaaggcccctaagctgctgatctacggcgctacctctctggaaacaggcgtgcccagcagattttctggcagcggctctggcaccgacttcaccctgacaatatccagcctccagcctgaggacttcgccacctactactgccagcagtactggaccacacctttcaccttcggccagggcaccaaggtggaaatcaaaagactcgaggacctgaagaacgtgttcccacctgaggtggccgtgttcgagcctagcgaggccgagatcagccacacccagaaagccaccctcgtgtgcctggctaccggcttctaccccgaccatgtggaactgtcttggtgggtcaacggcaaagaggtgcacagcggcgtgtctaccgacccccagccactgaaagaacagcccgccctgaacgacagccggtactgcctgagcagcagactgagagtgtccgccaccttctggcagaacccccggaaccacttcagatgccaggtgcagttctacggcctgagcgagaacgacgagtggacccaggacagagccaagcccgtgacccagatcgtgtctgccgaagcctggggcagagccgatgatgtgattaagatccactggcaggaaaagaagtccaacaccatcctgggcagccaggaaggcaacaccatgaagaccaacgacacctacatgaagttcagctggctgaccgtgcccgagaagtccctggacaaagaacacagatgcatcgtgcggcacgaaaacaacaagaacggcgtggaccaggaaatcatcttcccacccatcaagaccgatgtgattacaatggaccccaaggacaactgctccaaggacgccaacgataccctgctgctccagctgaccaacaccagcgcctactacatgtacttgttgctgctgctgaagtccgtggtgtacttcgccatcatcacatgctgcctgctgcggagaaccgccttctgctgcaacggcgagaagtctagggccaagcgatctggatctggagcaacaaacttctcactactcaaacaagcaggtgacgtggaggagaatcccgggcctactagtatggactggatttggcgcatccttttccttgtcggcgctgctaccggcgcgcattccttcgaagaagtgcagctggttgaatcaggtggcggcctggttcaacctggcggatctctgagactgagctgtgccgccagcggctacagcatcaccaatgactacgcctggaactgggtccgacaggcccctggaaaaggactggaatgggtcggatatatcagctactccggctacaccacctacaatcccagcatcaagagccggttcaccatcagcagagacaccagcaagaacaccctgtacctccagatgaactccctgagagccgaggacaccgccgtgtactattgtgccagatggaccagcggcctggactattggggacagggaacactggtcaccgtgtcctctacgcgtatccagaaccctgatcctgccgtgtaccagctgcgggatagcaagagcagcgacaagagcgtgtgtctgttcaccgacttcgacagccagaccaacgtgtcccagagcaaggactccgacgtgtacatcaccgataagaccgtgctggacatgcggagcatggacttcaagagcaactccgccgtggcctggtccaacaagtccgatttcgcctgcgccaacgccttcaacaacagcattatccccgaggacacattcttcccaagccccgagagcagcgactccaccgaccacgtgaagcccaaagagacagagaacaccaagcagcccagcaagagctgccacaagcccaaggccatcgtgcacaccgagaaagtgaacatgatgagcctgaccgtgctgggcctgcggatgctgttcgccaaaaccgtggccgtgaacttcctgctgaccgccaagctgttcttcctc

SEQ ID NO: 38832 - DNA, 2589 bp, synthetic construct
  source 1..2589: mol_type = other DNA
atggccttaccagtgaccgccttgctcctgccgctggccttgctgctccacgccgccaggccgctcgaggaggacctgaagaacgtgttcccacctgaggtggccgtgttcgagcctagcgaggccgagatcagccacacccagaaagccaccctcgtgtgcctggctaccggcttctaccccgaccatgtggaactgtcttggtgggtcaacggcaaagaggtgcacagcggcgtgtgtaccgacccccagccactgaaagaacagcccgccctgaacgacagccggtactgcctgagcagcagactgagagtgtccgccaccttctggcagaacccccggaaccacttcagatgccaggtgcagttctacggcctgagcgagaacgacgagtggacccaggacagagccaagcccgtgacccagatcgtgtctgccgaagcctggggcagagccgattgcggctttaccagcgagagctaccagcagggcgtgctgagcgccaccaacctgagcgtgatcggcttcagaatcctgctgctgaaagtggccggctttaacctgctgatgaccctgcggctgtggtccagcagggccaagcgatctggatctggagcaacaaacttctcactactcaaacaagcaggtgacgtggaggagaatcccgggcctactagcatggccttaccagtgaccgccttgctcctgccgctggccttgctgctccacgccgccaggccggacatccagatgacacagagccctagcagcctgtctgccagcgtgggagacagagtgaccatcacatgcaaggccagcgacctgatccacaactggctggcctggtatcagcagaagcctggcaaggcccctaagctgctgatctacggcgctacctctctggaaacaggcgtgcccagcagattttctggcagcggctctggcaccgacttcaccctgacaatatccagcctccagcctgaggacttcgccacctactactgccagcagtactggaccacacctttcaccttcggccagggcaccaaggtggaaatcaaaagaggcggaggcggaagtggaggcggaggatctggcggcggaggctctgaagtgcagctggttgaatcaggtggcggcctggttcaacctggcggatctctgagactgagctgtgccgccagcggctacagcatcaccaatgactacgcctggaactgggtccgacaggcccctggaaaaggactggaatgggtcggatatatcagctactccggctacaccacctacaatcccagcatcaagagccggttcaccatcagcagagacaccagcaagaacaccctgtacctccagatgaactccctgagagccgaggacaccgccgtgtactattgtgccagatggaccagcggcctggactattggggacagggaacactggtcaccgtgtcctctacgcgtatccagaaccctgatcctgccgtgtaccagctgcgggatagcaagagcagcgacaagagcgtgtgtctgttcaccgacttcgacagccagaccaacgtgtcccagagcaaggactccgacgtgtacatcaccgataagtgcgtgctggacatgcggagcatggacttcaagagcaactccgccgtggcctggtccaacaagtccgatttcgcctgcgccaacgccttcaacaacagcattatccccgaggacacattcttcccaagccccgagagcagctgcgacgtgaagctggtggaaaagagcttcgagacagacaccaacctgaacttccagatcctgtacgaggtgatcggcttcagaatcctgctgctgaaagtggccggctttaacctgctgatgaccctgcggctgtggtccagccgcgccaagagaagcggatctggcgtgaagcagaccctgaatttcgacctgctgaagctggctggcgacgtggaatccaacccaggcccttctagaggccatatgaccgagtacaagcccacggtgcgcctcgccacccgcgacgacgtccccagggccgtacgcaccctcgccgccgcgttcgccgactaccccgccacgcgccacaccgtcgatccggaccgccacatcgagcgggtcaccgagctgcaagaactcttcctcacgcgcgtcgggctcgacatcggcaaggtgtgggtcgcggacgacggcgccgcggtggcggtctggaccacgccggagagcgtcgaagcgggggcggtgttcgccgagatcggcccgcgcatggccgagttgagcggttcccggctggccgcgcagcaacagatggaaggcctcctggcgccgcaccggcccaaggagcccgcgtggttcctggccaccgtcggcgtctcgcccgaccaccagggcaagggtctgggcagcgccgtcgtgctccccggagtggaggcggccgagcgcgccggggtgcccgccttcctggagacctccgcgccccgcaacctccccttctacgagcggctcggcttcaccgtcaccgccgacgtcgaggtgcccgaaggaccgcgcacctggtgcatgacccgcaagcccggtgcctga

SEQ ID NO: 38833 - DNA, 2589 bp, synthetic construct
  source 1..2589: mol_type = other DNA
atggccttaccagtgaccgccttgctcctgccgctggccttgctgctccacgccgccaggccgctcgagatccagaaccctgatcctgccgtgtaccagctgcgggatagcaagagcagcgacaagagcgtgtgtctgttcaccgacttcgacagccagaccaacgtgtcccagagcaaggactccgacgtgtacatcaccgataagtgcgtgctggacatgcggagcatggacttcaagagcaactccgccgtggcctggtccaacaagtccgatttcgcctgcgccaacgccttcaacaacagcattatccccgaggacacattcttcccaagccccgagagcagctgcgacgtgaagctggtggaaaagagcttcgagacagacaccaacctgaacttccagatcctgtacgaggtgatcggcttcagaatcctgctgctgaaagtggccggctttaacctgctgatgaccctgcggctgtggtccagcagggccaagcgatctggatctggagcaacaaacttctcactactcaaacaagcaggtgacgtggaggagaatcccgggcctactagcatggccttaccagtgaccgccttgctcctgccgctggccttgctgctccacgccgccaggccggacatccagatgacacagagccctagcagcctgtctgccagcgtgggagacagagtgaccatcacatgcaaggccagcgacctgatccacaactggctggcctggtatcagcagaagcctggcaaggcccctaagctgctgatctacggcgctacctctctggaaacaggcgtgcccagcagattttctggcagcggctctggcaccgacttcaccctgacaatatccagcctccagcctgaggacttcgccacctactactgccagcagtactggaccacacctttcaccttcggccagggcaccaaggtggaaatcaaaagaggcggaggcggaagtggaggcggaggatctggcggcggaggctctgaagtgcagctggttgaatcaggtggcggcctggttcaacctggcggatctctgagactgagctgtgccgccagcggctacagcatcaccaatgactacgcctggaactgggtccgacaggcccctggaaaaggactggaatgggtcggatatatcagctactccggctacaccacctacaatcccagcatcaagagccggttcaccatcagcagagacaccagcaagaacaccctgtacctccagatgaactccctgagagccgaggacaccgccgtgtactattgtgccagatggaccagcggcctggactattggggacagggaacactggtcaccgtgtcctctacgcgtgaggacctgaagaacgtgttcccacctgaggtggccgtgttcgagcctagcgaggccgagatcagccacacccagaaagccaccctcgtgtgcctggctaccggcttctaccccgaccatgtggaactgtcttggtgggtcaacggcaaagaggtgcacagcggcgtgtgtaccgacccccagccactgaaagaacagcccgccctgaacgacagccggtactgcctgagcagcagactgagagtgtccgccaccttctggcagaacccccggaaccacttcagatgccaggtgcagttctacggcctgagcgagaacgacgagtggacccaggacagagccaagcccgtgacccagatcgtgtctgccgaagcctggggcagagccgattgcggctttaccagcgagagctaccagcagggcgtgctgagcgccaccaacctgagcgtgatcggcttcagaatcctgctgctgaaagtggccggctttaacctgctgatgaccctgcggctgtggtccagccgcgccaagagaagcggatctggcgtgaagcagaccctgaatttcgacctgctgaagctggctggcgacgtggaatccaacccaggcccttctagaggccatatgaccgagtacaagcccacggtgcgcctcgccacccgcgacgacgtccccagggccgtacgcaccctcgccgccgcgttcgccgactaccccgccacgcgccacaccgtcgatccggaccgccacatcgagcgggtcaccgagctgcaagaactcttcctcacgcgcgtcgggctcgacatcggcaaggtgtgggtcgcggacgacggcgccgcggtggcggtctggaccacgccggagagcgtcgaagcgggggcggtgttcgccgagatcggcccgcgcatggccgagttgagcggttcccggctggccgcgcagcaacagatggaaggcctcctggcgccgcaccggcccaaggagcccgcgtggttcctggccaccgtcggcgtctcgcccgaccaccagggcaagggtctgggcagcgccgtcgtgctccccggagtggaggcggccgagcgcgccggggtgcccgccttcctggagacctccgcgccccgcaacctccccttctacgagcggctcggcttcaccgtcaccgccgacgtcgaggtgcccgaaggaccgcgcacctggtgcatgacccgcaagcccggtgcctga

SEQ ID NO: 38834 - DNA, 2589 bp, synthetic construct; identical to SEQ ID NO: 38832
  source 1..2589: mol_type = other DNA

SEQ ID NO: 38835 - DNA, 2913 bp, synthetic construct
  source 1..2913: mol_type = other DNA
atggccttaccagtgaccgccttgctcctgccgctggccttgctgctccacgccgccaggccgctcgaggaggacctgaagaacgtgttcccacctgaggtggccgtgttcgagcctagcgaggccgagatcagccacacccagaaagccaccctcgtgtgcctggctaccggcttctaccccgaccatgtggaactgtcttggtgggtcaacggcaaagaggtgcacagcggcgtgtctaccgacccccagccactgaaagaacagcccgccctgaacgacagccggtactgcctgagcagcagactgagagtgtccgccaccttctggcagaacccccggaaccacttcagatgccaggtgcagttctacggcctgagcgagaacgacgagtggacccaggacagagccaagcccgtgacccagatcgtgtctgccgaagcctggggcagagccgatgatgtgattaagatccactggcaggaaaagaagtccaacaccatcctgggcagccaggaaggcaacaccatgaagaccaacgacacctacatgaagttcagctggctgaccgtgcccgagaagtccctggacaaagaacacagatgcatcgtgcggcacgaaaacaacaagaacggcgtggaccaggaaatcatcttcccacccatcaagaccgatgtgattacaatggaccccaaggacaactgctccaaggacgccaacgataccctgctgctccagctgaccaacaccagcgcctactacatgtacttgttgctgctgctgaagtccgtggtgtacttcgccatcatcacatgctgcctgctgatggctatggtcaagcggaaggacagccggggaagggccaagcgatctggatctggagcaacaaacttctcactactcaaacaagcaggtgacgtggaggagaatcccgggcctactagcatggccttaccagtgaccgccttgctcctgccgctggccttgctgctccacgccgccaggccggacatccagatgacacagagccctagcagcctgtctgccagcgtgggagacagagtgaccatcacatgcaaggccagcgacctgatccacaactggctggcctggtatcagcagaagcctggcaaggcccctaagctgctgatctacggcgctacctctctggaaacaggcgtgcccagcagattttctggcagcggctctggcaccgacttcaccctgacaatatccagcctccagcctgaggacttcgccacctactactgccagcagtactggaccacacctttcaccttcggccagggcaccaaggtggaaatcaaaagaggcggaggcggaagtggaggcggaggatctggcggcggaggctctgaagtgcagctggttgaatcaggtggcggcctggttcaacctggcggatctctgagactgagctgtgccgccagcggctacagcatcaccaatgactacgcctggaactgggtccgacaggcccctggaaaaggactggaatgggtcggatatatcagctactccggctacaccacctacaatcccagcatcaagagccggttcaccatcagcagagacaccagcaagaacaccctgtacctccagatgaactccctgagagccgaggacaccgccgtgtactattgtgccagatggaccagcggcctggactattggggacagggaacactggtcaccgtgtcctctacgcgtatccagaaccctgatcctgccgtgtaccagctgcgggatagcaagagcagcgacaagagcgtgtgtctgttcaccgacttcgacagccagaccaacgtgtcccagagcaaggactccgacgtgtacatcaccgataagaccgtgctggacatgcggagcatggacttcaagagcaactccgccgtggcctggtccaacaagtccgatttcgcctgcgccaacgccttcaacaacagcattatccccgaggacacattcttcccaagccccgagagcagcgactccaccgaccacgtgaagcccaaagagacagagaacaccaagcagcccagcaagagctgccacaagcccaaggccatcgtgcacaccgagaaagtgaacatgatgagcctgaccgtgctgggcctgcggatgctgttcgccaaaaccgtggccgtgaacttcctgctgaccgccaagctgttcttcctcctcaccgcccgcgccaagagaagcggatctggcgtgaagcagaccctgaatttcgacctgctgaagctggctggcgacgtggaatccaacccaggcccttctagaggccatatgaccgagtacaagcccacggtgcgcctcgccacccgcgacgacgtccccagggccgtacgcaccctcgccgccgcgttcgccgactaccccgccacgcgccacaccgtcgatccggaccgccacatcgagcgggtcaccgagctgcaagaactcttcctcacgcgcgtcgggctcgacatcggcaaggtgtgggtcgcggacgacggcgccgcggtggcggtctggaccacgccggagagcgtcgaagcgggggcggtgttcgccgagatcggcccgcgcatggccgagttgagcggttcccggctggccgcgcagcaacagatggaaggcctcctggcgccgcaccggcccaaggagcccgcgtggttcctggccaccgtcggcgtctcgcccgaccaccagggcaagggtctgggcagcgccgtcgtgctccccggagtggaggcggccgagcgcgccggggtgcccgccttcctggagacctccgcgccccgcaacctccccttctacgagcggctcggcttcaccgtcaccgccgacgtcgaggtgcccgaaggaccgcgcacctggtgcatgacccgcaagcccggtgcctga

SEQ ID NO: 38836 - DNA, 2913 bp, synthetic construct
  source 1..2913: mol_type = other DNA
atggccttaccagtgaccgccttgctcctgccgctggccttgctgctccacgccgccaggccgctcgagatccagaaccctgatcctgccgtgtaccagctgcgggatagcaagagcagcgacaagagcgtgtgtctgttcaccgacttcgacagccagaccaacgtgtcccagagcaaggactccgacgtgtacatcaccgataagaccgtgctggacatgcggagcatggacttcaagagcaactccgccgtggcctggtccaacaagtccgatttcgcctgcgccaacgccttcaacaacagcattatccccgaggacacattcttcccaagccccgagagcagcgactccaccgaccacgtgaagcccaaagagacagagaacaccaagcagcccagcaagagctgccacaagcccaaggccatcgtgcacaccgagaaagtgaacatgatgagcctgaccgtgctgggcctgcggatgctgttcgccaaaaccgtggccgtgaacttcctgctgaccgccaagctgttcttcctcctcaccgccagggccaagcgatctggatctggagcaacaaacttctcactactcaaacaagcaggtgacgtggaggagaatcccgggcctactagcatggccttaccagtgaccgccttgctcctgccgctggccttgctgctccacgccgccaggccggacatccagatgacacagagccctagcagcctgtctgccagcgtgggagacagagtgaccatcacatgcaaggccagcgacctgatccacaactggctggcctggtatcagcagaagcctggcaaggcccctaagctgctgatctacggcgctacctctctggaaacaggcgtgcccagcagattttctggcagcggctctggcaccgacttcaccctgacaatatccagcctccagcctgaggacttcgccacctactactgccagcagtactggaccacacctttcaccttcggccagggcaccaaggtggaaatcaaaagaggcggaggcggaagtggaggcggaggatctggcggcggaggctctgaagtgcagctggttgaatcaggtggcggcctggttcaacctggcggatctctgagactgagctgtgccgccagcggctacagcatcaccaatgactacgcctggaactgggtccgacaggcccctggaaaaggactggaatgggtcggatatatcagctactccggctacaccacctacaatcccagcatcaagagccggttcaccatcagcagagacaccagcaagaacaccctgtacctccagatgaactccctgagagccgaggacaccgccgtgtactattgtgccagatggaccagcggcctggactattggggacagggaacactggtcaccgtgtcctctacgcgtgaggacctgaagaacgtgttcccacctgaggtggccgtgttcgagcctagcgaggccgagatcagccacacccagaaagccaccctcgtgtgcctggctaccggcttctaccccgaccatgtggaactgtcttggtgggtcaacggcaaagaggtgcacagcggcgtgtctaccgacccccagccactgaaagaacagcccgccctgaacgacagccggtactgcctgagcagcagactgagagtgtccgccaccttctggcagaacccccggaaccacttcagatgccaggtgcagttctacggcctgagcgagaacgacgagtggacccaggacagagccaagcccgtgacccagatcgtgtctgccgaagcctggggcagagccgatgatgtgattaagatccactggcaggaaaagaagtccaacaccatcctgggcagccaggaaggcaacaccatgaagaccaacgacacctacatgaagttcagctggctgaccgtgcccgagaagtccctggacaaagaacacagatgcatcgtgcggcacgaaaacaacaagaacggcgtggaccaggaaatcatcttcccacccatcaagaccgatgtgattacaatggaccccaaggacaactgctccaaggacgccaacgataccctgctgctccagctgaccaacaccagcgcctactacatgtacttgttgctgctgctgaagtccgtggtgtacttcgccatcatcacatgctgcctgctgatggctatggtcaagcggaaggacagccggggacgcgccaagagaagcggatctggcgtgaagcagaccctgaatttcgacctgctgaagctggctggcgacgtggaatccaacccaggcccttctagaggccatatgaccgagtacaagcccacggtgcgcctcgccacccgcgacgacgtccccagggccgtacgcaccctcgccgccgcgttcgccgactaccccgccacgcgccacaccgtcgatccggaccgccacatcgagcgggtcaccgagctgcaagaactcttcctcacgcgcgtcgggctcgacatcggcaaggtgtgggtcgcggacgacggcgccgcggtggcggtctggaccacgccggagagcgtcgaagcgggggcggtgttcgccgagatcggcccgcgcatggccgagttgagcggttcccggctggccgcgcagcaacagatggaaggcctcctggcgccgcaccggcccaaggagcccgcgtggttcctggccaccgtcggcgtctcgcccgaccaccagggcaagggtctgggcagcgccgtcgtgctccccggagtggaggcggccgagcgcgccggggtgcccgccttcctggagacctccgcgccccgcaacctccccttctacgagcggctcggcttcaccgtcaccgccgacgtcgaggtgcccgaaggaccgcgcacctggtgcatgacccgcaagcccggtgcctga

SEQ ID NO: 38837 - DNA, 2907 bp, synthetic construct
  source 1..2907: mol_type = other DNA
atggccttaccagtgaccgccttgctcctgccgctggccttgctgctccacgccgccaggccgctcgaggaggacctgaagaacgtgttcccacctgaggtggccgtgttcgagcctagcgaggccgagatcagccacacccagaaagccaccctcgtgtgcctggctaccggcttctaccccgaccatgtggaactgtcttggtgggtcaacggcaaagaggtgcacagcggcgtgtgtaccgacccccagccactgaaagaacagcccgccctgaacgacagccggtactgcctgagcagcagactgagagtgtccgccaccttctggcagaacccccggaaccacttcagatgccaggtgcagttctacggcctgagcgagaacgacgagtggacccaggacagagccaagcccgtgacccagatcgtgtctgccgaagcctggggcagagccgatgatgtgattaagatccactggcaggaaaagaagtccaacaccatcctgggcagccaggaaggcaacaccatgaagaccaacgacacctacatgaagttcagctggctgaccgtgcccgagaagtccctggacaaagaacacagatgcatcgtgcggcacgaaaacaacaagaacggcgtggaccaggaaatcatcttcccacccatcaagaccgatgtgattacaatggaccccaaggacaactgctccaaggacgccaacgataccctgctgctccagctgaccaacaccagcgcctactacatgtacttgttgctgctgctgaagtccgtggtgtacttcgccatcatcacatgctgcctgctgcggagaaccgccttctgctgcaacggcgagaagtctagggccaagcgatctggatctggagcaacaaacttctcactactcaaacaagcaggtgacgtggaggagaatcccgggcctactagcatggccttaccagtgaccgccttgctcctgccgctggccttgctgctccacgccgccaggccggacatccagatgacacagagccctagcagcctgtctgccagcgtgggagacagagtgaccatcacatgcaaggccagcgacctgatccacaactggctggcctggtatcagcagaagcctggcaaggcccctaagctgctgatctacggcgctacctctctggaaacaggcgtgcccagcagattttctggcagcggctctggcaccgacttcaccctgacaatatccagcctccagcctgaggacttcgccacctactactgccagcagtactggaccacacctttcaccttcggccagggcaccaaggtggaaatcaaaagaggcggaggcggaagtggaggcggaggatctggcggcggaggctctgaagtgcagctggttgaatcaggtggcggcctggttcaacctggcggatctctgagactgagctgtgccgccagcggctacagcatcaccaatgactacgcctggaactgggtccgacaggcccctggaaaaggactggaatgggtcggatatatcagctactccggctacaccacctacaatcccagcatcaagagccggttcaccatcagcagagacaccagcaagaacaccctgtacctccagatgaactccctgagagccgaggacaccgccgtgtactattgtgccagatggaccagcggcctggactattggggacagggaacactggtcaccgtgtcctctacgcgtatccagaaccctgatcctgccgtgtaccagctgcgggatagcaagagcagcgacaagagcgtgtgtctgttcaccgacttcgacagccagaccaacgtgtcccagagcaaggactccgacgtgtacatcaccgataagtgcgtgctggacatgcggagcatggacttcaagagcaactccgccgtggcctggtccaacaagtccgatttcgcctgcgccaacgccttcaacaacagcattatccccgaggacacattcttcccaagccccgagagcagcgactccaccgaccacgtgaagcccaaagagacagagaacaccaagcagcccagcaagagctgccacaagcccaaggccatcgtgcacaccgagaaagtgaacatgatgagcctgaccgtgctgggcctgcggatgctgttcgccaaaaccgtggccgtgaacttcctgctgaccgccaagctgttcttcctccgcgccaagagaagcggatctggcgtgaagcagaccctgaatttcgacctgctgaagctggctggcgacgtggaatccaacccaggcccttctagaggccatatgaccgagtacaagcccacggtgcgcctcgccacccgcgacgacgtccccagggccgtacgcaccctcgccgccgcgttcgccgactaccccgccacgcgccacaccgtcgatccggaccgccacatcgagcgggtcaccgagctgcaagaactcttcctcacgcgcgtcgggctcgacatcggcaaggtgtgggtcgcggacgacggcgccgcggtggcggtctggaccacgccggagagcgtcgaagcgggggcggtgttcgccgagatcggcccgcgcatggccgagttgagcggttcccggctggccgcgcagcaacagatggaaggcctcctggcgccgcaccggcccaaggagcccgcgtggttcctggccaccgtcggcgtctcgcccgaccaccagggcaagggtctgggcagcgccgtcgtgctccccggagtggaggcggccgagcgcgccggggtgcccgccttcctggagacctccgcgccccgcaacctccccttctacgagcggctcggcttcaccgtcaccgccgacgtcgaggtgcccgaaggaccgcgcacctggtgcatgacccgcaagcccggtgcctga

SEQ ID NO: 38838 - DNA, 2907 bp, synthetic construct
  source 1..2907: mol_type = other DNA
atggccttaccagtgaccgccttgctcctgccgctggccttgctgctccacgccgccaggccgctcgagatccagaaccctgatcctgccgtgtaccagctgcgggatagcaagagcagcgacaagagcgtgtgtctgttcaccgacttcgacagccagaccaacgtgtcccagagcaaggactccgacgtgtacatcaccgataagtgcgtgctggacatgcggagcatggacttcaagagcaactccgccgtggcctggtccaacaagtccgatttcgcctgcgccaacgccttcaacaacagcattatccccgaggacacattcttcccaagccccgagagcagcgactccaccgaccacgtgaagcccaaagagacagagaacaccaagcagcccagcaagagctgccacaagcccaaggccatcgtgcacaccgagaaagtgaacatgatgagcctgaccgtgctgggcctgcggatgctgttcgccaaaaccgtggccgtgaacttcctgctgaccgccaagctgttcttcctcagggccaagcgatctggatctggagcaacaaacttctcactactcaaacaagcaggtgacgtggaggagaatcccgggcctactagcatggccttaccagtgaccgccttgctcctgccgctggccttgctgctccacgccgccaggccggacatccagatgacacagagccctagcagcctgtctgccagcgtgggagacagagtgaccatcacatgcaaggccagcgacctgatccacaactggctggcctggtatcagcagaagcctggcaaggcccctaagctgctgatctacggcgctacctctctggaaacaggcgtgcccagcagattttctggcagcggctctggcaccgacttcaccctgacaatatccagcctccagcctgaggacttcgccacctactactgccagcagtactggaccacacctttcaccttcggccagggcaccaaggtggaaatcaaaagaggcggaggcggaagtggaggcggaggatctggcggcggaggctctgaagtgcagctggttgaatcaggtggcggcctggttcaacctggcggatctctgagactgagctgtgccgccagcggctacagcatcaccaatgactacgcctggaactgggtccgacaggcccctggaaaaggactggaatgggtcggatatatcagctactccggctacaccacctacaatcccagcatcaagagccggttcaccatcagcagagacaccagcaagaacaccctgtacctccagatgaactccctgagagccgaggacaccgccgtgtactattgtgccagatggaccagcggcctggactattggggacagggaacactggtcaccgtgtcctctacgcgtgaggacctgaagaacgtgttcccacctgaggtggccgtgttcgagcctagcgaggccgagatcagccacacccagaaagccaccctcgtgtgcctggctaccggcttctaccccgaccatgtggaactgtcttggtgggtcaacggcaaagaggtgcacagcggcgtgtgtaccgacccccagccactgaaagaacagcccgccctgaacgacagccggtactgcctgagcagcagactgagagtgtccgccaccttctggcagaacccccggaaccacttcagatgccaggtgcagttctacggcctgagcgagaacgacgagtggacccaggacagagccaagcccgtgacccagatcgtgtctgccgaagcctggggcagagccgatgatgtgattaagatccactggcaggaaaagaagtccaacaccatcctgggcagccaggaaggcaacaccatgaagaccaacgacacctacatgaagttcagctggctgaccgtgcccgagaagtccctggacaaagaacacagatgcatcgtgcggcacgaaaacaacaagaacggcgtggaccaggaaatcatcttcccacccatcaagaccgatgtgattacaatggaccccaaggacaactgctccaaggacgccaacgataccctgctgctccagctgaccaacaccagcgcctactacatgtacttgttgctgctgctgaagtccgtggtgtacttcgccatcatcacatgctgcctgctgcggagaaccgccttctgctgcaacggcgagaagtctcgcgccaagagaagcggatctggcgtgaagcagaccctgaatttcgacctgctgaagctggctggcgacgtggaatccaacccaggcccttctagaggccatatgaccgagtacaagcccacggtgcgcctcgccacccgcgacgacgtccccagggccgtacgcaccctcgccgccgcgttcgccgactaccccgccacgcgccacaccgtcgatccggaccgccacatcgagcgggtcaccgagctgcaagaactcttcctcacgcgcgtcgggctcgacatcggcaaggtgtgggtcgcggacgacggcgccgcggtggcggtctggaccacgccggagagcgtcgaagcgggggcggtgttcgccgagatcggcccgcgcatggccgagttgagcggttcccggctggccgcgcagcaacagatggaaggcctcctggcgccgcaccggcccaaggagcccgcgtggttcctggccaccgtcggcgtctcgcccgaccaccagggcaagggtctgggcagcgccgtcgtgctccccggagtggaggcggccgagcgcgccggggtgcccgccttcctggagacctccgcgccccgcaacctccccttctacgagcggctcggcttcaccgtcaccgccgacgtcgaggtgcccgaaggaccgcgcacctggtgcatgacccgcaagcccggtgcctga

SEQ ID NO: 38839 - DNA, 2907 bp, synthetic construct
  source 1..2907: mol_type = other DNA
atggccttaccagtgaccgccttgctcctgccgctggccttgctgctccacgccgccaggccgctcgaggaggacctgaagaacgtgttcccacctgaggtggccgtgttcgagcctagcgaggccgagatcagccacacccagaaagccaccctcgtgtgcctggctaccggcttctaccccgaccatgtggaactgtcttggtgggtcaacggcaaagaggtgcacagcggcgtgtctaccgacccccagccactgaaagaacagcccgccctgaacgacagccggtactgcctgagcagcagactgagagtgtccgccaccttctggcagaacccccggaaccacttcagatgccaggtgcagttctacggcctgagcgagaacgacgagtggacccaggacagagccaagcccgtgacccagatcgtgtctgccgaagcctggggcagagccgatgatgtgattaagatccactggcaggaaaagaagtccaacaccatcctgggcagccaggaaggcaacaccatgaagaccaacgacacctacatgaagttcagctggctgaccgtgcccgagaagtccctggacaaagaacacagatgcatcgtgcggcacgaaaacaacaagaacggcgtggaccaggaaatcatcttcccacccatcaagaccgatgtgattacaatggaccccaaggacaactgctccaaggacgccaacgataccctgctgctccagctgaccaacaccagcgcctactacatgtacttgttgctgctgctgaagtccgtggtgtacttcgccatcatcacatgctgcctgctgcggagaaccgccttctgctgcaacggcgagaagtctagggccaagcgatctggatctggagcaacaaacttctcactactcaaacaagcaggtgacgtggaggagaatcccgggcctactagcatggccttaccagtgaccgccttgctcctgccgctggccttgctgctccacgccgccaggccggacatccagatgacacagagccctagcagcctgtctgccagcgtgggagacagagtgaccatcacatgcaaggccagcgacctgatccacaactggctggcctggtatcagcagaagcctggcaaggcccctaagctgctgatctacggcgctacctctctggaaacaggcgtgcccagcagattttctggcagcggctctggcaccgacttcaccctgacaatatccagcctccagcctgaggacttcgccacctactactgccagcagtactggaccacacctttcaccttcggccagggcaccaaggtggaaatcaaaagaggcggaggcggaagtggaggcggaggatctggcggcggaggctctgaagtgcagctggttgaatcaggtggcggcctggttcaacctggcggatctctgagactgagctgtgccgccagcggctacagcatcaccaatgactacgcctggaactgggtccgacaggcccctggaaaaggactggaatgggtcggatatatcagctactccggctacaccacctacaatcccagcatcaagagccggttcaccatcagcagagacaccagcaagaacaccctgtacctccagatgaactccctgagagccgaggacaccgccgtgtactattgtgccagatggaccagcggcctggactattggggacagggaacactggtcaccgtgtcctctacgcgtatccagaaccctgatcctgccgtgtaccagctgcgggatagcaagagcagcgacaagagcgtgtgtctgttcaccgacttcgacagccagaccaacgtgtcccagagcaaggactccgacgtgtacatcaccgataagaccgtgctggacatgcggagcatggacttcaagagcaactccgccgtggcctggtccaacaagtccgatttcgcctgcgccaacgccttcaacaacagcattatccccgaggacacattcttcccaagccccgagagcagcgactccaccgaccacgtgaagcccaaagagacagagaacaccaagcagcccagcaagagctgccacaagcccaaggccatcgtgcacaccgagaaagtgaacatgatgagcctgaccgtgctgggcctgcggatgctgttcgccaaaaccgtggccgtgaacttcctgctgaccgccaagctgttcttcctccgcgccaagagaagcggatctggcgtgaagcagaccctgaatttcgacctgctgaagctggctggcgacgtggaatccaacccaggcccttctagaggccatatgaccgagtacaagcccacggtgcgcctcgccacccgcgacgacgtccccagggccgtacgcaccctcgccgccgcgttcgccgactaccccgccacgcgccacaccgtcgatccggaccgccacatcgagcgggtcaccgagctgcaagaactcttcctcacgcgcgtcgggctcgacatcggcaaggtgtgggtcgcggacgacggcgccgcggtggcggtctggaccacgccggagagcgtcgaagcgggggcggtgttcgccgagatcggcccgcgcatggccgagttgagcggttcccggctggccgcgcagcaacagatggaaggcctcctggcgccgcaccggcccaaggagcccgcgtggttcctggccaccgtcggcgtctcgcccgaccaccagggcaagggtctgggcagcgccgtcgtgctccccggagtggaggcggccgagcgcgccggggtgcccgccttcctggagacctccgcgccccgcaacctccccttctacgagcggctcggcttcaccgtcaccgccgacgtcgaggtgcccgaaggaccgcgcacctggtgcatgacccgcaagcccggtgcctga

SEQ ID NO: 38840 - DNA, 2907 bp, synthetic construct
  source 1..2907: mol_type = other DNA
atggccttaccagtgaccgccttgctcctgccgctggccttgctgctccacgccgccaggccgctcgagatccagaaccctgatcctgccgtgtaccagctgcgggatagcaagagcagcgacaagagcgtgtgtctgttcaccgacttcgacagccagaccaacgtgtcccagagcaaggactccgacgtgtacatcaccgataagaccgtgctggacatgcggagcatggacttcaagagcaactccgccgtggcctggtccaacaagtccgatttcgcctgcgccaacgccttcaacaacagcattatccccgaggacacattcttcccaagccccgagagcagcgactccaccgaccacgtgaagcccaaagagacagagaacaccaagcagcccagcaagagctgccacaagcccaaggccatcgtgcacaccgagaaagtgaacatgatgagcctgaccgtgctgggcctgcggatgctgttcgccaaaaccgtggccgtgaacttcctgctgaccgccaagctgttcttcctcagggccaagcgatctggatctggagcaacaaacttctcactactcaaacaagcaggtgacgtggaggagaatcccgggcctactagcatggccttaccagtgaccgccttgctcctgccgctggccttgctgctccacgccgccaggccggacatccagatgacacagagccctagcagcctgtctgccagcgtgggagacagagtgaccatcacatgcaaggccagcgacctgatccacaactggctggcctggtatcagcagaagcctggcaaggcccctaagctgctgatctacggcgctacctctctggaaacaggcgtgcccagcagattttctggcagcggctctggcaccgacttcaccctgacaatatccagcctccagcctgaggacttcgccacctactactgccagcagtactggaccacacctttcaccttcggccagggcaccaaggtggaaatcaaaagaggcggaggcggaagtggaggcggaggatctggcggcggaggctctgaagtgcagctggttgaatcaggtggcggcctggttcaacctggcggatctctgagactgagctgtgccgccagcggctacagcatcaccaatgactacgcctggaactgggtccgacaggcccctggaaaaggactggaatgggtcggatatatcagctactccggctacaccacctacaatcccagcatcaagagccggttcaccatcagcagagacaccagcaagaacaccctgtacctccagatgaactccctgagagccgaggacaccgccgtgtactattgtgccagatggaccagcggcctggactattggggacagggaacactggtcaccgtgtcctctacgcgtgaggacctgaagaacgtgttcccacctgaggtggccgtgttcgagcctagcgaggccgagatcagccacacccagaaagccaccctcgtgtgcctggctaccggcttctaccccgaccatgtggaactgtcttggtgggtcaacggcaaagaggtgcacagcggcgtgtctaccgacccccagccactgaaagaacagcccgccctgaacgacagccggtactgcctgagcagcagactgagagtgtccgccaccttctggcagaacccccggaaccacttcagatgccaggtgcagttctacggcctgagcgagaacgacgagtggacccaggacagagccaagcccgtgacccagatcgtgtctgccgaagcctggggcagagccgatgatgtgattaagatccactggcaggaaaagaagtccaacaccatcctgggcagccaggaaggcaacaccatgaagaccaacgacacctacatgaagttcagctggctgaccgtgcccgagaagtccctggacaaagaacacagatgcatcgtgcggcacgaaaacaacaagaacggcgtggaccaggaaatcatcttcccacccatcaagaccgatgtgattacaatggaccccaaggacaactgctccaaggacgccaacgataccctgctgctccagctgaccaacaccagcgcctactacatgtacttgttgctgctgctgaagtccgtggtgtacttcgccatcatcacatgctgcctgctgcggagaaccgccttctgctgcaacggcgagaagtctcgcgccaagagaagcggatctggcgtgaagcagaccctgaatttcgacctgctgaagctggctggcgacgtggaatccaacccaggcccttctagaggccatatgaccgagtacaagcccacggtgcgcctcgccacccgcgacgacgtccccagggccgtacgcaccctcgccgccgcgttcgccgactaccccgccacgcgccacaccgtcgatccggaccgccacatcgagcgggtcaccgagctgcaagaactcttcctcacgcgcgtcgggctcgacatcggcaaggtgtgggtcgcggacgacggcgccgcggtggcggtctggaccacgccggagagcgtcgaagcgggggcggtgttcgccgagatcggcccgcgcatggccgagttgagcggttcccggctggccgcgcagcaacagatggaaggcctcctggcgccgcaccggcccaaggagcccgcgtggttcctggccaccgtcggcgtctcgcccgaccaccagggcaagggtctgggcagcgccgtcgtgctccccggagtggaggcggccgagcgcgccggggtgcccgccttcctggagacctccgcgccccgcaacctccccttctacgagcggctcggcttcaccgtcaccgccgacgtcgaggtgcccgaaggaccgcgcacctggtgcatgacccgcaagcccggtgcctga

SEQ ID NO: 38841 - DNA, 2601 bp, synthetic construct
  source 1..2601: mol_type = other DNA
atggccttaccagtgaccgccttgctcctgccgctggccttgctgctccacgccgccaggccgctcgaggaggacctgaagaacgtgttcccacctgaggtggccgtgttcgagcctagcaaggccgagatcgcccacacccagaaagccaccctcgtgtgcctggctaccggcttctaccccgaccatgtggaactgtcttggtgggtcaacggcaaagaggtgcacagcggcgtgtgtaccgacccccagccactgaaagaacagcccgccctgaacgacagccggtactgcctgagcagcagactgagagtgtccgccaccttctggcagaacccccggaaccacttcagatgccaggtgcagttctacggcctgagcgagaacgacgagtggacccaggacagagccaagcccgtgacccagatcgtgtctgccgaagcctggggcagagccgattgcggcatcaccagcgccagctaccaccagggcgtgctgagcgccaccatcctgtacgagatcctgctgggcaaggccaccctgtacgccgtgctggtgtctgccctggtgctgatggctatggtcaagcggaaggacagccggggaagggccaagcgatctggatctggagcaacaaacttctcactactcaaacaagcaggtgacgtggaggagaatcccgggcctactagcatggccttaccagtgaccgccttgctcctgccgctggccttgctgctccacgccgccaggccggacatccagatgacacagagccctagcagcctgtctgccagcgtgggagacagagtgaccatcacatgcaaggccagcgacctgatccacaactggctggcctggtatcagcagaagcctggcaaggcccctaagctgctgatctacggcgctacctctctggaaacaggcgtgcccagcagattttctggcagcggctctggcaccgacttcaccctgacaatatccagcctccagcctgaggacttcgccacctactactgccagcagtactggaccacacctttcaccttcggccagggcaccaaggtggaaatcaaaagaggcggaggcggaagtggaggcggaggatctggcggcggaggctctgaagtgcagctggttgaatcaggtggcggcctggttcaacctggcggatctctgagactgagctgtgccgccagcggctacagcatcaccaatgactacgcctggaactgggtccgacaggcccctggaaaaggactggaatgggtcggatatatcagctactccggctacaccacctacaatcccagcatcaagagccggttcaccatcagcagagacaccagcaagaacaccctgtacctccagatgaactccctgagagccgaggacaccgccgtgtactattgtgccagatggaccagcggcctggactattggggacagggaacactggtcaccgtgtcctctacgcgtatccagaaccctgatcctgccgtgtaccagctgcgggatagcaagagcagcgacaagagcgtgtgtctgttcaccgacttcgacagccagaccaacgtgtcccagagcaaggactccgacgtgtacatcaccgataagtgcgtgctggacatgcggagcatggacttcaagagcaactccgccgtggcctggtccaacaagtccgatttcgcctgcgccaacgccttcaacaacagcattatccccgaggacacattcttcccaagcagcgacgtgccctgcgacgtgaagctggtggaaaagagcttcgagacagacaccaacctgaacttccagaacctgagcgtgatcggcttcagaatcctgctgctgaaagtggccggctttaacctgctgatgaccctgcggctgtggtccagccgcgccaagagaagcggatctggcgtgaagcagaccctgaatttcgacctgctgaagctggctggcgacgtggaatccaacccaggcccttctagaggccatatgaccgagtacaagcccacggtgcgcctcgccacccgcgacgacgtccccagggccgtacgcaccctcgccgccgcgttcgccgactaccccgccacgcgccacaccgtcgatccggaccgccacatcgagcgggtcaccgagctgcaagaactcttcctcacgcgcgtcgggctcgacatcggcaaggtgtgggtcgcggacgacggcgccgcggtggcggtctggaccacgccggagagcgtcgaagcgggggcggtgttcgccgagatcggcccgcgcatggccgagttgagcggttcccggctggccgcgcagcaacagatggaaggcctcctggcgccgcaccggcccaaggagcccgcgtggttcctggccaccgtcggcgtctcgcccgaccaccagggcaagggtctgggcagcgccgtcgtgctccccggagtggaggcggccgagcgcgccggggtgcccgccttcctggagacctccgcgccccgcaacctccccttctacgagcggctcggcttcaccgtcaccgccgacgtcgaggtgcccgaaggaccgcgcacctggtgcatgacccgcaagcccggtgcctga

SEQ ID NO: 38842 - DNA, 2601 bp, synthetic construct
  source 1..2601: mol_type = other DNA
atggccttaccagtgaccgccttgctcctgccgctggccttgctgctccacgccgccaggccgctcgagatccagaaccctgatcctgccgtgtaccagctgcgggatagcaagagcagcgacaagagcgtgtgtctgttcaccgacttcgacagccagaccaacgtgtcccagagcaaggactccgacgtgtacatcaccgataagtgcgtgctggacatgcggagcatggacttcaagagcaactccgccgtggcctggtccaacaagtccgatttcgcctgcgccaacgccttcaacaacagcattatccccgaggacacattcttcccaagcagcgacgtgccctgcgacgtgaagctggtggaaaagagcttcgagacagacaccaacctgaacttccagaacctgagcgtgatcggcttcagaatcctgctgctgaaagtggccggctttaacctgctgatgaccctgcggctgtggtccagcagggccaagcgatctggatctggagcaacaaacttctcactactcaaacaagcaggtgacgtggaggagaatcccgggcctactagcatggccttaccagtgaccgccttgctcctgccgctggccttgctgctccacgccgccaggccggacatccagatgacacagagccctagcagcctgtctgccagcgtgggagacagagtgaccatcacatgcaaggccagcgacctgatccacaactggctggcctggtatcagcagaagcctggcaaggcccctaagctgctgatctacggcgctacctctctggaaacaggcgtgcccagcagattttctggcagcggctctggcaccgacttcaccctgacaatatccagcctccagcctgaggacttcgccacctactactgccagcagtactggaccacacctttcaccttcggccagggcaccaaggtggaaatcaaaagaggcggaggcggaagtggaggcggaggatctggcggcggaggctctgaagtgcagctggttgaatcaggtggcggcctggttcaacctggcggatctctgagactgagctgtgccgccagcggctacagcatcaccaatgactacgcctggaactgggtccgacaggcccctggaaaaggactggaatgggtcggatatatcagctactccggctacaccacctacaatcccagcatcaagagccggttcaccatcagcagagacaccagcaagaacaccctgtacctccagatgaactccctgagagccgaggacaccgccgtgtactattgtgccagatggaccagcggcctggactattggggacagggaacactggtcaccgtgtcctctacgcgtgaggacctgaagaacgtgttcccacctgaggtggccgtgttcgagcctagcaaggccgagatcgcccacacccagaaagccaccctcgtgtgcctggctaccggcttctaccccgaccatgtggaactgtcttggtgggtcaacggcaaagaggtgcacagcggcgtgtgtaccgacccccagccactgaaagaacagcccgccctgaacgacagccggtactgcctgagcagcagactgagagtgtccgccaccttctggcagaacccccggaaccacttcagatgccaggtgcagttctacggcctgagcgagaacgacgagtggacccaggacagagccaagcccgtgacccagatcgtgtctgccgaagcctggggcagagccgattgcggcatcaccagcgccagctaccaccagggcgtgctgagcgccaccatcctgtacgagatcctgctgggcaaggccaccctgtacgccgtgctggtgtctgccctggtgctgatggctatggtcaagcggaaggacagccggggacgcgccaagagaagcggatctggcgtgaagcagaccctgaatttcgacctgctgaagctggctggcgacgtggaatccaacccaggcccttctagaggccatatgaccgagtacaagcccacggtgcgcctcgccacccgcgacgacgtccccagggccgtacgcaccctcgccgccgcgttcgccgactaccccgccacgcgccacaccgtcgatccggaccgccacatcgagcgggtcaccgagctgcaagaactcttcctcacgcgcgtcgggctcgacatcggcaaggtgtgggtcgcggacgacggcgccgcggtggcggtctggaccacgccggagagcgtcgaagcgggggcggtgttcgccgagatcggcccgcgcatggccgagttgagcggttcccggctggccgcgcagcaacagatggaaggcctcctggcgccgcaccggcccaaggagcccgcgtggttcctggccaccgtcggcgtctcgcccgaccaccagggcaagggtctgggcagcgccgtcgtgctccccggagtggaggcggccgagcgcgccggggtgcccgccttcctggagacctccgcgccccgcaacctccccttctacgagcggctcggcttcaccgtcaccgccgacgtcgaggtgcccgaaggaccgcgcacctggtgcatgacccgcaagcccggtgcctga

SEQ ID NO: 38843 - DNA, 2280 bp, synthetic construct
  source 1..2280: mol_type = other DNA
atggccttaccagtgaccgccttgctcctgccgctggccttgctgctccacgccgccaggccgctcgagcagagttttgggttgttggaccctaaattgtgctatctgttggacggaatcctgttcatttacggagtgatcctgaccgcattgttcctgcgggttaagttttccagatccgcagacgcacccgcttaccaacaagggcagaaccaactctacaatgaacttaatttggggcggagggaagagtacgacgttctggacaaaaggaggggacgagatcccgagatgggcggaaagcctcagcgaaggaagaatccgcaagaggggctttataacgaactccagaaagataaaatggcagaagcctatagtgagattgggatgaagggagaaaggaggaggggtaaaggtcacgatgggttgtaccaaggattgagcacagccactaaagatacctatgatgcgctccacatgcaggccctgccgccaagaagggccaagcgatctggatctggagcaacaaacttctcactactcaaacaagcaggtgacgtggaggagaatcccgggcctactagcatggccttaccagtgaccgccttgctcctgccgctggccttgctgctccacgccgccaggccggacatccagatgacacagagccctagcagcctgtctgccagcgtgggagacagagtgaccatcacatgcaaggccagcgacctgatccacaactggctggcctggtatcagcagaagcctggcaaggcccctaagctgctgatctacggcgctacctctctggaaacaggcgtgcccagcagattttctggcagcggctctggcaccgacttcaccctgacaatatccagcctccagcctgaggacttcgccacctactactgccagcagtactggaccacacctttcaccttcggccagggcaccaaggtggaaatcaaaagaggcggaggcggaagtggaggcggaggatctggcggcggaggctctgaagtgcagctggttgaatcaggtggcggcctggttcaacctggcggatctctgagactgagctgtgccgccagcggctacagcatcaccaatgactacgcctggaactgggtccgacaggcccctggaaaaggactggaatgggtcggatatatcagctactccggctacaccacctacaatcccagcatcaagagccggttcaccatcagcagagacaccagcaagaacaccctgtacctccagatgaactccctgagagccgaggacaccgccgtgtactattgtgccagatggaccagcggcctggactattggggacagggaacactggtcaccgtgtcctctacgcgtgagctgggagagcctcagctgtgctatatcctggacgccatcctgtttctgtacggcatcgtgctgaccctgctgtactgccggctgaagatccaagtgcggaaggccgccatcaccagctacgagaaatccgacggcgtgtacaccggcctgagcaccagaaatcaagagacatacgagacactgaagcacgaaaagcctccacaacgcgccaagagaagcggatctggcgtgaagcagaccctgaatttcgacctgctgaagctggctggcgacgtggaatccaacccaggcccttctagaggccatatgaccgagtacaagcccacggtgcgcctcgccacccgcgacgacgtccccagggccgtacgcaccctcgccgccgcgttcgccgactaccccgccacgcgccacaccgtcgatccggaccgccacatcgagcgggtcaccgagctgcaagaactcttcctcacgcgcgtcgggctcgacatcggcaaggtgtgggtcgcggacgacggcgccgcggtggcggtctggaccacgccggagagcgtcgaagcgggggcggtgttcgccgagatcggcccgcgcatggccgagttgagcggttcccggctggccgcgcagcaacagatggaaggcctcctggcgccgcaccggcccaaggagcccgcgtggttcctggccaccgtcggcgtctcgcccgaccaccagggcaagggtctgggcagcgccgtcgtgctccccggagtggaggcggccgagcgcgccggggtgcccgccttcctggagacctccgcgccccgcaacctccccttctacgagcggctcggcttcaccgtcaccgccgacgtcgaggtgcccgaaggaccgcgcacctggtgcatgacccgcaagcccggtgcctga

SEQ ID NO: 38844 - DNA, 2913 bp, synthetic construct; identical to SEQ ID NO: 38835
  source 1..2913: mol_type = other DNA

SEQ ID NO: 38845 - DNA, 2913 bp, synthetic construct; identical to SEQ ID NO: 38836
  source 1..2913: mol_type = other DNA

SEQ ID NO: 38846 - DNA, 2910 bp, synthetic construct
  source 1..2910: mol_type = other DNA
atggccttaccagtgaccgccttgctcctgccgctggccttgctgctccacgccgccaggccgctcgaggaggaggacctgaagaacgtgttcccacctgaggtggccgtgttcgagcctagcgaggccgagatcagccacacccagaaagccaccctcgtgtgcctggctaccggcttctaccccgaccatgtggaactgtcttggtgggtcaacggcaaagaggtgcacagcggcgtgtgtaccgacccccagccactgaaagaacagcccgccctgaacgacagccggtactgcctgagcagcagactgagagtgtccgccaccttctggcagaacccccggaaccacttcagatgccaggtgcagttctacggcctgagcgagaacgacgagtggacccaggacagagccaagcccgtgacccagatcgtgtctgccgaagcctggggcagagccgatgatgtgattaagatccactggcaggaaaagaagtccaacaccatcctgggcagccaggaaggcaacaccatgaagaccaacgacacctacatgaagttcagctggctgaccgtgcccgagaagtccctggacaaagaacacagatgcatcgtgcggcacgaaaacaacaagaacggcgtggaccaggaaatcatcttcccacccatcaagaccgatgtgattacaatggaccccaaggacaactgctccaaggacgccaacgataccctgctgctccagctgaccaacaccagcgcctactacatgtacttgttgctgctgctgaagtccgtggtgtacttcgccatcatcacatgctgcctgctgcggagaaccgccttctgctgcaacggcgagaagtctagggccaagcgatctggatctggagcaacaaacttctcactactcaaacaagcaggtgacgtggaggagaatcccgggcctactagcatggccttaccagtgaccgccttgctcctgccgctggccttgctgctccacgccgccaggccggacatccagatgacacagagccctagcagcctgtctgccagcgtgggagacagagtgaccatcacatgcaaggccagcgacctgatccacaactggctggcctggtatcagcagaagcctggcaaggcccctaagctgctgatctacggcgctacctctctggaaacaggcgtgcccagcagattttctggcagcggctctggcaccgacttcaccctgacaatatccagcctccagcctgaggacttcgccacctactactgccagcagtactggaccacacctttcaccttcggccagggcaccaaggtggaaatcaaaagaggcggaggcggaagtggaggcggaggatctggcggcggaggctctgaagtgcagctggttgaatcaggtggcggcctggttcaacctggcggatctctgagactgagctgtgccgccagcggctacagcatcaccaatgactacgcctggaactgggtccgacaggcccctggaaaaggactggaatgggtcggatatatcagctactccggctacaccacctacaatcccagcatcaagagccggttcaccatcagcagagacaccagcaagaacaccctgtacctccagatgaactccctgagagccgaggacaccgccgtgtactattgtgccagatggaccagcggcctggactattggggacagggaacactggtcaccgtgtcctctacgcgtatccagaaccctgatcctgccgtgtaccagctgcgggatagcaagagcagcgacaagagcgtgtgtctgttcaccgacttcgacagccagaccaacgtgtcccagagcaaggactccgacgtgtacatcaccgataagtgcgtgctggacatgcggagcatggacttcaagagcaactccgccgtggcctggtccaacaagtccgatttcgcctgcgccaacgccttcaacaacagcattatccccgaggacacattcttcccaagccccgagagcagcgactccaccgaccacgtgaagcccaaagagacagagaacaccaagcagcccagcaagagctgccacaagcccaaggccatcgtgcacaccgagaaagtgaacatgatgagcctgaccgtgctgggcctgcggatgctgttcgccaaaaccgtggccgtgaacttcctgctgaccgccaagctgttcttcctccgcgccaagagaagcggatctggcgtgaagcagaccctgaatttcgacctgctgaagctggctggcgacgtggaatccaacccaggcccttctagaggccatatgaccgagtacaagcccacggtgcgcctcgccacccgcgacgacgtccccagggccgtacgcaccctcgccgccgcgttcgccgactaccccgccacgcgccacaccgtcgatccggaccgccacatcgagcgggtcaccgagctgcaagaactcttcctcacgcgcgtcgggctcgacatcggcaaggtgtgggtcgcggacgacggcgccgcggtggcggtctggaccacgccggagagcgtcgaagcgggggcggtgttcgccgagatcggcccgcgcatggccgagttgagcggttcccggctggccgcgcagcaacagatggaaggcctcctggcgccgcaccggcccaaggagcccgcgtggttcctggccaccgtcggcgtctcgcccgaccaccagggcaagggtctgggcagcgccgtcgtgctccccggagtggaggcggccgagcgcgccggggtgcccgccttcctggagacctccgcgccccgcaacctccccttctacgagcggctcggcttcaccgtcaccgccgacgtcgaggtgcccgaaggaccgcgcacctggtgcatgacccgcaagcccggtgcctga

SEQ ID NO: 38847 - DNA, 2910 bp, synthetic construct
  source 1..2910: mol_type = other DNA
atggccttaccagtgaccgccttgctcctgccgctggccttgctgctccacgccgccaggccgctcgagatccagaaccctgatcctgccgtgtaccagctgcgggatagcaagagcagcgacaagagcgtgtgtctgttcaccgacttcgacagccagaccaacgtgtcccagagcaaggactccgacgtgtacatcaccgataagtgcgtgctggacatgcggagcatggacttcaagagcaactccgccgtggcctggtccaacaagtccgatttcgcctgcgccaacgccttcaacaacagcattatccccgaggacacattcttcccaagccccgagagcagcgactccaccgaccacgtgaagcccaaagagacagagaacaccaagcagcccagcaagagctgccacaagcccaaggccatcgtgcacaccgagaaagtgaacatgatgagcctgaccgtgctgggcctgcggatgctgttcgccaaaaccgtggccgtgaacttcctgctgaccgccaagctgttcttcctcagggccaagcgatctggatctggagcaacaaacttctcactactcaaacaagcaggtgacgtggaggagaatcccgggcctactagcatggccttaccagtgaccgccttgctcctgccgctggccttgctgctccacgccgccaggccggacatccagatgacacagagccctagcagcctgtctgccagcgtgggagacagagtgaccatcacatgcaaggccagcgacctgatccacaactggctggcctggtatcagcagaagcctggcaaggcccctaagctgctgatctacggcgctacctctctggaaacaggcgtgcccagcagattttctggcagcggctctggcaccgacttcaccctgacaatatccagcctccagcctgaggacttcgccacctactactgccagcagtactggaccacacctttcaccttcggccagggcaccaaggtggaaatcaaaagaggcggaggcggaagtggaggcggaggatctggcggcggaggctctgaagtgcagctggttgaatcaggtggcggcctggttcaacctggcggatctctgagactgagctgtgccgccagcggctacagcatcaccaatgactacgcctggaactgggtccgacaggcccctggaaaaggactggaatgggtcggatatatcagctactccggctacaccacctacaatcccagcatcaagagccggttcaccatcagcagagacaccagcaagaacaccctgtacctccagatgaactccctgagagccgaggacaccgccgtgtactattgtgccagatggaccagcggcctggactattggggacagggaacactggtcaccgtgtcctctacgcgtgaggaggacctgaagaacgtgttcccacctgaggtggccgtgttcgagcctagcgaggccgagatcagccacacccagaaagccaccctcgtgtgcctggctaccggcttctaccccgaccatgtggaactgtcttggtgggtcaacggcaaagaggtgcacagcggcgtgtgtaccgacccccagccactgaaagaacagcccgccctgaacgacagccggtactgcctgagcagcagactgagagtgtccgccaccttctggcagaacccccggaaccacttcagatgccaggtgcagttctacggcctgagcgagaacgacgagtggacccaggacagagccaagcccgtgacccagatcgtgtctgccgaagcctggggcagagccgatgatgtgattaagatccactggcaggaaaagaagtccaacaccatcctgggcagccaggaaggcaacaccatgaagaccaacgacacctacatgaagttcagctggctgaccgtgcccgagaagtccctggacaaagaacacagatgcatcgtgcggcacgaaaacaacaagaacggcgtggaccaggaaatcatcttcccacccatcaagaccgatgtgattacaatggaccccaaggacaactgctccaaggacgccaacgataccctgctgctccagctgaccaacaccagcgcctactacatgtacttgttgctgctgctgaagtccgtggtgtacttcgccatcatcacatgctgcctgctgcggagaaccgccttctgctgcaacggcgagaagtctcgcgccaagagaagcggatctggcgtgaagcagaccctgaatttcgacctgctgaagctggctggcgacgtggaatccaacccaggcccttctagaggccatatgaccgagtacaagcccacggtgcgcctcgccacccgcgacgacgtccccagggccgtacgcaccctcgccgccgcgttcgccgactaccccgccacgcgccacaccgtcgatccggaccgccacatcgagcgggtcaccgagctgcaagaactcttcctcacgcgcgtcgggctcgacatcggcaaggtgtgggtcgcggacgacggcgccgcggtggcggtctggaccacgccggagagcgtcgaagcgggggcggtgttcgccgagatcggcccgcgcatggccgagttgagcggttcccggctggccgcgcagcaacagatggaaggcctcctggcgccgcaccggcccaaggagcccgcgtggttcctggccaccgtcggcgtctcgcccgaccaccagggcaagggtctgggcagcgccgtcgtgctccccggagtggaggcggccgagcgcgccggggtgcccgccttcctggagacctccgcgccccgcaacctccccttctacgagcggctcggcttcaccgtcaccgccgacgtcgaggtgcccgaaggaccgcgcacctggtgcatgacccgcaagcccggtgcctga

SEQ ID NO: 38848 - DNA, 2601 bp, synthetic construct
  source 1..2601: mol_type = other DNA
atggccttaccagtgaccgccttgctcctgccgctggccttgctgctccacgccgccaggccgctcgaggaggacctgaagaacgtgttcccacctgaggtggccgtgttcgagcctagcgaggccgagatcagccacacccagaaagccaccctcgtgtgcctggctaccggcttctaccccgaccatgtggaactgtcttggtgggtcaacggcaaagaggtgcacagcggcgtgtctaccgacccccagccactgaaagaacagcccgccctgaacgacagccggtactgcctgagcagcagactgagagtgtccgccaccttctggcagaacccccggaaccacttcagatgccaggtgcagttctacggcctgagcgagaacgacgagtggacccaggacagagccaagcccgtgacccagatcgtgtctgccgaagcctggggcagagccgattgcggctttaccagcgagagctaccagcagggcgtgctgagcgccaccaacctgagcgtgatcggcttcagaatcctgctgctgaaagtggccggctttaacctgctgatgaccctgcggctgtggtccagcagggccaagcgatctggatctggagcaacaaacttctcactactcaaacaagcaggtgacgtggaggagaatcccgggcctactagcatggccttaccagtgaccgccttgctcctgccgctggccttgctgctccacgccgccaggccggacatccagatgacacagagccctagcagcctgtctgccagcgtgggagacagagtgaccatcacatgcaaggccagcgacctgatccacaactggctggcctggtatcagcagaagcctggcaaggcccctaagctgctgatctacggcgctacctctctggaaacaggcgtgcccagcagattttctggcagcggctctggcaccgacttcaccctgacaatatccagcctccagcctgaggacttcgccacctactactgccagcagtactggaccacacctttcaccttcggccagggcaccaaggtggaaatcaaaagaggcggaggcggaagtggaggcggaggatctggcggcggaggctctgaagtgcagctggttgaatcaggtggcggcctggttcaacctggcggatctctgagactgagctgtgccgccagcggctacagcatcaccaatgactacgcctggaactgggtccgacaggcccctggaaaaggactggaatgggtcggatatatcagctactccggctacaccacctacaatcccagcatcaagagccggttcaccatcagcagagacaccagcaagaacaccctgtacctccagatgaactccctgagagccgaggacaccgccgtgtactattgtgccagatggaccagcggcctggactattggggacagggaacactggtcaccgtgtcctctacgcgtatccagaaccctgatcctgccgtgtaccagctgcgggatagcaagagcagcgacaagagcgtgtgtctgttcaccgacttcgacagccagaccaacgtgtcccagagcaaggactccgacgtgtacatcaccgataagaccgtgctggacatgcggagcatggacttcaagagcaactccgccgtggcctggtccaacaagtccgatttcgcctgcgccaacgccttcaacaacagcattatccccgaggacacattcttcccaagccccgagagcagctgcgacgtgaagctggtggaaaagagcttcgagacagacaccaacctgaacttccagatcctgtacgagatcctgctgggcaaggccaccctgtacgccgtgctggtgtctgccctggtgctgatggctatggtcaagcggaaggacagccggggacgcgccaagagaagcggatctggcgtgaagcagaccctgaatttcgacctgctgaagctggctggcgacgtggaatccaacccaggcccttctagaggccatatgaccgagtacaagcccacggtgcgcctcgccacccgcgacgacgtccccagggccgtacgcaccctcgccgccgcgttcgccgactaccccgccacgcgccacaccgtcgatccggaccgccacatcgagcgggtcaccgagctgcaagaactcttcctcacgcgcgtcgggctcgacatcggcaaggtgtgggtcgcggacgacggcgccgcggtggcggtctggaccacgccggagagcgtcgaagcgggggcggtgttcgccgagatcggcccgcgcatggccgagttgagcggttcccggctggccgcgcagcaacagatggaaggcctcctggcgccgcaccggcccaaggagcccgcgtggttcctggccaccgtcggcgtctcgcccgaccaccagggcaagggtctgggcagcgccgtcgtgctccccggagtggaggcggccgagcgcgccggggtgcccgccttcctggagacctccgcgccccgcaacctccccttctacgagcggctcggcttcaccgtcaccgccgacgtcgaggtgcccgaaggaccgcgcacctggtgcatgacccgcaagcccggtgcctga

SEQ ID NO: 38849 - DNA, 2601 bp, synthetic construct
  source 1..2601: mol_type = other DNA
atggccttaccagtgaccgccttgctcctgccgctggccttgctgctccacgccgccaggccgctcgagatccagaaccctgatcctgccgtgtaccagctgcgggatagcaagagcagcgacaagagcgtgtgtctgttcaccgacttcgacagccagaccaacgtgtcccagagcaaggactccgacgtgtacatcaccgataagaccgtgctggacatgcggagcatggacttcaagagcaactccgccgtggcctggtccaacaagtccgatttcgcctgcgccaacgccttcaacaacagcattatccccgaggacacattcttcccaagccccgagagcagctgcgacgtgaagctggtggaaaagagcttcgagacagacaccaacctgaacttccagatcctgtacgagatcctgctgggcaaggccaccctgtacgccgtgctggtgtctgccctggtgctgatggctatggtcaagcggaaggacagccggggaagggccaagcgatctggatctggagcaacaaacttctcactactcaaacaagcaggtgacgtggaggagaatcccgggcctactagcatggccttaccagtgaccgccttgctcctgccgctggccttgctgctccacgccgccaggccggacatccagatgacacagagccctagcagcctgtctgccagcgtgggagacagagtgaccatcacatgcaaggccagcgacctgatccacaactggctggcctggtatcagcagaagcctggcaaggcccctaagctgctgatctacggcgctacctctctggaaacaggcgtgcccagcagattttctggcagcggctctggcaccgacttcaccctgacaatatccagcctccagcctgaggacttcgccacctactactgccagcagtactggaccacacctttcaccttcggccagggcaccaaggtggaaatcaaaagaggcggaggcggaagtggaggcggaggatctggcggcggaggctctgaagtgcagctggttgaatcaggtggcggcctggttcaacctggcggatctctgagactgagctgtgccgccagcggctacagcatcaccaatgactacgcctggaactgggtccgacaggcccctggaaaaggactggaatgggtcggatatatcagctactccggctacaccacctacaatcccagcatcaagagccggttcaccatcagcagagacaccagcaagaacaccctgtacctccagatgaactccctgagagccgaggacaccgccgtgtactattgtgccagatggaccagcggcctggactattggggacagggaacactggtcaccgtgtcctctacgcgtgaggacctgaagaacgtgttcccacctgaggtggccgtgttcgagcctagcgaggccgagatcagccacacccagaaagccaccctcgtgtgcctggctaccggcttctaccccgaccatgtggaactgtcttggtgggtcaacggcaaagaggtgcacagcggcgtgtctaccgacccccagccactgaaagaacagcccgccctgaacgacagccggtactgcctgagcagcagactgagagtgtccgccaccttctggcagaacccccggaaccacttcagatgccaggtgcagttctacggcctgagcgagaacgacgagtggacccaggacagagccaagcccgtgacccagatcgtgtctgccgaagcctggggcagagccgattgcggctttaccagcgagagctaccagcagggcgtgctgagcgccaccaacctgagcgtgatcggcttcagaatcctgctgctgaaagtggccggctttaacctgctgatgaccctgcggctgtggtccagccgcgccaagagaagcggatctggcgtgaagcagaccctgaatttcgacctgctgaagctggctggcgacgtggaatccaacccaggcccttctagaggccatatgaccgagtacaagcccacggtgcgcctcgccacccgcgacgacgtccccagggccgtacgcaccctcgccgccgcgttcgccgactaccccgccacgcgccacaccgtcgatccggaccgccacatcgagcgggtcaccgagctgcaagaactcttcctcacgcgcgtcgggctcgacatcggcaaggtgtgggtcgcggacgacggcgccgcggtggcggtctggaccacgccggagagcgtcgaagcgggggcggtgttcgccgagatcggcccgcgcatggccgagttgagcggttcccggctggccgcgcagcaacagatggaaggcctcctggcgccgcaccggcccaaggagcccgcgtggttcctggccaccgtcggcgtctcgcccgaccaccagggcaagggtctgggcagcgccgtcgtgctccccggagtggaggcggccgagcgcgccggggtgcccgccttcctggagacctccgcgccccgcaacctccccttctacgagcggctcggcttcaccgtcaccgccgacgtcgaggtgcccgaaggaccgcgcacctggtgcatgacccgcaagcccggtgcctga

SEQ ID NO: 38850 - DNA, 2601 bp, synthetic construct
  source 1..2601: mol_type = other DNA
atggccttaccagtgaccgccttgctcctgccgctggccttgctgctccacgccgccaggccgctcgaggaggacctgaagaacgtgttcccacctgaggtggccgtgttcgagcctagcgaggccgagatcagccacacccagaaagccaccctcgtgtgcctggctaccggcttctaccccgaccatgtggaactgtcttggtgggtcaacggcaaagaggtgcacagcggcgtgtgtaccgacccccagccactgaaagaacagcccgccctgaacgacagccggtactgcctgagcagcagactgagagtgtccgccaccttctggcagaacccccggaaccacttcagatgccaggtgcagttctacggcctgagcgagaacgacgagtggacccaggacagagccaagcccgtgacccagatcgtgtctgccgaagcctggggcagagccgattgcgacgtgaagctggtggaaaagagcttcgagacagacaccaacctgaacttccagaacctgagcgtgatcggcttcagaatcctgctgctgaaagtggccggctttaacctgctgatgaccctgcggctgtggtccagcagggccaagcgatctggatctggagcaacaaacttctcactactcaaacaagcaggtgacgtggaggagaatcccgggcctactagcatggccttaccagtgaccgccttgctcctgccgctggccttgctgctccacgccgccaggccggacatccagatgacacagagccctagcagcctgtctgccagcgtgggagacagagtgaccatcacatgcaaggccagcgacctgatccacaactggctggcctggtatcagcagaagcctggcaaggcccctaagctgctgatctacggcgctacctctctggaaacaggcgtgcccagcagattttctggcagcggctctggcaccgacttcaccctgacaatatccagcctccagcctgaggacttcgccacctactactgccagcagtactggaccacacctttcaccttcggccagggcaccaaggtggaaatcaaaagaggcggaggcggaagtggaggcggaggatctggcggcggaggctctgaagtgcagctggttgaatcaggtggcggcctggttcaacctggcggatctctgagactgagctgtgccgccagcggctacagcatcaccaatgactacgcctggaactgggtccgacaggcccctggaaaaggactggaatgggtcggatatatcagctactccggctacaccacctacaatcccagcatcaagagccggttcaccatcagcagagacaccagcaagaacaccctgtacctccagatgaactccctgagagccgaggacaccgccgtgtactattgtgccagatggaccagcggcctggactattggggacagggaacactggtcaccgtgtcctctacgcgtatccagaaccctgatcctgccgtgtaccagctgcgggatagcaagagcagcgacaagagcgtgtgtctgttcaccgacttcgacagccagaccaacgtgtcccagagcaaggactccgacgtgtacatcaccgataagtgcgtgctggacatgcggagcatggacttcaagagcaactccgccgtggcctggtccaacaagtccgatttcgcctgcgccaacgccttcaacaacagcattatccccgaggacacattcttcccaagccccgagagcagctgcggctttaccagcgagagctaccagcagggcgtgctgagcgccaccatcctgtacgagatcctgctgggcaaggccaccctgtacgccgtgctggtgtctgccctggtgctgatggctatggtcaagcggaaggacagccggggacgcgccaagagaagcggatctggcgtgaagcagaccctgaatttcgacctgctgaagctggctggcgacgtggaatccaacccaggcccttctagaggccatatgaccgagtacaagcccacggtgcgcctcgccacccgcgacgacgtccccagggccgtacgcaccctcgccgccgcgttcgccgactaccccgccacgcgccacaccgtcgatccggaccgccacatcgagcgggtcaccgagctgcaagaactcttcctcacgcgcgtcgggctcgacatcggcaaggtgtgggtcgcggacgacggcgccgcggtggcggtctggaccacgccggagagcgtcgaagcgggggcggtgttcgccgagatcggcccgcgcatggccgagttgagcggttcccggctggccgcgcagcaacagatggaaggcctcctggcgccgcaccggcccaaggagcccgcgtggttcctggccaccgtcggcgtctcgcccgaccaccagggcaagggtctgggcagcgccgtcgtgctccccggagtggaggcggccgagcgcgccggggtgcccgccttcctggagacctccgcgccccgcaacctccccttctacgagcggctcggcttcaccgtcaccgccgacgtcgaggtgcccgaaggaccgcgcacctggtgcatgacccgcaagcccggtgcctga

SEQ ID NO: 38851 - DNA, 2601 bp, synthetic construct
  source 1..2601: mol_type = other DNA
atggccttaccagtgaccgccttgctcctgccgctggccttgctgctccacgccgccaggccgctcgaggaggacctgaagaacgtgttcccacctgaggtggccgtgttcgagcctagcgaggccgagatcagccacacccagaaagccaccctcgtgtgcctggctaccggcttctaccccgaccatgtggaactgtcttggtgggtcaacggcaaagaggtgcacagcggcgtgtctaccgacccccagccactgaaagaacagcccgccctgaacgacagccggtactgcctgagcagcagactgagagtgtccgccaccttctggcagaacccccggaaccacttcagatgccaggtgcagttctacggcctgagcgagaacgacgagtggacccaggacagagccaagcccgtgacccagatcgtgtctgccgaagcctggggcagagccgattgcgacgtgaagctggtggaaaagagcttcgagacagacaccaacctgaacttccagaacctgagcgtgatcggcttcagaatcctgctgctgaaagtggccggctttaacctgctgatgaccctgcggctgtggtccagcagggccaagcgatctggatctggagcaacaaacttctcactactcaaacaagcaggtgacgtggaggagaatcccgggcctactagcatggccttaccagtgaccgccttgctcctgccgctggccttgctgctccacgccgccaggccggacatccagatgacacagagccctagcagcctgtctgccagcgtgggagacagagtgaccatcacatgcaaggccagcgacctgatccacaactggctggcctggtatcagcagaagcctggcaaggcccctaagctgctgatctacggcgctacctctctggaaacaggcgtgcccagcagattttctggcagcggctctggcaccgacttcaccctgacaatatccagcctccagcctgaggacttcgccacctactactgccagcagtactggaccacacctttcaccttcggccagggcaccaaggtggaaatcaaaagaggcggaggcggaagtggaggcggaggatctggcggcggaggctctgaagtgcagctggttgaatcaggtggcggcctggttcaacctggcggatctctgagactgagctgtgccgccagcggctacagcatcaccaatgactacgcctggaactgggtccgacaggcccctggaaaaggactggaatgggtcggatatatcagctactccggctacaccacctacaatcccagcatcaagagccggttcaccatcagcagagacaccagcaagaacaccctgtacctccagatgaactccctgagagccgaggacaccgccgtgtactattgtgccagatggaccagcggcctggactattggggacagggaacactggtcaccgtgtcctctacgcgtatccagaaccctgatcctgccgtgtaccagctgcgggatagcaagagcagcgacaagagcgtgtgtctgttcaccgacttcgacagccagaccaacgtgtcccagagcaaggactccgacgtgtacatcaccgataagaccgtgctggacatgcggagcatggacttcaagagcaactccgccgtggcctggtccaacaagtccgatttcgcctgcgccaacgccttcaacaacagcattatccccgaggacacattcttcccaagccccgagagcagctgcggctttaccagcgagagctaccagcagggcgtgctgagcgccaccatcctgtacgagatcctgctgggcaaggccaccctgtacgccgtgctggtgtctgccctggtgctgatggctatggtcaagcggaaggacagccggggacgcgccaagagaagcggatctggcgtgaagcagaccctgaatttcgacctgctgaagctggctggcgacgtggaatccaacccaggcccttctagaggccatatgaccgagtacaagcccacggtgcgcctcgccacccgcgacgacgtccccagggccgtacgcaccctcgccgccgcgttcgccgactaccccgccacgcgccacaccgtcgatccggaccgccacatcgagcgggtcaccgagctgcaagaactcttcctcacgcgcgtcgggctcgacatcggcaaggtgtgggtcgcggacgacggcgccgcggtggcggtctggaccacgccggagagcgtcgaagcgggggcggtgttcgccgagatcggcccgcgcatggccgagttgagcggttcccggctggccgcgcagcaacagatggaaggcctcctggcgccgcaccggcccaaggagcccgcgtggttcctggccaccgtcggcgtctcgcccgaccaccagggcaagggtctgggcagcgccgtcgtgctccccggagtggaggcggccgagcgcgccggggtgcccgccttcctggagacctccgcgccccgcaacctccccttctacgagcggctcggcttcaccgtcaccgccgacgtcgaggtgcccgaaggaccgcgcacctggtgcatgacccgcaagcccggtgcctga

SEQ ID NO: 38852 - DNA, 2910 bp, synthetic construct
  source 1..2910: mol_type = other DNA
atggccttaccagtgaccgccttgctcctgccgctggccttgctgctccacgccgccaggccgctcgaggaggaggacctgaagaacgtgttcccacctgaggtggccgtgttcgagcctagcgaggccgagatcagccacacccagaaagccaccctcgtgtgcctggctaccggcttctaccccgaccatgtggaactgtcttggtgggtcaacggcaaagaggtgcacagcggcgtgtctaccgacccccagccactgaaagaacagcccgccctgaacgacagccggtactgcctgagcagcagactgagagtgtccgccaccttctggcagaacccccggaaccacttcagatgccaggtgcagttctacggcctgagcgagaacgacgagtggacccaggacagagccaagcccgtgacccagatcgtgtctgccgaagcctggggcagagccgatgatgtgattaagatccactggcaggaaaagaagtccaacaccatcctgggcagccaggaaggcaacaccatgaagaccaacgacacctacatgaagttcagctggctgaccgtgcccgagaagtccctggacaaagaacacagatgcatcgtgcggcacgaaaacaacaagaacggcgtggaccaggaaatcatcttcccacccatcaagaccgatgtgattacaatggaccccaaggacaactgctccaaggacgccaacgataccctgctgctccagctgaccaacaccagcgcctactacatgtacttgttgctgctgctgaagtccgtggtgtacttcgccatcatcacatgctgcctgctgcggagaaccgccttctgctgcaacggcgagaagtctagggccaagcgatctggatctggagcaacaaacttctcactactcaaacaagcaggtgacgtggaggagaatcccgggcctactagcatggccttaccagtgaccgccttgctcctgccgctggccttgctgctccacgccgccaggccggacatccagatgacacagagccctagcagcctgtctgccagcgtgggagacagagtgaccatcacatgcaaggccagcgacctgatccacaactggctggcctggtatcagcagaagcctggcaaggcccctaagctgctgatctacggcgctacctctctggaaacaggcgtgcccagcagattttctggcagcggctctggcaccgacttcaccctgacaatatccagcctccagcctgaggacttcgccacctactactgccagcagtactggaccacacctttcaccttcggccagggcaccaaggtggaaatcaaaagaggcggaggcggaagtggaggcggaggatctggcggcggaggctctgaagtgcagctggttgaatcaggtggcggcctggttcaacctggcggatctctgagactgagctgtgccgccagcggctacagcatcaccaatgactacgcctggaactgggtccgacaggcccctggaaaaggactggaatgggtcggatatatcagctactccggctacaccacctacaatcccagcatcaagagccggttcaccatcagcagagacaccagcaagaacaccctgtacctccagatgaactccctgagagccgaggacaccgccgtgtactattgtgccagatggaccagcggcctggactattggggacagggaacactggtcaccgtgtcctctacgcgtatccagaaccctgatcctgccgtgtaccagctgcgggatagcaagagcagcgacaagagcgtgtgtctgttcaccgacttcgacagccagaccaacgtgtcccagagcaaggactccgacgtgtacatcaccgataagaccgtgctggacatgcggagcatggacttcaagagcaactccgccgtggcctggtccaacaagtccgatttcgcctgcgccaacgccttcaacaacagcattatccccgaggacacattcttcccaagccccgagagcagcgactccaccgaccacgtgaagcccaaagagacagagaacaccaagcagcccagcaagagctgccacaagcccaaggccatcgtgcacaccgagaaagtgaacatgatgagcctgaccgtgctgggcctgcggatgctgttcgccaaaaccgtggccgtgaacttcctgctgaccgccaagctgttcttcctccgcgccaagagaagcggatctggcgtgaagcagaccctgaatttcgacctgctgaagctggctggcgacgtggaatccaacccaggcccttctagaggccatatgaccgagtacaagcccacggtgcgcctcgccacccgcgacgacgtccccagggccgtacgcaccctcgccgccgcgttcgccgactaccccgccacgcgccacaccgtcgatccggaccgccacatcgagcgggtcaccgagctgcaagaactcttcctcacgcgcgtcgggctcgacatcggcaaggtgtgggtcgcggacgacggcgccgcggtggcggtctggaccacgccggagagcgtcgaagcgggggcggtgttcgccgagatcggcccgcgcatggccgagttgagcggttcccggctggccgcgcagcaacagatggaaggcctcctggcgccgcaccggcccaaggagcccgcgtggttcctggccaccgtcggcgtctcgcccgaccaccagggcaagggtctgggcagcgccgtcgtgctccccggagtggaggcggccgagcgcgccggggtgcccgccttcctggagacctccgcgccccgcaacctccccttctacgagcggctcggcttcaccgtcaccgccgacgtcgaggtgcccgaaggaccgcgcacctggtgcatgacccgcaagcccggtgcctga

SEQ ID NO: 38853 - DNA, 2601 bp, synthetic construct
  source 1..2601: mol_type = other DNA
atggccttaccagtgaccgccttgctcctgccgctggccttgctgctccacgccgccaggccgctcgaggaggacctgaagaacgtgttcccacctgaggtggccgtgttcgagcctagcgaggccgagatcagccacacccagaaagccaccctcgtgtgcctggctaccggcttctaccccgaccatgtggaactgtcttggtgggtcaacggcaaagaggtgcacagcggcgtgtgtaccgacccccagccactgaaagaacagcccgccctgaacgacagccggtactgcctgagcagcagactgagagtgtccgccaccttctggcagaacccccggaaccacttcagatgccaggtgcagttctacggcctgagcgagaacgacgagtggacccaggacagagccaagcccgtgacccagatcgtgtctgccgaagcctggggcagagccgattgcggctttaccagcgagagctaccagcagggcgtgctgagcgccaccaacctgagcgtgatcggcttcagaatcctgctgctgaaagtggccggctttaacctgctgatgaccctgcggctgtggtccagcagggccaagcgatctggatctggagcaacaaacttctcactactcaaacaagcaggtgacgtggaggagaatcccgggcctactagcatggccttaccagtgaccgccttgctcctgccgctggccttgctgctccacgccgccaggccggacatccagatgacacagagccctagcagcctgtctgccagcgtgggagacagagtgaccatcacatgcaaggccagcgacctgatccacaactggctggcctggtatcagcagaagcctggcaaggcccctaagctgctgatctacggcgctacctctctggaaacaggcgtgcccagcagattttctggcagcggctctggcaccgacttcaccctgacaatatccagcctccagcctgaggacttcgccacctactactgccagcagtactggaccacacctttcaccttcggccagggcaccaaggtggaaatcaaaagaggcggaggcggaagtggaggcggaggatctggcggcggaggctctgaagtgcagctggttgaatcaggtggcggcctggttcaacctggcggatctctgagactgagctgtgccgccagcggctacagcatcaccaatgactacgcctggaactgggtccgacaggcccctggaaaaggactggaatgggtcggatatatcagctactccggctacaccacctacaatcccagcatcaagagccggttcaccatcagcagagacaccagcaagaacaccctgtacctccagatgaactccctgagagccgaggacaccgccgtgtactattgtgccagatggaccagcggcctggactattggggacagggaacactggtcaccgtgtcctctacgcgtatccagaaccctgatcctgccgtgtaccagctgcgggatagcaagagcagcgacaagagcgtgtgtctgttcaccgacttcgacagccagaccaacgtgtcccagagcaaggactccgacgtgtacatcaccgataagtgcgtgctggacatgcggagcatggacttcaagagcaactccgccgtggcctggtccaacaagtccgatttcgcctgcgccaacgccttcaacaacagcattatccccgaggacacattcttcccaagccccgagagcagctgcgacgtgaagctggtggaaaagagcttcgagacagacaccaacctgaacttccagatcctgtacgagatcctgctgggcaaggccaccctgtacgccgtgctggtgtctgccctggtgctgatggctatggtcaagcggaaggacagccggggacgcgccaagagaagcggatctggcgtgaagcagaccctgaatttcgacctgctgaagctggctggcgacgtggaatccaacccaggcccttctagaggccatatgaccgagtacaagcccacggtgcgcctcgccacccgcgacgacgtccccagggccgtacgcaccctcgccgccgcgttcgccgactaccccgccacgcgccacaccgtcgatccggaccgccacatcgagcgggtcaccgagctgcaagaactcttcctcacgcgcgtcgggctcgacatcggcaaggtgtgggtcgcggacgacggcgccgcggtggcggtctggaccacgccggagagcgtcgaagcgggggcggtgttcgccgagatcggcccgcgcatggccgagttgagcggttcccggctggccgcgcagcaacagatggaaggcctcctggcgccgcaccggcccaaggagcccgcgtggttcctggccaccgtcggcgtctcgcccgaccaccagggcaagggtctgggcagcgccgtcgtgctccccggagtggaggcggccgagcgcgccggggtgcccgccttcctggagacctccgcgccccgcaacctccccttctacgagcggctcggcttcaccgtcaccgccgacgtcgaggtgcccgaaggaccgcgcacctggtgcatgacccgcaagcccggtgcctga

SEQ ID NO: 38854 - DNA, 2688 bp, synthetic construct
  source 1..2688: mol_type = other DNA
atggccttaccagtgaccgccttgctcctgccgctggccttgctgctccacgccgccaggccgctcgaggaggaggacctgaagaacgtgttcccacctgaggtggccgtgttcgagcctagcgaggccgagatcagccacacccagaaagccaccctcgtgtgcctggctaccggcttctaccccgaccatgtggaactgtcttggtgggtcaacggcaaagaggtgcacagcggcgtgtgtaccgacccccagccactgaaagaacagcccgccctgaacgacagccggtactgcctgagcagcagactgagagtgtccgccaccttctggcagaacccccggaaccacttcagatgccaggtgcagttctacggcctgagcgagaacgacgagtggacccaggacagagccaagcccgtgacccagatcgtgtctgccgaagcctggggcagagccgattgcggctttaccagcgagagctaccagcagggcgtgctgagcgccaccaacctgagcgtgatcggcttcagaatcctgctgctgaaagtggccggctttaacctgctgatgaccctgcggctgtggtccagcagggccaagcgatctggatctggagcaacaaacttctcactactcaaacaagcaggtgacgtggaggagaatcccgggcctactagcatggccttaccagtgaccgccttgctcctgccgctggccttgctgctccacgccgccaggccggacatccagatgacacagagccctagcagcctgtctgccagcgtgggagacagagtgaccatcacatgcaaggccagcgacctgatccacaactggctggcctggtatcagcagaagcctggcaaggcccctaagctgctgatctacggcgctacctctctggaaacaggcgtgcccagcagattttctggcagcggctctggcaccgacttcaccctgacaatatccagcctccagcctgaggacttcgccacctactactgccagcagtactggaccacacctttcaccttcggccagggcaccaaggtggaaatcaaaagaggcggaggcggaagtggaggcggaggatctggcggcggaggctctgaagtgcagctggttgaatcaggtggcggcctggttcaacctggcggatctctgagactgagctgtgccgccagcggctacagcatcaccaatgactacgcctggaactgggtccgacaggcccctggaaaaggactggaatgggtcggatatatcagctactccggctacaccacctacaatcccagcatcaagagccggttcaccatcagcagagacaccagcaagaacaccctgtacctccagatgaactccctgagagccgaggacaccgccgtgtactattgtgccagatggaccagcggcctggactattggggacagggaacactggtcaccgtgtcctctacgcgtggacagcctaaggccaatcctaccgtgacactgttccctccaagcagcgaagaactccaggccaacaaggccacacttgtgtgcctgatctccgacttctaccctggggctgtgacagtggcttggaaggccgatggatctcctgtgaaagccggcgtggaaaccaccaagccatccaagcagagcaacaacaaatacgccgccagctcctacctgagcctgacacctgagcagtggaagtcccacagatcctacagctgccaagtgacccacgaaggcagcaccgtggaaaagacagtggcccctacagagtgcagccccatcaagaccgatgtgattacaatggaccccaaggacaactgctccaaggacgccaacgataccctgctgctccagctgaccaacaccagcgcctactacatgtacttgttgctgctgctgaagtccgtggtgtacttcgccatcatcacatgctgcctgctgcggagaaccgccttctgctgcaacggcgagaagtctcgcgccaagagaagcggatctggcgtgaagcagaccctgaatttcgacctgctgaagctggctggcgacgtggaatccaacccaggcccttctagaggccatatgaccgagtacaagcccacggtgcgcctcgccacccgcgacgacgtccccagggccgtacgcaccctcgccgccgcgttcgccgactaccccgccacgcgccacaccgtcgatccggaccgccacatcgagcgggtcaccgagctgcaagaactcttcctcacgcgcgtcgggctcgacatcggcaaggtgtgggtcgcggacgacggcgccgcggtggcggtctggaccacgccggagagcgtcgaagcgggggcggtgttcgccgagatcggcccgcgcatggccgagttgagcggttcccggctggccgcgcagcaacagatggaaggcctcctggcgccgcaccggcccaaggagcccgcgtggttcctggccaccgtcggcgtctcgcccgaccaccagggcaagggtctgggcagcgccgtcgtgctccccggagtggaggcggccgagcgcgccggggtgcccgccttcctggagacctccgcgccccgcaacctccccttctacgagcggctcggcttcaccgtcaccgccgacgtcgaggtgcccgaaggaccgcgcacctggtgcatgacccgcaagcccggtgcctga

SEQ ID NO: 38855 - DNA, 2688 bp, synthetic construct
  source 1..2688: mol_type = other DNA
atggccttaccagtgaccgccttgctcctgccgctggccttgctgctccacgccgccaggccgctcgagggacagcctaaggccaatcctaccgtgacactgttccctccaagcagcgaagaactccaggccaacaaggccacacttgtgtgcctgatctccgacttctaccctggggctgtgacagtggcttggaaggccgatggatctcctgtgaaagccggcgtggaaaccaccaagccatccaagcagagcaacaacaaatacgccgccagctcctacctgagcctgacacctgagcagtggaagtcccacagatcctacagctgccaagtgacccacgaaggcagcaccgtggaaaagacagtggcccctacagagtgcagccccatcaagaccgatgtgattacaatggaccccaaggacaactgctccaaggacgccaacgataccctgctgctccagctgaccaacaccagcgcctactacatgtacttgttgctgctgctgaagtccgtggtgtacttcgccatcatcacatgctgcctgctgcggagaaccgccttctgctgcaacggcgagaagtctagggccaagcgatctggatctggagcaacaaacttctcactactcaaacaagcaggtgacgtggaggagaatcccgggcctactagcatggccttaccagtgaccgccttgctcctgccgctggccttgctgctccacgccgccaggccggacatccagatgacacagagccctagcagcctgtctgccagcgtgggagacagagtgaccatcacatgcaaggccagcgacctgatccacaactggctggcctggtatcagcagaagcctggcaaggcccctaagctgctgatctacggcgctacctctctggaaacaggcgtgcccagcagattttctggcagcggctctggcaccgacttcaccctgacaatatccagcctccagcctgaggacttcgccacctactactgccagcagtactggaccacacctttcaccttcggccagggcaccaaggtggaaatcaaaagaggcggaggcggaagtggaggcggaggatctggcggcggaggctctgaagtgcagctggttgaatcaggtggcggcctggttcaacctggcggatctctgagactgagctgtgccgccagcggctacagcatcaccaatgactacgcctggaactgggtccgacaggcccctggaaaaggactggaatgggtcggatatatcagctactccggctacaccacctacaatcccagcatcaagagccggttcaccatcagcagagacaccagcaagaacaccctgtacctccagatgaactccctgagagccgaggacaccgccgtgtactattgtgccagatggaccagcggcctggactattggggacagggaacactggtcaccgtgtcctctacgcgtgaggaggacctgaagaacgtgttcccacctgaggtggccgtgttcgagcctagcgaggccgagatcagccacacccagaaagccaccctcgtgtgcctggctaccggcttctaccccgaccatgtggaactgtcttggtgggtcaacggcaaagaggtgcacagcggcgtgtgtaccgacccccagccactgaaagaacagcccgccctgaacgacagccggtactgcctgagcagcagactgagagtgtccgccaccttctggcagaacccccggaaccacttcagatgccaggtgcagttctacggcctgagcgagaacgacgagtggacccaggacagagccaagcccgtgacccagatcgtgtctgccgaagcctggggcagagccgattgcggctttaccagcgagagctaccagcagggcgtgctgagcgccaccaacctgagcgtgatcggcttcagaatcctgctgctgaaagtggccggctttaacctgctgatgaccctgcggctgtggtccagccgcgccaagagaagcggatctggcgtgaagcagaccctgaatttcgacctgctgaagctggctggcgacgtggaatccaacccaggcccttctagaggccatatgaccgagtacaagcccacggtgcgcctcgccacccgcgacgacgtccccagggccgtacgcaccctcgccgccgcgttcgccgactaccccgccacgcgccacaccgtcgatccggaccgccacatcgagcgggtcaccgagctgcaagaactcttcctcacgcgcgtcgggctcgacatcggcaaggtgtgggtcgcggacgacggcgccgcggtggcggtctggaccacgccggagagcgtcgaagcgggggcggtgttcgccgagatcggcccgcgcatggccgagttgagcggttcccggctggccgcgcagcaacagatggaaggcctcctggcgccgcaccggcccaaggagcccgcgtggttcctggccaccgtcggcgtctcgcccgaccaccagggcaagggtctgggcagcgccgtcgtgctccccggagtggaggcggccgagcgcgccggggtgcccgccttcctggagacctccgcgccccgcaacctccccttctacgagcggctcggcttcaccgtcaccgccgacgtcgaggtgcccgaaggaccgcgcacctggtgcatgacccgcaagcccggtgcctga

SEQ ID NO: 38856 - DNA, 2679 bp, synthetic construct
  source 1..2679: mol_type = other DNA
atggccttaccagtgaccgccttgctcctgccgctggccttgctgctccacgccgccaggccgctcgaggaggcctctacaaagggaccctccgtgtttcctctggctcccagcagcaagtctacaagcggaggaacagccgctctgggctgcctggtcaaggattactttcccgagcctgtgaccgtgtcctggaatagcggagcactgacaagcggcgtgcacacctttccagccgtgctgcaaagcagcggcctgtactctctgagcagcgtggtcacagtgcctagctctagcctgggcacccagacctacatctgcaatgtgaaccacaagcctagcaacaccaaggtggacaagagagtggaacccaagagctgtcccatcaagaccgatgtgattacaatggaccccaaggacaactgctccaaggacgccaacgataccctgctgctccagctgaccaacaccagcgcctactacatgtacttgttgctgctgctgaagtccgtggtgtacttcgccatcatcacatgctgcctgctgcggagaaccgccttctgctgcaacggcgagaagtctagggccaagcgatctggatctggagcaacaaacttctcactactcaaacaagcaggtgacgtggaggagaatcccgggcctactagcatggccttaccagtgaccgccttgctcctgccgctggccttgctgctccacgccgccaggccggacatccagatgacacagagccctagcagcctgtctgccagcgtgggagacagagtgaccatcacatgcaaggccagcgacctgatccacaactggctggcctggtatcagcagaagcctggcaaggcccctaagctgctgatctacggcgctacctctctggaaacaggcgtgcccagcagattttctggcagcggctctggcaccgacttcaccctgacaatatccagcctccagcctgaggacttcgccacctactactgccagcagtactggaccacacctttcaccttcggccagggcaccaaggtggaaatcaaaagaggcggaggcggaagtggaggcggaggatctggcggcggaggctctgaagtgcagctggttgaatcaggtggcggcctggttcaacctggcggatctctgagactgagctgtgccgccagcggctacagcatcaccaatgactacgcctggaactgggtccgacaggcccctggaaaaggactggaatgggtcggatatatcagctactccggctacaccacctacaatcccagcatcaagagccggttcaccatcagcagagacaccagcaagaacaccctgtacctccagatgaactccctgagagccgaggacaccgccgtgtactattgtgccagatggaccagcggcctggactattggggacagggaacactggtcaccgtgtcctctacgcgtggacagcctaaggccaatcctaccgtgacactgttccctccaagcagcgaagaactccaggccaacaaggccacacttgtgtgcctgatctccgacttctaccctggggctgtgacagtggcttggaaggccgatggatctcctgtgaaagccggcgtggaaaccaccaagccatccaagcagagcaacaacaaatacgccgccagctcctacctgagcctgacacctgagcagtggaagtcccacagatcctacagctgccaagtgacccacgaaggcagcaccgtggaaaagacagtggcccctacagagtgcagcgaagtgaaaaccgactccaccgaccacgtgaagcccaaagagacagagaacaccaagcagcccagcaagagctgccacaagcccaaggccatcgtgcacaccgagaaagtgaacatgatgagcctgaccgtgctgggcctgcggatgctgttcgccaaaaccgtggccgtgaacttcctgctgaccgccaagctgttcttcctccgcgccaagagaagcggatctggcgtgaagcagaccctgaatttcgacctgctgaagctggctggcgacgtggaatccaacccaggcccttctagaggccatatgaccgagtacaagcccacggtgcgcctcgccacccgcgacgacgtccccagggccgtacgcaccctcgccgccgcgttcgccgactaccccgccacgcgccacaccgtcgatccggaccgccacatcgagcgggtcaccgagctgcaagaactcttcctcacgcgcgtcgggctcgacatcggcaaggtgtgggtcgcggacgacggcgccgcggtggcggtctggaccacgccggagagcgtcgaagcgggggcggtgttcgccgagatcggcccgcgcatggccgagttgagcggttcccggctggccgcgcagcaacagatggaaggcctcctggcgccgcaccggcccaaggagcccgcgtggttcctggccaccgtcggcgtctcgcccgaccaccagggcaagggtctgggcagcgccgtcgtgctccccggagtggaggcggccgagcgcgccggggtgcccgccttcctggagacctccgcgccccgcaacctccccttctacgagcggctcggcttcaccgtcaccgccgacgtcgaggtgcccgaaggaccgcgcacctggtgcatgacccgcaagcccggtgcctga

SEQ ID NO: 38857 - DNA, 2613 bp, synthetic construct
  source 1..2613: mol_type = other DNA
atggccttaccagtgaccgccttgctcctgccgctggccttgctgctccacgccgccaggccgctcgaggaggcctctacaaagggaccctccgtgtttcctctggctcccagcagcaagtctacaagcggaggaacagccgctctgggctgcctggtcaaggattactttcccgagcctgtgaccgtgtcctggaatagcggagcactgacaagcggcgtgcacacctttccagccgtgctgcaaagcagcggcctgtactctctgagcagcgtggtcacagtgcctagctctagcctgggcacccagacctacatctgcaatgtgaaccacaagcctagcaacaccaaggtggacaagagagtggaacccaagagctgtggcagagccgattgcggctttaccagcgagagctaccagcagggcgtgctgagcgccaccatcctgtacgagatcctgctgggcaaggccaccctgtacgccgtgctggtgtctgccctggtgctgatggctatggtcaagcggaaggacagccggggaagggccaagcgatctggatctggagcaacaaacttctcactactcaaacaagcaggtgacgtggaggagaatcccgggcctactagcatggccttaccagtgaccgccttgctcctgccgctggccttgctgctccacgccgccaggccggacatccagatgacacagagccctagcagcctgtctgccagcgtgggagacagagtgaccatcacatgcaaggccagcgacctgatccacaactggctggcctggtatcagcagaagcctggcaaggcccctaagctgctgatctacggcgctacctctctggaaacaggcgtgcccagcagattttctggcagcggctctggcaccgacttcaccctgacaatatccagcctccagcctgaggacttcgccacctactactgccagcagtactggaccacacctttcaccttcggccagggcaccaaggtggaaatcaaaagaggcggaggcggaagtggaggcggaggatctggcggcggaggctctgaagtgcagctggttgaatcaggtggcggcctggttcaacctggcggatctctgagactgagctgtgccgccagcggctacagcatcaccaatgactacgcctggaactgggtccgacaggcccctggaaaaggactggaatgggtcggatatatcagctactccggctacaccacctacaatcccagcatcaagagccggttcaccatcagcagagacaccagcaagaacaccctgtacctccagatgaactccctgagagccgaggacaccgccgtgtactattgtgccagatggaccagcggcctggactattggggacagggaacactggtcaccgtgtcctctacgcgtggacagcctaaggccaatcctaccgtgacactgttccctccaagcagcgaagaactccaggccaacaaggccacacttgtgtgcctgatctccgacttctaccctggggctgtgacagtggcttggaaggccgatggatctcctgtgaaagccggcgtggaaaccaccaagccatccaagcagagcaacaacaaatacgccgccagctcctacctgagcctgacacctgagcagtggaagtcccacagatcctacagctgccaagtgacccacgaaggcagcaccgtggaaaagacagtggcccctacagagtgcagcatccccgaggacacattcttcccaagccccgagagcagctgcgacgtgaagctggtggaaaagagcttcgagacagacaccaacctgaacttccagaacctgagcgtgatcggcttcagaatcctgctgctgaaagtggccggctttaacctgctgatgaccctgcggctgtggtccagccgcgccaagagaagcggatctggcgtgaagcagaccctgaatttcgacctgctgaagctggctggcgacgtggaatccaacccaggcccttctagaggccatatgaccgagtacaagcccacggtgcgcctcgccacccgcgacgacgtccccagggccgtacgcaccctcgccgccgcgttcgccgactaccccgccacgcgccacaccgtcgatccggaccgccacatcgagcgggtcaccgagctgcaagaactcttcctcacgcgcgtcgggctcgacatcggcaaggtgtgggtcgcggacgacggcgccgcggtggcggtctggaccacgccggagagcgtcgaagcgggggcggtgttcgccgagatcggcccgcgcatggccgagttgagcggttcccggctggccgcgcagcaacagatggaaggcctcctggcgccgcaccggcccaaggagcccgcgtggttcctggccaccgtcggcgtctcgcccgaccaccagggcaagggtctgggcagcgccgtcgtgctccccggagtggaggcggccgagcgcgccggggtgcccgccttcctggagacctccgcgccccgcaacctccccttctacgagcggctcggcttcaccgtcaccgccgacgtcgaggtgcccgaaggaccgcgcacctggtgcatgacccgcaagcccggtgcctga

SEQ ID NO: 38858 - DNA, 2613 bp, synthetic construct
  source 1..2613: mol_type = other DNA
atggccttaccagtgaccgccttgctcctgccgctggccttgctgctccacgccgccaggccgctcgaggaggcctctacaaagggaccctccgtgtttcctctggctcccagcagcaagtctacaagcggaggaacagccgctctgggctgcctggtcaaggattactttcccgagcctgtgaccgtgtcctggaatagcggagcactgacaagcggcgtgcacacctttccagccgtgctgcaaagcagcggcctgtactctctgagcagcgtggtcacagtgcctagctctagcctgggcacccagacctacatctgcaatgtgaaccacaagcctagcaacaccaaggtggacaagagagtggaacccaagagctgtatccccgaggacacattcttcccaagccccgagagcagctgcgacgtgaagctggtggaaaagagcttcgagacagacaccaacctgaacttccagaacctgagcgtgatcggcttcagaatcctgctgctgaaagtggccggctttaacctgctgatgaccctgcggctgtggtccagcagggccaagcgatctggatctggagcaacaaacttctcactactcaaacaagcaggtgacgtggaggagaatcccgggcctactagcatggccttaccagtgaccgccttgctcctgccgctggccttgctgctccacgccgccaggccggacatccagatgacacagagccctagcagcctgtctgccagcgtgggagacagagtgaccatcacatgcaaggccagcgacctgatccacaactggctggcctggtatcagcagaagcctggcaaggcccctaagctgctgatctacggcgctacctctctggaaacaggcgtgcccagcagattttctggcagcggctctggcaccgacttcaccctgacaatatccagcctccagcctgaggacttcgccacctactactgccagcagtactggaccacacctttcaccttcggccagggcaccaaggtggaaatcaaaagaggcggaggcggaagtggaggcggaggatctggcggcggaggctctgaagtgcagctggttgaatcaggtggcggcctggttcaacctggcggatctctgagactgagctgtgccgccagcggctacagcatcaccaatgactacgcctggaactgggtccgacaggcccctggaaaaggactggaatgggtcggatatatcagctactccggctacaccacctacaatcccagcatcaagagccggttcaccatcagcagagacaccagcaagaacaccctgtacctccagatgaactccctgagagccgaggacaccgccgtgtactattgtgccagatggaccagcggcctggactattggggacagggaacactggtcaccgtgtcctctacgcgtggacagcctaaggccaatcctaccgtgacactgttccctccaagcagcgaagaactccaggccaacaaggccacacttgtgtgcctgatctccgacttctaccctggggctgtgacagtggcttggaaggccgatggatctcctgtgaaagccggcgtggaaaccaccaagccatccaagcagagcaacaacaaatacgccgccagctcctacctgagcctgacacctgagcagtggaagtcccacagatcctacagctgccaagtgacccacgaaggcagcaccgtggaaaagacagtggcccctacagagtgcagcggcagagccgattgcggctttaccagcgagagctaccagcagggcgtgctgagcgccaccatcctgtacgagatcctgctgggcaaggccaccctgtacgccgtgctggtgtctgccctggtgctgatggctatggtcaagcggaaggacagccggggacgcgccaagagaagcggatctggcgtgaagcagaccctgaatttcgacctgctgaagctggctggcgacgtggaatccaacccaggcccttctagaggccatatgaccgagtacaagcccacggtgcgcctcgccacccgcgacgacgtccccagggccgtacgcaccctcgccgccgcgttcgccgactaccccgccacgcgccacaccgtcgatccggaccgccacatcgagcgggtcaccgagctgcaagaactcttcctcacgcgcgtcgggctcgacatcggcaaggtgtgggtcgcggacgacggcgccgcggtggcggtctggaccacgccggagagcgtcgaagcgggggcggtgttcgccgagatcggcccgcgcatggccgagttgagcggttcccggctggccgcgcagcaacagatggaaggcctcctggcgccgcaccggcccaaggagcccgcgtggttcctggccaccgtcggcgtctcgcccgaccaccagggcaagggtctgggcagcgccgtcgtgctccccggagtggaggcggccgagcgcgccggggtgcccgccttcctggagacctccgcgccccgcaacctccccttctacgagcggctcggcttcaccgtcaccgccgacgtcgaggtgcccgaaggaccgcgcacctggtgcatgacccgcaagcccggtgcctga

SEQ ID NO: 38859 - DNA, 1851 bp, synthetic construct
  source 1..1851: mol_type = other DNA
atggccttaccagtgaccgccttgctcctgccgctggccttgctgctccacgccgccaggccggacatccagatgacacagagccctagcagcctgtctgccagcgtgggagacagagtgaccatcacatgcaaggccagcgacctgatccacaactggctggcctggtatcagcagaagcctggcaaggcccctaagctgctgatctacggcgctacctctctggaaacaggcgtgcccagcagattttctggcagcggctctggcaccgacttcaccctgacaatatccagcctccagcctgaggacttcgccacctactactgccagcagtactggaccacacctttcaccttcggccagggcaccaaggtggaaatcaaaagactcgaggacctgaagaacgtgttcccacctgaggtggccgtgttcgagcctagcgaggccgagatcagccacacccagaaagccaccctcgtgtgcctggctaccggcttctaccccgaccatgtggaactgtcttggtgggtcaacggcaaagaggtgcacagcggcgtgtgtaccgacccccagccactgaaagaacagcccgccctgaacgacagccggtactgcctgagcagcagactgagagtgtccgccaccttctggcagaacccccggaaccacttcagatgccaggtgcagttctacggcctgagcgagaacgacgagtggacccaggacagagccaagcccgtgacccagatcgtgtctgccgaagcctggggcagagccgatagcggctttaccagcgagagctaccagcagggcgtgctgagcgccaccatcctgtacgagatcctgctgggcaaggccaccctgtacgccgtgctggtgtctgccctggtgctgatggctatggtcaagcggaaggacagccggggaagggccaagcgatctggatctggagcaacaaacttctcactactcaaacaagcaggtgacgtggaggagaatcccgggcctactagtatggactggatttggcgcatccttttccttgtcggcgctgctaccggcgcgcattccttcgaagaagtgcagctggttgaatcaggtggcggcctggttcaacctggcggatctctgagactgagctgtgccgccagcggctacagcatcaccaatgactacgcctggaactgggtccgacaggcccctggaaaaggactggaatgggtcggatatatcagctactccggctacaccacctacaatcccagcatcaagagccggttcaccatcagcagagacaccagcaagaacaccctgtacctccagatgaactccctgagagccgaggacaccgccgtgtactattgtgccagatggaccagcggcctggactattggggacagggaacactggtcaccgtgtcctctacgcgtatccagaaccctgatcctgccgtgtaccagctgcgggatagcaagagcagcgacaagagcgtgtgtctgttcaccgacttcgacagccagaccaacgtgtcccagagcaaggactccgacgtgtacatcaccgataagtgcgtgctggacatgcggagcatggacttcaagagcaactccgccgtggcctggtccaacaagtccgatttcgcctgcgccaacgccttcaacaacagcattatccccgaggacacattcttcccaagccccgagagcagcagcgacgtgaagctggtggaaaagagcttcgagacagacaccaacctgaacttccagaacctgagcgtgatcggcttcagaatcctgctgctgaaagtggccggctttaacctgctgatgaccctgcggctgtggtccagc

SEQ ID NO: 38860 - DNA, 2691 bp, synthetic construct
  source 1..2691: mol_type = other DNA
atggccttaccagtgaccgccttgctcctgccgctggccttgctgctccacgccgccaggccggaggttcagctgcttgagtctggcggaggactggttcaacctggcggaagcctgagactgtcttgtgccgcctctggcagaaccttcagcatgggctggtatagacaggcccctggcaagggcctcgaatttgtgtctgccatcacatacagcggcggcagcccttactacgccgattctgtgaagggcagattcaccatcagccgggacaacagcaagaacaccgtgtacctccagatgaacagcctgagagccgaggacaccgccgtgtactactgtgccgccaatccaacctacggcagcgactggaatgccgagaattggggccagggcacactggtcacagtgtctagtggtaccggcggaggcggatctggcggcggaggtagcggtggcggaggatctgaattcgacatccagatgacacagagccctagcagcctgtctgccagcgtgggagacagagtgaccatcacatgcaaggccagcgacctgatccacaactggctggcctggtatcagcagaagcctggcaaggcccctaagctgctgatctacggcgctacctctctggaaacaggcgtgcccagcagattttctggcagcggctctggcaccgacttcaccctgacaatatccagcctccagcctgaggacttcgccacctactactgccagcagtactggaccacacctttcaccttcggccagggcaccaaggtggaaatcaaaagactcgagatccagaaccctgatcctgccgtgtaccagctgcgggatagcaagagcagcgacaagagcgtgtgtctgttcaccgacttcgacagccagaccaacgtgtcccagagcaaggactccgacgtgtacatcaccgataagtgcgtgctggacatgcggagcatggacttcaagagcaactccgccgtggcctggtccaacaagtccgatttcgcctgcgccaacgccttcaacaacagcattatccccgaggacacattcttcccaagcagcgacgtgccctgcgacgtgaagctggtggaaaagagcttcgagacagacaccaacctgaacttccagaacctgagcgtgatcggcttcagaatcctgctgctgaaagtggccggctttaacctgctgatgaccctgcggctgtggtccagccgcgccaagagaagcggatctggcgtgaagcagaccctgaatttcgacctgctgaagctggctggcgacgtggaatccaacccaggccctactagtaccatggactggatttggcgcatccttttccttgtcggcgctgctaccggcacccattccgggcccgaagtgcaactggttgaatccggtggcggcctggtgcaacccggcggatctctcagacttagctgtgccgcctccggcagaaccttcacaatgggatggtacaggcaggctccagggaaagagagagagttcgtcgccgccatctctctgtctcccacactggcctactacgccgactctgtgaaaggccggttcaccatctccagagataatagcaagaacaccgtggtgctgcaaatgaactctctgagagccgaggatacagccctgtactattgtgccgctgaccggaagtccgtgatgagcatcagacccgattactggggacagggcacactggtcacagtgtctagtggatccggcggcggaggatctggcggaggcggatctgggggcggaggctctttcgaagaagtgcagctggttgaatcaggtggcggcctggttcaacctggcggatctctgagactgagctgtgccgccagcggctacagcatcaccaatgactacgcctggaactgggtccgacaggcccctggaaaaggactggaatgggtcggatatatcagctactccggctacaccacctacaatcccagcatcaagagccggttcaccatcagcagagacaccagcaagaacaccctgtacctccagatgaactccctgagagccgaggacaccgccgtgtactattgtgccagatggaccagcggcctggactattggggacagggaacactggtcaccgtgtcctctacgcgtgaggacctgaagaacgtgttcccacctgaggtggccgtgttcgagcctagcaaggccgagatcgcccacacccagaaagccaccctcgtgtgcctggctaccggcttctaccccgaccatgtggaactgtcttggtgggtcaacggcaaagaggtgcacagcggcgtgtgtaccgacccccagccactgaaagaacagcccgccctgaacgacagccggtactgcctgagcagcagactgagagtgtccgccaccttctggcagaacccccggaaccacttcagatgccaggtgcagttctacggcctgagcgagaacgacgagtggacccaggacagagccaagcccgtgacccagatcgtgtctgccgaagcctggggcagagccgattgcggcatcaccagcgccagctaccaccagggcgtgctgagcgccaccatcctgtacgagatcctgctgggcaaggccaccctgtacgccgtgctggtgtctgccctggtgctgatggctatggtcaagcggaaggacagccggggataa

SEQ ID NO: 38861 - DNA, 2691 bp, synthetic construct
  source 1..2691: mol_type = other DNA
atggccttaccagtgaccgccttgctcctgccgctggccttgctgctccacgccgccaggccggaagtgcagctggttgaatctggcggaggactggttcaggctggcggatctctgagactgtcttgtgccgccagcggcagaacctttagcatgggctggtttagacaggcccctggcaaagagagagagttcgtcgccgccatcacatactctggcggcagcccttactacgccgactctgtgaagggcagattcaccatcagccgggacaacgccaagaacaccgtgtacctccagatgaacagcctgaagcctgaggacaccgccgtgtactactgcgccgccaatccaacatacggcagcgactggaacgccgagaattggggccagggaacccaagtgacagtgtctagcggtaccggcggaggcggatctggcggcggaggtagcggtggcggaggatctgaattcgacatccagatgacacagagccctagcagcctgtctgccagcgtgggagacagagtgaccatcacatgcaaggccagcgacctgatccacaactggctggcctggtatcagcagaagcctggcaaggcccctaagctgctgatctacggcgctacctctctggaaacaggcgtgcccagcagattttctggcagcggctctggcaccgacttcaccctgacaatatccagcctccagcctgaggacttcgccacctactactgccagcagtactggaccacacctttcaccttcggccagggcaccaaggtggaaatcaaaagactcgagatccagaaccctgatcctgccgtgtaccagctgcgggatagcaagagcagcgacaagagcgtgtgtctgttcaccgacttcgacagccagaccaacgtgtcccagagcaaggactccgacgtgtacatcaccgataagtgcgtgctggacatgcggagcatggacttcaagagcaactccgccgtggcctggtccaacaagtccgatttcgcctgcgccaacgccttcaacaacagcattatccccgaggacacattcttcccaagcagcgacgtgccctgcgacgtgaagctggtggaaaagagcttcgagacagacaccaacctgaacttccagaacctgagcgtgatcggcttcagaatcctgctgctgaaagtggccggctttaacctgctgatgaccctgcggctgtggtccagccgcgccaagagaagcggatctggcgtgaagcagaccctgaatttcgacctgctgaagctggctggcgacgtggaatccaacccaggccctactagtaccatggactggatttggcgcatccttttccttgtcggcgctgctaccggcgcccattccgggcccgaagtgcaactggttgaatccggtggcggcctggtgcaacccggcggatctctcagacttagctgtgccgcctccggcagaaccttcacaatgggatggtacaggcaggctccagggaaagagagagagttcgtcgccgccatctctctgtctcccacactggcctactacgccgactctgtgaaaggccggttcaccatctccagagataatagcaagaacaccgtggtgctgcaaatgaactctctgagagccgaggatacagccctgtactattgtgccgctgaccggaagtccgtgatgagcatcagacccgattactggggacagggcacactggtcacagtgtctagtggatccggcggcggaggatctggcggaggcggatctgggggcggaggctctttcgaagaagtgcagctggttgaatcaggtggcggcctggttcaacctggcggatctctgagactgagctgtgccgccagcggctacagcatcaccaatgactacgcctggaactgggtccgacaggcccctggaaaaggactggaatgggtcggatatatcagctactccggctacaccacctacaatcccagcatcaagagccggttcaccatcagcagagacaccagcaagaacaccctgtacctccagatgaactccctgagagccgaggacaccgccgtgtactattgtgccagatggaccagcggcctggactattggggacagggaacactggtcaccgtgtcctctacgcgtgaggacctgaagaacgtgttcccacctgaggtggccgtgttcgagcctagcaaggccgagatcgcccacacccagaaagccaccctcgtgtgcctggctaccggcttctaccccgaccatgtggaactgtcttggtgggtcaacggcaaagaggtgcacagcggcgtgtgtaccgacccccagccactgaaagaacagcccgccctgaacgacagccggtactgcctgagcagcagactgagagtgtccgccaccttctggcagaacccccggaaccacttcagatgccaggtgcagttctacggcctgagcgagaacgacgagtggacccaggacagagccaagcccgtgacccagatcgtgtctgccgaagcctggggcagagccgattgcggcatcaccagcgccagctaccaccagggcgtgctgagcgccaccatcctgtacgagatcctgctgggcaaggccaccctgtacgccgtgctggtgtctgccctggtgctgatggctatggtcaagcggaaggacagccggggataa

SEQ ID NO: 38862 - DNA, 2682 bp, synthetic construct
  source 1..2682: mol_type = other DNA
atggccttaccagtgaccgccttgctcctgccgctggccttgctgctccacgccgccaggccggaagtgcagctggttgaatctggcggaggactggttcaggctggcggatctctgagactgtcttgtgccgccagcggcagaacctttagcatgggctggtttagacaggcccctggcaaagagagagagttcgtcgccgccatcacatactctggcggcagcccttactacgccgactctgtgaagggcagattcaccatcagccgggacaacgccaagaacaccgtgtacctccagatgaacagcctgaagcctgaggacaccgccgtgtactactgcgccgccaatccaacatacggcagcgactggaacgccgagaattggggccagggaacccaagtgacagtgtctagcggtaccggcggaggcggatctggcggcggaggtagcggtggcggaggatctgaattcgacatccagatgacacagagccctagcagcctgtctgccagcgtgggagacagagtgaccatcacatgcaaggccagcgacctgatccacaactggctggcctggtatcagcagaagcctggcaaggcccctaagctgctgatctacggcgctacctctctggaaacaggcgtgcccagcagattttctggcagcggctctggcaccgacttcaccctgacaatatccagcctccagcctgaggacttcgccacctactactgccagcagtactggaccacacctttcaccttcggccagggcaccaaggtggaaatcaaaagactcgaggacctgaagaacgtgttcccacctgaggtggccgtgttcgagcctagcgaggccgagatcagccacacccagaaagccaccctcgtgtgcctggctaccggcttctaccccgaccatgtggaactgtcttggtgggtcaacggcaaagaggtgcacagcggcgtgtgtaccgacccccagccactgaaagaacagcccgccctgaacgacagccggtactgcctgagcagcagactgagagtgtccgccaccttctggcagaacccccggaaccacttcagatgccaggtgcagttctacggcctgagcgagaacgacgagtggacccaggacagagccaagcccgtgacccagatcgtgtctgccgaagcctggggcagagccgattgcggctttaccagcgagagctaccagcagggcgtgctgagcgccaccatcctgtacgagatcctgctgggcaaggccaccctgtacgccgtgctggtgtctgccctggtgctgatggctatggtcaagcggaaggacagccggggaagggccaagcgatctggatctggagcaacaaacttctcactactcaaacaagcaggtgacgtggaggagaatcccgggcctactagtgccaccatggactggatttggcgcatccttttccttgtcggcgctgctaccggcgcccattccgggcccgaagtgcaactggttgaatccggtggcggcctggtgcaagcaggcggatctctcagacttagctgtgccgcctccggcagaaccttcacaatgggatggtttaggcaggctccagggaaagagagagagttcgtcgccgccatctctctgtctcccacactggcctactacgccgactctgtgaaaggccggttcaccatctccagagataatgccaagaacaccgtggtgctgcaaatgaactctctgaaacccgaggatacagccctgtactattgtgccgctgaccggaagtccgtgatgagcatcagacccgattactggggacagggcacacaagtcacagtgtcctctggatccggcggcggaggatctggcggaggcggatctgggggcggaggctctttcgaagaagtgcagctggttgaatcaggtggcggcctggttcaacctggcggatctctgagactgagctgtgccgccagcggctacagcatcaccaatgactacgcctggaactgggtccgacaggcccctggaaaaggactggaatgggtcggatatatcagctactccggctacaccacctacaatcccagcatcaagagccggttcaccatcagcagagacaccagcaagaacaccctgtacctccagatgaactccctgagagccgaggacaccgccgtgtactattgtgccagatggaccagcggcctggactattggggacagggaacactggtcaccgtgtcctctacgcgtatccagaaccctgatcctgccgtgtaccagctgcgggatagcaagagcagcgacaagagcgtgtgtctgttcaccgacttcgacagccagaccaacgtgtcccagagcaaggactccgacgtgtacatcaccgataagtgcgtgctggacatgcggagcatggacttcaagagcaactccgccgtggcctggtccaacaagtccgatttcgcctgcgccaacgccttcaacaacagcattatccccgaggacacattcttcccaagccccgagagcagctgcgacgtgaagctggtggaaaagagcttcgagacagacaccaacctgaacttccagaacctgagcgtgatcggcttcagaatcctgctgctgaaagtggccggctttaacctgctgatgaccctgcggctgtggtccagctaa

SEQ ID NO: 38863 - DNA, 2295 bp, synthetic construct
  source 1..2295: mol_type = other DNA
atggccttaccagtgaccgccttgctcctgccgctggccttgctgctccacgccgccaggccggaagtgcagctggttgaatctggcggaggactggttcagcctggcggatctctgagactgagctgtgaagccagcggcttcgccagcgacgattacatcatcggctggttcagacaggcccctggcaaagagagagagggcgtcagctgcatcagctctaagtacgccaacaccgtgtacaccgacagcgtgaagggcagattcagactgagcagaggcaccgccaagaataccgtgtacctccagatgagcgccctgaagcctgaggataccgccgtgtactactgcgctatggacagccgcagagtgacatgccctgagatcagcaccatgcaccggaacttcgattcttggggccagggcacactggtcacagtgtcatctggtaccggcggaggcggatctggcggcggaggtagcggtggcggaggatctgaattcgacatccagatgacacagagccctagcagcctgtctgccagcgtgggagacagagtgaccatcacatgcaaggccagcgacctgatccacaactggctggcctggtatcagcagaagcctggcaaggcccctaagctgctgatctacggcgctacctctctggaaacaggcgtgcccagcagattttctggcagcggctctggcaccgacttcaccctgacaatatccagcctccagcctgaggacttcgccacctactactgccagcagtactggaccacacctttcaccttcggccagggcaccaaggtggaaatcaaaagactcgaggacctgaagaacgtgttcccacctgaggtggccgtgttcgagcctagcaaggccgagatcgcccacacccagaaagccaccctcgtgtgcctggctaccggcttctaccccgaccatgtggaactgtcttggtgggtcaacggcaaagaggtgcacagcggcgtgtgtaccgacccccagccactgaaagaacagcccgccctgaacgacagccggtactgcctgagcagcagactgagagtgtccgccaccttctggcagaacccccggaaccacttcagatgccaggtgcagttctacggcctgagcgagaacgacgagtggacccaggacagagccaagcccgtgacccagatcgtgtctgccgaagcctggggcagagccgattgcggcatcaccagcgccagctaccaccagggcgtgctgagcgccaccatcctgtacgagatcctgctgggcaaggccaccctgtacgccgtgctggtgtctgccctggtgctgatggctatggtcaagcggaaggacagccggggaagggccaagcgatctggatctggagcaacaaacttctcactactcaaacaagcaggtgacgtggaggagaatcccgggcctactagtatggactggatttggcgcatccttttccttgtcggcgctgctaccggcgcgcattccttcgaagaagtgcagctggttgaatcaggtggcggcctggttcaacctggcggatctctgagactgagctgtgccgccagcggctacagcatcaccaatgactacgcctggaactgggtccgacaggcccctggaaaaggactggaatgggtcggatatatcagctactccggctacaccacctacaatcccagcatcaagagccggttcaccatcagcagagacaccagcaagaacaccctgtacctccagatgaactccctgagagccgaggacaccgccgtgtactattgtgccagatggaccagcggcctggactattggggacagggaacactggtcaccgtgtcctctacgcgtatccagaaccctgatcctgccgtgtaccagctgcgggatagcaagagcagcgacaagagcgtgtgtctgttcaccgacttcgacagccagaccaacgtgtcccagagcaaggactccgacgtgtacatcaccgataagtgcgtgctggacatgcggagcatggacttcaagagcaactccgccgtggcctggtccaacaagtccgatttcgcctgcgccaacgccttcaacaacagcattatccccgaggacacattcttcccaagcagcgacgtgccctgcgacgtgaagctggtggaaaagagcttcgagacagacaccaacctgaacttccagaacctgagcgtgatcggcttcagaatcctgctgctgaaagtggccggctttaacctgctgatgaccctgcggctgtggtccagctaa

SEQ ID NO: 38864 - DNA, 2268 bp, synthetic construct
  source 1..2268: mol_type = other DNA
atggccttaccagtgaccgccttgctcctgccgctggccttgctgctccacgccgccaggccggacatccagatgacacagagccctagcagcctgtctgccagcgtgggagacagagtgaccatcacatgcaaggccagcgacctgatccacaactggctggcctggtatcagcagaagcctggcaaggcccctaagctgctgatctacggcgctacctctctggaaacaggcgtgcccagcagattttctggcagcggctctggcaccgacttcaccctgacaatatccagcctccagcctgaggacttcgccacctactactgccagcagtactggaccacacctttcaccttcggccagggcaccaaggtggaaatcaaaagactcgaggacctgaagaacgtgttcccacctgaggtggccgtgttcgagcctagcgaggccgagatcagccacacccagaaagccaccctcgtgtgcctggctaccggcttctaccccgaccatgtggaactgtcttggtgggtcaacggcaaagaggtgcacagcggcgtgtgtaccgacccccagccactgaaagaacagcccgccctgaacgacagccggtactgcctgagcagcagactgagagtgtccgccaccttctggcagaacccccggaaccacttcagatgccaggtgcagttctacggcctgagcgagaacgacgagtggacccaggacagagccaagcccgtgacccagatcgtgtctgccgaagcctggggcagagccgattgcggctttaccagcgagagctaccagcagggcgtgctgagcgccaccatcctgtacgagatcctgctgggcaaggccaccctgtacgccgtgctggtgtctgccctggtgctgatggctatggtcaagcggaaggacagccggggaagggccaagcgatctggatctggagcaacaaacttctcactactcaaacaagcaggtgacgtggaggagaatcccgggcctactagtaccatggactggatttggcgcatccttttccttgtcggcgctgctaccggcgcccattccgggcccgaagtgcaactggttgaatccggtggcggcctggtgcaacccggcggatctctcagacttagctgtgccgcctccggcagaaccttcacaatgggatggtacaggcaggctccagggaaagagagagagttcgtcgccgccatctctctgtctcccacactggcctactacgccgactctgtgaaaggccggttcaccatctccagagataatagcaagaacaccgtggtgctgcaaatgaactctctgagagccgaggatacagccctgtactattgtgccgctgaccggaagtccgtgatgagcatcagacccgattactggggacagggcacactggtcacagtgtctagtggatccggcggcggaggatctggcggaggcggatctgggggcggaggctctttcgaagaagtgcagctggttgaatcaggtggcggcctggttcaacctggcggatctctgagactgagctgtgccgccagcggctacagcatcaccaatgactacgcctggaactgggtccgacaggcccctggaaaaggactggaatgggtcggatatatcagctactccggctacaccacctacaatcccagcatcaagagccggttcaccatcagcagagacaccagcaagaacaccctgtacctccagatgaactccctgagagccgaggacaccgccgtgtactattgtgccagatggaccagcggcctggactattggggacagggaacactggtcaccgtgtcctctacgcgtatccagaaccctgatcctgccgtgtaccagctgcgggatagcaagagcagcgacaagagcgtgtgtctgttcaccgacttcgacagccagaccaacgtgtcccagagcaaggactccgacgtgtacatcaccgataagtgcgtgctggacatgcggagcatggacttcaagagcaactccgccgtggcctggtccaacaagtccgatttcgcctgcgccaacgccttcaacaacagcattatccccgaggacacattcttcccaagccccgagagcagctgcgacgtgaagctggtggaaaagagcttcgagacagacaccaacctgaacttccagaacctgagcgtgatcggcttcagaatcctgctgctgaaagtggccggctttaacctgctgatgaccctgcggctgtggtccagctaa

SEQ ID NO: 38865 - DNA, 2286 bp, synthetic construct
  source 1..2286: mol_type = other DNA
atggccttaccagtgaccgccttgctcctgccgctggccttgctgctccacgccgccaggccggacatccagatgacacagagccctagcagcctgtctgccagcgtgggagacagagtgaccatcacatgcaaggccagcgacctgatccacaactggctggcctggtatcagcagaagcctggcaaggcccctaagctgctgatctacggcgctacctctctggaaacaggcgtgcccagcagattttctggcagcggctctggcaccgacttcaccctgacaatatccagcctccagcctgaggacttcgccacctactactgccagcagtactggaccacacctttcaccttcggccagggcaccaaggtggaaatcaaaagactcgaggacctgaagaacgtgttcccacctgaggtggccgtgttcgagcctagcgaggccgagatcagccacacccagaaagccaccctcgtgtgcctggctaccggcttctaccccgaccatgtggaactgtcttggtgggtcaacggcaaagaggtgcacagcggcgtgtgtaccgacccccagccactgaaagaacagcccgccctgaacgacagccggtactgcctgagcagcagactgagagtgtccgccaccttctggcagaacccccggaaccacttcagatgccaggtgcagttctacggcctgagcgagaacgacgagtggacccaggacagagccaagcccgtgacccagatcgtgtctgccgaagcctggggcagagccgattgcggctttaccagcgagagctaccagcagggcgtgctgagcgccaccatcctgtacgagatcctgctgggcaaggccaccctgtacgccgtgctggtgtctgccctggtgctgatggctatggtcaagcggaaggacagccggggaagggccaagcgatctggatctggagcaacaaacttctcactactcaaacaagcaggtgacgtggaggagaatcccgggcctactagtaccatggactggatttggcgcatccttttccttgtcggcgctgctaccggcgcccattccgggccccaggtgcagctggttgaatctggcggaggactggttcagcctggcggatctctgagactgtcttgtgccgccagcggcaacatcaacagcagaaactgcatgggctggttcagacaggcccctggcaagggaagagaaggcgtggcagctatcggccaagtgaccggcagaacctactacgtggacagcgtgaagggcagattcaccatcagcctggacaacagcaagaacaccctgtacctccagatgaacagcctgagagccgaggacaccgccgtgtactattgtgctgctgcccctggctgtctgctgtctgcacttagaagcgccgactacagaaactggggccagggcacactggtcaccgtttcttctggatccggcggcggaggatctggcggaggcggatctgggggcggaggctctttcgaagaagtgcagctggttgaatcaggtggcggcctggttcaacctggcggatctctgagactgagctgtgccgccagcggctacagcatcaccaatgactacgcctggaactgggtccgacaggcccctggaaaaggactggaatgggtcggatatatcagctactccggctacaccacctacaatcccagcatcaagagccggttcaccatcagcagagacaccagcaagaacaccctgtacctccagatgaactccctgagagccgaggacaccgccgtgtactattgtgccagatggaccagcggcctggactattggggacagggaacactggtcaccgtgtcctctacgcgtatccagaaccctgatcctgccgtgtaccagctgcgggatagcaagagcagcgacaagagcgtgtgtctgttcaccgacttcgacagccagaccaacgtgtcccagagcaaggactccgacgtgtacatcaccgataagtgcgtgctggacatgcggagcatggacttcaagagcaactccgccgtggcctggtccaacaagtccgatttcgcctgcgccaacgccttcaacaacagcattatccccgaggacacattcttcccaagccccgagagcagctgcgacgtgaagctggtggaaaagagcttcgagacagacaccaacctgaacttccagaacctgagcgtgatcggcttcagaatcctgctgctgaaagtggccggctttaacctgctgatgaccctgcggctgtggtccagc

SEQ ID NO: 38866 - DNA, 2289 bp, synthetic construct
  source 1..2289: mol_type = other DNA
atggccttaccagtgaccgccttgctcctgccgctggccttgctgctccacgccgccaggccggacatccagatgacacagagccctagcagcctgtctgccagcgtgggagacagagtgaccatcacatgcaaggccagcgacctgatccacaactggctggcctggtatcagcagaagcctggcaaggcccctaagctgctgatctacggcgctacctctctggaaacaggcgtgcccagcagattttctggcagcggctctggcaccgacttcaccctgacaatatccagcctccagcctgaggacttcgccacctactactgccagcagtactggaccacacctttcaccttcggccagggcaccaaggtggaaatcaaaagactcgaggacctgaagaacgtgttcccacctgaggtggccgtgttcgagcctagcgaggccgagatcagccacacccagaaagccaccctcgtgtgcctggctaccggcttctaccccgaccatgtggaactgtcttggtgggtcaacggcaaagaggtgcacagcggcgtgtgtaccgacccccagccactgaaagaacagcccgccctgaacgacagccggtactgcctgagcagcagactgagagtgtccgccaccttctggcagaacccccggaaccacttcagatgccaggtgcagttctacggcctgagcgagaacgacgagtggacccaggacagagccaagcccgtgacccagatcgtgtctgccgaagcctggggcagagccgattgcggctttaccagcgagagctaccagcagggcgtgctgagcgccaccatcctgtacgagatcctgctgggcaaggccaccctgtacgccgtgctggtgtctgccctggtgctgatggctatggtcaagcggaaggacagccggggaagggccaagcgatctggatctggagcaacaaacttctcactactcaaacaagcaggtgacgtggaggagaatcccgggcctactagtaccatggactggatttggcgcatccttttccttgtcggcgctgctaccggcgcccattccgggccccaggtgcagctggttgaatctggcggaggatctgttcaggctggcggctctctgagactgtcttgtggcgcttccggcaacatcagcagcagaaactgcatgggctggttcagacaggcccctggcaaagagagagaaggcgttgccgccatcggacaagtgaccggcagatcctactacgtggacagcgtgaagggcagattcaccatcagcctggacaacgccaagaacaccctgtacctccagatgaacacactgaagcccgaggacaccgccatgtactactgtgctgctgcccctggctgtctgctgtctgcacttagaagcgccgactacagaaactggggccagggaacccaagtgacagtgtctagtggatccggcggcggaggatctggcggaggcggatctgggggcggaggctctttcgaagaagtgcagctggttgaatcaggtggcggcctggttcaacctggcggatctctgagactgagctgtgccgccagcggctacagcatcaccaatgactacgcctggaactgggtccgacaggcccctggaaaaggactggaatgggtcggatatatcagctactccggctacaccacctacaatcccagcatcaagagccggttcaccatcagcagagacaccagcaagaacaccctgtacctccagatgaactccctgagagccgaggacaccgccgtgtactattgtgccagatggaccagcggcctggactattggggacagggaacactggtcaccgtgtcctctacgcgtatccagaaccctgatcctgccgtgtaccagctgcgggatagcaagagcagcgacaagagcgtgtgtctgttcaccgacttcgacagccagaccaacgtgtcccagagcaaggactccgacgtgtacatcaccgataagtgcgtgctggacatgcggagcatggacttcaagagcaactccgccgtggcctggtccaacaagtccgatttcgcctgcgccaacgccttcaacaacagcattatccccgaggacacattcttcccaagccccgagagcagctgcgacgtgaagctggtggaaaagagcttcgagacagacaccaacctgaacttccagaacctgagcgtgatcggcttcagaatcctgctgctgaaagtggccggctttaacctgctgatgaccctgcggctgtggtccagctaa

SEQ ID NO: 38867 - DNA, 2712 bp, synthetic construct
  source 1..2712: mol_type = other DNA
atggccttaccagtgaccgccttgctcctgccgctggccttgctgctccacgccgccaggccggaagtgcagctggttgaatctggcggaggactggttcaggctggcggatctctgagactgtcttgtgccgccagcggcagaacctttagcatgggctggtttagacaggcccctggcaaagagagagagttcgtcgccgccatcacatactctggcggcagcccttactacgccgactctgtgaagggcagattcaccatcagccgggacaacgccaagaacaccgtgtacctccagatgaacagcctgaagcctgaggacaccgccgtgtactactgcgccgccaatccaacatacggcagcgactggaacgccgagaattggggccagggaacccaagtgacagtgtctagcggtaccggcggaggcggatctggcggcggaggtagcggtggcggaggatctgaattcgacatccagatgacacagagccctagcagcctgtctgccagcgtgggagacagagtgaccatcacatgcaaggccagcgacctgatccacaactggctggcctggtatcagcagaagcctggcaaggcccctaagctgctgatctacggcgctacctctctggaaacaggcgtgcccagcagattttctggcagcggctctggcaccgacttcaccctgacaatatccagcctccagcctgaggacttcgccacctactactgccagcagtactggaccacacctttcaccttcggccagggcaccaaggtggaaatcaaaagactcgagatccagaaccctgatcctgccgtgtaccagctgcgggatagcaagagcagcgacaagagcgtgtgtctgttcaccgacttcgacagccagaccaacgtgtcccagagcaaggactccgacgtgtacatcaccgataagtgcgtgctggacatgcggagcatggacttcaagagcaactccgccgtggcctggtccaacaagtccgatttcgcctgcgccaacgccttcaacaacagcattatccccgaggacacattcttcccaagcagcgacgtgccctgcgacgtgaagctggtggaaaagagcttcgagacagacaccaacctgaacttccagaacctgagcgtgatcggcttcagaatcctgctgctgaaagtggccggctttaacctgctgatgaccctgcggctgtggtccagccgcgccaagagaagcggatctggcgtgaagcagaccctgaatttcgacctgctgaagctggctggcgacgtggaatccaacccaggccctactagtaccatggactggatttggcgcatccttttccttgtcggcgctgctaccggcgcccattccgggccccaggtgcagctggttgaatctggcggaggatctgttcaggctggcggctctctgagactgtcttgtggcgcttccggcaacatcagcagcagaaactgcatgggctggttcagacaggcccctggcaaagagagagaaggcgttgccgccatcggacaagtgaccggcagatcctactacgtggacagcgtgaagggcagattcaccatcagcctggacaacgccaagaacaccctgtacctccagatgaacacactgaagcccgaggacaccgccatgtactactgtgctgctgcccctggctgtctgctgtctgcacttagaagcgccgactacagaaactggggccagggaacccaagtgacagtgtctagtggatccggcggcggaggatctggcggaggcggatctgggggcggaggctctttcgaagaagtgcagctggttgaatcaggtggcggcctggttcaacctggcggatctctgagactgagctgtgccgccagcggctacagcatcaccaatgactacgcctggaactgggtccgacaggcccctggaaaaggactggaatgggtcggatatatcagctactccggctacaccacctacaatcccagcatcaagagccggttcaccatcagcagagacaccagcaagaacaccctgtacctccagatgaactccctgagagccgaggacaccgccgtgtactattgtgccagatggaccagcggcctggactattggggacagggaacactggtcaccgtgtcctctacgcgtgaggacctgaagaacgtgttcccacctgaggtggccgtgttcgagcctagcaaggccgagatcgcccacacccagaaagccaccctcgtgtgcctggctaccggcttctaccccgaccatgtggaactgtcttggtgggtcaacggcaaagaggtgcacagcggcgtgtgtaccgacccccagccactgaaagaacagcccgccctgaacgacagccggtactgcctgagcagcagactgagagtgtccgccaccttctggcagaacccccggaaccacttcagatgccaggtgcagttctacggcctgagcgagaacgacgagtggacccaggacagagccaagcccgtgacccagatcgtgtctgccgaagcctggggcagagccgattgcggcatcaccagcgccagctaccaccagggcgtgctgagcgccaccatcctgtacgagatcctgctgggcaaggccaccctgtacgccgtgctggtgtctgccctggtgctgatggctatggtcaagcggaaggacagccggggataa

SEQ ID NO: 38868 - DNA, 2703 bp, synthetic construct
  source 1..2703: mol_type = other DNA
atggccttaccagtgaccgccttgctcctgccgctggccttgctgctccacgccgccaggccgcaggtgcagctggttgaatctggcggaggatctgttcaggctggcggctctctgagactgtcttgtggcgcttccggcaacatcagcagcagaaactgcatgggctggttcagacaggcccctggcaaagagagagaaggcgttgccgccatcggacaagtgaccggcagatcctactacgtggacagcgtgaagggcagattcaccatcagcctggacaacgccaagaacaccctgtacctccagatgaacacactgaagcccgaggacaccgccatgtactactgtgctgctgcccctggctgtctgctgtctgcacttagaagcgccgactacagaaactggggccagggaacccaagtgacagtgtctagtggtaccggcggaggcggatctggcggcggaggtagcggtggcggaggatctgaattcgacatccagatgacacagagccctagcagcctgtctgccagcgtgggagacagagtgaccatcacatgcaaggccagcgacctgatccacaactggctggcctggtatcagcagaagcctggcaaggcccctaagctgctgatctacggcgctacctctctggaaacaggcgtgcccagcagattttctggcagcggctctggcaccgacttcaccctgacaatatccagcctccagcctgaggacttcgccacctactactgccagcagtactggaccacacctttcaccttcggccagggcaccaaggtggaaatcaaaagactcgaggacctgaagaacgtgttcccacctgaggtggccgtgttcgagcctagcgaggccgagatcagccacacccagaaagccaccctcgtgtgcctggctaccggcttctaccccgaccatgtggaactgtcttggtgggtcaacggcaaagaggtgcacagcggcgtgtgtaccgacccccagccactgaaagaacagcccgccctgaacgacagccggtactgcctgagcagcagactgagagtgtccgccaccttctggcagaacccccggaaccacttcagatgccaggtgcagttctacggcctgagcgagaacgacgagtggacccaggacagagccaagcccgtgacccagatcgtgtctgccgaagcctggggcagagccgattgcggctttaccagcgagagctaccagcagggcgtgctgagcgccaccatcctgtacgagatcctgctgggcaaggccaccctgtacgccgtgctggtgtctgccctggtgctgatggctatggtcaagcggaaggacagccggggaagggccaagcgatctggatctggagcaacaaacttctcactactcaaacaagcaggtgacgtggaggagaatcccgggcctactagtgccaccatggactggatttggcgcatccttttccttgtcggcgctgctaccggcgcccattccgggcccgaagtgcaactggttgaatccggtggcggcctggtgcaagcaggcggatctctcagacttagctgtgccgcctccggcagaaccttcacaatgggatggtttaggcaggctccagggaaagagagagagttcgtcgccgccatctctctgtctcccacactggcctactacgccgactctgtgaaaggccggttcaccatctccagagataatgccaagaacaccgtggtgctgcaaatgaactctctgaaacccgaggatacagccctgtactattgtgccgctgaccggaagtccgtgatgagcatcagacccgattactggggacagggcacacaagtcacagtgtcctctggatccggcggcggaggatctggcggaggcggatctgggggcggaggctctttcgaagaagtgcagctggttgaatcaggtggcggcctggttcaacctggcggatctctgagactgagctgtgccgccagcggctacagcatcaccaatgactacgcctggaactgggtccgacaggcccctggaaaaggactggaatgggtcggatatatcagctactccggctacaccacctacaatcccagcatcaagagccggttcaccatcagcagagacaccagcaagaacaccctgtacctccagatgaactccctgagagccgaggacaccgccgtgtactattgtgccagatggaccagcggcctggactattggggacagggaacactggtcaccgtgtcctctacgcgtatccagaaccctgatcctgccgtgtaccagctgcgggatagcaagagcagcgacaagagcgtgtgtctgttcaccgacttcgacagccagaccaacgtgtcccagagcaaggactccgacgtgtacatcaccgataagtgcgtgctggacatgcggagcatggacttcaagagcaactccgccgtggcctggtccaacaagtccgatttcgcctgcgccaacgccttcaacaacagcattatccccgaggacacattcttcccaagccccgagagcagctgcgacgtgaagctggtggaaaagagcttcgagacagacaccaacctgaacttccagaacctgagcgtgatcggcttcagaatcctgctgctgaaagtggccggctttaacctgctgatgaccctgcggctgtggtccagctaa

SEQ ID NO: 38869 - DNA, 2292 bp, synthetic construct
  source 1..2292: mol_type = other DNA
atggccttaccagtgaccgccttgctcctgccgctggccttgctgctccacgccgccaggccgcaggtgcagctggttgaatctggcggaggatctgttcaggctggcggctctctgagactgtcttgtggcgcttccggcaacatcagcagcagaaactgcatgggctggttcagacaggcccctggcaaagagagagaaggcgttgccgccatcggacaagtgaccggcagatcctactacgtggacagcgtgaagggcagattcaccatcagcctggacaacgccaagaacaccctgtacctccagatgaacacactgaagcccgaggacaccgccatgtactactgtgctgctgcccctggctgtctgctgtctgcacttagaagcgccgactacagaaactggggccagggaacccaagtgacagtgtctagtggtaccggcggaggcggatctggcggcggaggtagcggtggcggaggatctgaattcgacatccagatgacacagagccctagcagcctgtctgccagcgtgggagacagagtgaccatcacatgcaaggccagcgacctgatccacaactggctggcctggtatcagcagaagcctggcaaggcccctaagctgctgatctacggcgctacctctctggaaacaggcgtgcccagcagattttctggcagcggctctggcaccgacttcaccctgacaatatccagcctccagcctgaggacttcgccacctactactgccagcagtactggaccacacctttcaccttcggccagggcaccaaggtggaaatcaaaagactcgaggacctgaagaacgtgttcccacctgaggtggccgtgttcgagcctagcgaggccgagatcagccacacccagaaagccaccctcgtgtgcctggctaccggcttctaccccgaccatgtggaactgtcttggtgggtcaacggcaaagaggtgcacagcggcgtgtgtaccgacccccagccactgaaagaacagcccgccctgaacgacagccggtactgcctgagcagcagactgagagtgtccgccaccttctggcagaacccccggaaccacttcagatgccaggtgcagttctacggcctgagcgagaacgacgagtggacccaggacagagccaagcccgtgacccagatcgtgtctgccgaagcctggggcagagccgattgcggctttaccagcgagagctaccagcagggcgtgctgagcgccaccatcctgtacgagatcctgctgggcaaggccaccctgtacgccgtgctggtgtctgccctggtgctgatggctatggtcaagcggaaggacagccggggaagggccaagcgatctggatctggagcaacaaacttctcactactcaaacaagcaggtgacgtggaggagaatcccgggcctactagtgccaccatggactggatttggcgcatccttttccttgtcggcgctgctaccggcgcccattccttcgaagaagtgcagctggttgaatcaggtggcggcctggttcaacctggcggatctctgagactgagctgtgccgccagcggctacagcatcaccaatgactacgcctggaactgggtccgacaggcccctggaaaaggactggaatgggtcggatatatcagctactccggctacaccacctacaatcccagcatcaagagccggttcaccatcagcagagacaccagcaagaacaccctgtacctccagatgaactccctgagagccgaggacaccgccgtgtactattgtgccagatggaccagcggcctggactattggggacagggaacactggtcaccgtgtcctctacgcgtatccagaaccctgatcctgccgtgtaccagctgcgggatagcaagagcagcgacaagagcgtgtgtctgttcaccgacttcgacagccagaccaacgtgtcccagagcaaggactccgacgtgtacatcaccgataagtgcgtgctggacatgcggagcatggacttcaagagcaactccgccgtggcctggtccaacaagtccgatttcgcctgcgccaacgccttcaacaacagcattatccccgaggacacattcttcccaagccccgagagcagctgcgacgtgaagctggtggaaaagagcttcgagacagacaccaacctgaacttccagaacctgagcgtgatcggcttcagaatcctgctgctgaaagtggccggctttaacctgctgatgaccctgcggctgtggtccagctaa

SEQ ID NO: 38870 - DNA, 2292 bp, synthetic construct
  source 1..2292: mol_type = other DNA
atggccttaccagtgaccgccttgctcctgccgctggccttgctgctccacgccgccaggccgcaagttcagctggtggaaagcggtggtggcgttgtgcaacctggtggaagtctgaggctgagctgtgccgcttctggcctgagctttagcacctacactgtggcctggttcaggcaggctcccggaaagggtcttgaaggcgtggccgccattccttacaccagccagcacatggtgtacacagacagcgtcagaggccggttcaccatcagcagagacaactccaagaatacgctctatctccagatgaactctctgcgcgccgaagatacagccgtgtattactgcgccaccgacagacggcctggcacctctatgctggctatcaacggctacaacagatggggacagggaaccaccgtgaccgtgtcatctggtaccggcggaggcggatctggcggcggaggtagcggtggcggaggatctgaattcgacatccagatgacacagagccctagcagcctgtctgccagcgtgggagacagagtgaccatcacatgcaaggccagcgacctgatccacaactggctggcctggtatcagcagaagcctggcaaggcccctaagctgctgatctacggcgctacctctctggaaacaggcgtgcccagcagattttctggcagcggctctggcaccgacttcaccctgacaatatccagcctccagcctgaggacttcgccacctactactgccagcagtactggaccacacctttcaccttcggccagggcaccaaggtggaaatcaaaagactcgaggacctgaagaacgtgttcccacctgaggtggccgtgttcgagcctagcgaggccgagatcagccacacccagaaagccaccctcgtgtgcctggctaccggcttctaccccgaccatgtggaactgtcttggtgggtcaacggcaaagaggtgcacagcggcgtgtgtaccgacccccagccactgaaagaacagcccgccctgaacgacagccggtactgcctgagcagcagactgagagtgtccgccaccttctggcagaacccccggaaccacttcagatgccaggtgcagttctacggcctgagcgagaacgacgagtggacccaggacagagccaagcccgtgacccagatcgtgtctgccgaagcctggggcagagccgattgcggctttaccagcgagagctaccagcagggcgtgctgagcgccaccatcctgtacgagatcctgctgggcaaggccaccctgtacgccgtgctggtgtctgccctggtgctgatggctatggtcaagcggaaggacagccggggaagggccaagcgatctggatctggagcaacaaacttctcactactcaaacaagcaggtgacgtggaggagaatcccgggcctactagtgccaccatggactggatttggcgcatccttttccttgtcggcgctgctaccggcgcccattccttcgaagaagtgcagctggttgaatcaggtggcggcctggttcaacctggcggatctctgagactgagctgtgccgccagcggctacagcatcaccaatgactacgcctggaactgggtccgacaggcccctggaaaaggactggaatgggtcggatatatcagctactccggctacaccacctacaatcccagcatcaagagccggttcaccatcagcagagacaccagcaagaacaccctgtacctccagatgaactccctgagagccgaggacaccgccgtgtactattgtgccagatggaccagcggcctggactattggggacagggaacactggtcaccgtgtcctctacgcgtatccagaaccctgatcctgccgtgtaccagctgcgggatagcaagagcagcgacaagagcgtgtgtctgttcaccgacttcgacagccagaccaacgtgtcccagagcaaggactccgacgtgtacatcaccgataagtgcgtgctggacatgcggagcatggacttcaagagcaactccgccgtggcctggtccaacaagtccgatttcgcctgcgccaacgccttcaacaacagcattatccccgaggacacattcttcccaagccccgagagcagctgcgacgtgaagctggtggaaaagagcttcgagacagacaccaacctgaacttccagaacctgagcgtgatcggcttcagaatcctgctgctgaaagtggccggctttaacctgctgatgaccctgcggctgtggtccagctaa

SEQ ID NO: 38871 - DNA, 2289 bp, synthetic construct
  source 1..2289: mol_type = other DNA
atggccttaccagtgaccgccttgctcctgccgctggccttgctgctccacgccgccaggccggacatccagatgacacagagccctagcagcctgtctgccagcgtgggagacagagtgaccatcacatgcaaggccagcgacctgatccacaactggctggcctggtatcagcagaagcctggcaaggcccctaagctgctgatctacggcgctacctctctggaaacaggcgtgcccagcagattttctggcagcggctctggcaccgacttcaccctgacaatatccagcctccagcctgaggacttcgccacctactactgccagcagtactggaccacacctttcaccttcggccagggcaccaaggtggaaatcaaaagactcgaggacctgaagaacgtgttcccacctgaggtggccgtgttcgagcctagcgaggccgagatcagccacacccagaaagccaccctcgtgtgcctggctaccggcttctaccccgaccatgtggaactgtcttggtgggtcaacggcaaagaggtgcacagcggcgtgtgtaccgacccccagccactgaaagaacagcccgccctgaacgacagccggtactgcctgagcagcagactgagagtgtccgccaccttctggcagaacccccggaaccacttcagatgccaggtgcagttctacggcctgagcgagaacgacgagtggacccaggacagagccaagcccgtgacccagatcgtgtctgccgaagcctggggcagagccgattgcggctttaccagcgagagctaccagcagggcgtgctgagcgccaccatcctgtacgagatcctgctgggcaaggccaccctgtacgccgtgctggtgtctgccctggtgctgatggctatggtcaagcggaaggacagccggggaagggccaagcgatctggatctggagcaacaaacttctcactactcaaacaagcaggtgacgtggaggagaatcccgggcctactagtaccatggactggatttggcgcatccttttccttgtcggcgctgctaccggcgcccattccgggccccaagttcagctggtggaaagcggtggtggcgttgtgcaacctggtggaagtctgaggctgagctgtgccgcttctggcctgagctttagcacctacactgtggcctggttcaggcaggctcccggaaagggtcttgaaggcgtggccgccattccttacaccagccagcacatggtgtacacagacagcgtcagaggccggttcaccatcagcagagacaactccaagaatacgctctatctccagatgaactctctgcgcgccgaagatacagccgtgtattactgcgccaccgacagacggcctggcacctctatgctggctatcaacggctacaacagatggggacagggaaccaccgtgaccgtgtcatctggatccggcggcggaggatctggcggaggcggatctgggggcggaggctctttcgaagaagtgcagctggttgaatcaggtggcggcctggttcaacctggcggatctctgagactgagctgtgccgccagcggctacagcatcaccaatgactacgcctggaactgggtccgacaggcccctggaaaaggactggaatgggtcggatatatcagctactccggctacaccacctacaatcccagcatcaagagccggttcaccatcagcagagacaccagcaagaacaccctgtacctccagatgaactccctgagagccgaggacaccgccgtgtactattgtgccagatggaccagcggcctggactattggggacagggaacactggtcaccgtgtcctctacgcgtatccagaaccctgatcctgccgtgtaccagctgcgggatagcaagagcagcgacaagagcgtgtgtctgttcaccgacttcgacagccagaccaacgtgtcccagagcaaggactccgacgtgtacatcaccgataagtgcgtgctggacatgcggagcatggacttcaagagcaactccgccgtggcctggtccaacaagtccgatttcgcctgcgccaacgccttcaacaacagcattatccccgaggacacattcttcccaagccccgagagcagctgcgacgtgaagctggtggaaaagagcttcgagacagacaccaacctgaacttccagaacctgagcgtgatcggcttcagaatcctgctgctgaaagtggccggctttaacctgctgatgaccctgcggctgtggtccagctaa

SEQ ID NO: 38872 - DNA, 2295 bp, synthetic construct
  source 1..2295: mol_type = other DNA
atggccttaccagtgaccgccttgctcctgccgctggccttgctgctccacgccgccaggccggacatccagatgacacagagccctagcagcctgtctgccagcgtgggagacagagtgaccatcacatgcaaggccagcgacctgatccacaactggctggcctggtatcagcagaagcctggcaaggcccctaagctgctgatctacggcgctacctctctggaaacaggcgtgcccagcagattttctggcagcggctctggcaccgacttcaccctgacaatatccagcctccagcctgaggacttcgccacctactactgccagcagtactggaccacacctttcaccttcggccagggcaccaaggtggaaatcaaaagactcgaggacctgaagaacgtgttcccacctgaggtggccgtgttcgagcctagcgaggccgagatcagccacacccagaaagccaccctcgtgtgcctggctaccggcttctaccccgaccatgtggaactgtcttggtgggtcaacggcaaagaggtgcacagcggcgtgtgtaccgacccccagccactgaaagaacagcccgccctgaacgacagccggtactgcctgagcagcagactgagagtgtccgccaccttctggcagaacccccggaaccacttcagatgccaggtgcagttctacggcctgagcgagaacgacgagtggacccaggacagagccaagcccgtgacccagatcgtgtctgccgaagcctggggcagagccgattgcggctttaccagcgagagctaccagcagggcgtgctgagcgccaccatcctgtacgagatcctgctgggcaaggccaccctgtacgccgtgctggtgtctgccctggtgctgatggctatggtcaagcggaaggacagccggggaagggccaagcgatctggatctggagcaacaaacttctcactactcaaacaagcaggtgacgtggaggagaatcccgggcctactagtaccatggactggatttggcgcatccttttccttgtcggcgctgctaccggcgcccattccgggcccgaggtgcagctggttgaatctggcggaggatctgttcaggctggcggctctctgagactgtcttgtgccgccagcggctacacctacagcatcaactgcatgggctggttcagacaggcccctggcaaagagagagaaggcgttgccgccatctctaccggcggaggcagaaccgattaccgggattctgtgaagggcagattcaccatcagccaggacaacgccaagaacaccgtgtacctccagatgaacagcctgaagcctgaggacaccgccatgtactactgtgccggcaagaccacctatcctggctacggatgtggcctgggcagaagcgcctacaattattggggccagggcacccaagtgaccgtgtcatctggatccggcggcggaggatctggcggaggcggatctgggggcggaggctctttcgaagaagtgcagctggttgaatcaggtggcggcctggttcaacctggcggatctctgagactgagctgtgccgccagcggctacagcatcaccaatgactacgcctggaactgggtccgacaggcccctggaaaaggactggaatgggtcggatatatcagctactccggctacaccacctacaatcccagcatcaagagccggttcaccatcagcagagacaccagcaagaacaccctgtacctccagatgaactccctgagagccgaggacaccgccgtgtactattgtgccagatggaccagcggcctggactattggggacagggaacactggtcaccgtgtcctctacgcgtatccagaaccctgatcctgccgtgtaccagctgcgggatagcaagagcagcgacaagagcgtgtgtctgttcaccgacttcgacagccagaccaacgtgtcccagagcaaggactccgacgtgtacatcaccgataagtgcgtgctggacatgcggagcatggacttcaagagcaactccgccgtggcctggtccaacaagtccgatttcgcctgcgccaacgccttcaacaacagcattatccccgaggacacattcttcccaagccccgagagcagctgcgacgtgaagctggtggaaaagagcttcgagacagacaccaacctgaacttccagaacctgagcgtgatcggcttcagaatcctgctgctgaaagtggccggctttaacctgctgatgaccctgcggctgtggtccagctaa

SEQ ID NO: 38873 - DNA, 1851 bp, synthetic construct
  source 1..1851: mol_type = other DNA
atggccttaccagtgaccgccttgctcctgccgctggccttgctgctccacgccgccaggccggacatccagatgacacagagccctagcagcctgtctgccagcgtgggagacagagtgaccatcacatgcaaggccagcgacctgatccacaactggctggcctggtatcagcagaagcctggcaaggcccctaagctgctgatctacggcgctacctctctggaaacaggcgtgcccagcagattttctggcagcggctctggcaccgacttcaccctgacaatatccagcctccagcctgaggacttcgccacctactactgccagcagtactggaccacacctttcaccttcggccagggcaccaaggtggaaatcaaaagactcgaggacctgaagcacgtgttcccacctgaggtggccgtgttcgagcctagcgacgccgagatctggcacacccagaaagccaccctcgtgtgcctggctaccggcttctaccccgaccatgtggaactgtcttggtgggtcaacggcaaagaggtgcacagcggcgtgtctaccgacccccagccactgaaagaacagcccgccctgaacgacagccggtactgcctgagcagcagactgagagtgtccgccaccttctggcagaacccccggaaccacttcagatgccaggtgcagttctacggcctgagcgagaacgacgagtggacccaggacagagccaagcccgtgacccagatcgtgtctgccgaagcctggggcagagccgattgcggctttaccagcgagagctaccagcagggcgtgctgagcgccaccatcctgtacgagatcctgctgggcaaggccaccctgtacgccgtgctggtgtctgccctggtgctgatggctatggtcaagcggaaggacagccggggaagggccaagcgatctggatctggagcaacaaacttctcactactcaaacaagcaggtgacgtggaggagaatcccgggcctactagtatggactggatttggcgcatccttttccttgtcggcgctgctaccggcgcgcattccttcgaagaagtgcagctggttgaatcaggtggcggcctggttcaacctggcggatctctgagactgagctgtgccgccagcggctacagcatcaccaatgactacgcctggaactgggtccgacaggcccctggaaaaggactggaatgggtcggatatatcagctactccggctacaccacctacaatcccagcatcaagagccggttcaccatcagcagagacaccagcaagaacaccctgtacctccagatgaactccctgagagccgaggacaccgccgtgtactattgtgccagatggaccagcggcctggactattggggacagggaacactggtcaccgtgtcctctacgcgtatccagaaccctgatcctgccgtgtaccagctgcgggatagcaagagcagcgacaagagcgtgtgtctgttcaccgacttcgacagccagaccaacgtgtcccagagcaaggactccgacgtgtacatcaccgataagaccgtgctggacatgcggagcatggacttcaagagcaactccgccgtggcctggtccagcaagtccgatttcgcctgcgccaacgccttcaacaacagcattatccccgaggacacattcttcccaagccccgagatggcctgcgacgtgaagctggtggaaaagagcttcgagacagacaccaacctgaacttccagaacctgctcgtgatctggctgagaatcctgctgctgaaagtggccggctttaacctgctgatgaccctgcggctgtggtccagc

SEQ ID NO: 38874 - DNA, 1851 bp, synthetic construct
  source 1..1851: mol_type = other DNA
atggccttaccagtgaccgccttgctcctgccgctggccttgctgctccacgccgccaggccggacatccagatgacacagagccctagcagcctgtctgccagcgtgggagacagagtgaccatcacatgcaaggccagcgacctgatccacaactggctggcctggtatcagcagaagcctggcaaggcccctaagctgctgatctacggcgctacctctctggaaacaggcgtgcccagcagattttctggcagcggctctggcaccgacttcaccctgacaatatccagcctccagcctgaggacttcgccacctactactgccagcagtactggaccacacctttcaccttcggccagggcaccaaggtggaaatcaaaagactcgaggacctgaagcacgtgttcccacctgaggtggccgtgttcgagcctagcgacgccgagatctggcacacccagaaagccaccctcgtgtgcctggctaccggcttctaccccgaccatgtggaactgtcttggtgggtcaacggcaaagaggtgcacagcggcgtgtctaccgacccccagccactgaaagaacagcccgccctgaacgacagccggtactgcctgagcagcagactgagagtgtccgccaccttctggcagaacccccggaaccacttcagatgccaggtgcagttctacggcctgagcgagaacgacgagtggacccaggacagagccaagcccgtgacccagatcgtgtctgccgaagcctggggcagagccgattgcggctttaccagcgagagctaccagcagggcgtgctgagcgccaccatcctgtacgagatcctgctgggcaaggccaccctgtacgccgtgctggtgtctgccctggtgctgatggctatggtcaagcggaaggacagccggggaagggccaagcgatctggatctggagcaacaaacttctcactactcaaacaagcaggtgacgtggaggagaatcccgggcctactagtatggactggatttggcgcatccttttccttgtcggcgctgctaccggcgcgcattccttcgaagaagtgcagctggttgaatcaggtggcggcctggttcaacctggcggatctctgagactgagctgtgccgccagcggctacagcatcaccaatgactacgcctggaactgggtccgacaggcccctggaaaaggactggaatgggtcggatatatcagctactccggctacaccacctacaatcccagcatcaagagccggttcaccatcagcagagacaccagcaagaacaccctgtacctccagatgaactccctgagagccgaggacaccgccgtgtactattgtgccagatggaccagcggcctggactattggggacagggaacactggtcaccgtgtcctctacgcgtatccagaaccctgatcctgccgtgtaccagctgcgggatagcaagagcagcgacaagagcgtgtgtctgttcaccgacttcgacagccagaccaacgtgtcccagagcaaggactccgacgtgtacatcaccgataagaccgtgctggacatgcggagcatggacttcaagagcaactccgccgtggcctggtccaccaagtccgatttcgcctgcgccaacgccttcaacaacagcattatccccgaggacacattcttcccaagccccgaggtggtgtgcgacgtgaagctggtggaaaagagcttcgagacagacaccaacctgaacttccagaacctggtggtgatcggcgccagaatcctgctgctgaaagtggccggctttaacctgctgatgaccctgcggctgtggtccagc

SEQ ID NO: 38875 - DNA, 1851 bp, synthetic construct
  source 1..1851: mol_type = other DNA
atggccttaccagtgaccgccttgctcctgccgctggccttgctgctccacgccgccaggccggacatccagatgacacagagccctagcagcctgtctgccagcgtgggagacagagtgaccatcacatgcaaggccagcgacctgatccacaactggctggcctggtatcagcagaagcctggcaaggcccctaagctgctgatctacggcgctacctctctggaaacaggcgtgcccagcagattttctggcagcggctctggcaccgacttcaccctgacaatatccagcctccagcctgaggacttcgccacctactactgccagcagtactggaccacacctttcaccttcggccagggcaccaaggtggaaatcaaaagactcgaggacctgaagaacgtgttcccacctgaggtggccgtgttcgagcctagcaaggccgagatcagcagaacccagaaagccaccctcgtgtgcctggctaccggcttctaccctcctcatgtggaactgtcttggtgggtcaacggcaaagaggtgcacgacggcgtgtgtaccgacccccagccactgaaagaacagcccgccctgaacgacagccggtactgcctgagcagcagactgagagtgtccgccaccttctggcagaacccccggaaccacttcagatgccaggtgcagttctacggcctgagcgagaacgacgagtggacccaggacagagccaagcccgtgacccagatcgtgtctgccgaagcctggggcagagccgattgcggctttaccagcgagagctaccagcagggcgtgctgagcgccaccatcctgtacgagatcctgctgggcaaggccaccctgtacgccgtgctggtgtctgccctggtgctgatggctatggtcaagcggaaggacagccggggaagggccaagcgatctggatctggagcaacaaacttctcactactcaaacaagcaggtgacgtggaggagaatcccgggcctactagtatggactggatttggcgcatccttttccttgtcggcgctgctaccggcgcgcattccttcgaagaagtgcagctggttgaatcaggtggcggcctggttcaacctggcggatctctgagactgagctgtgccgccagcggctacagcatcaccaatgactacgcctggaactgggtccgacaggcccctggaaaaggactggaatgggtcggatatatcagctactccggctacaccacctacaatcccagcatcaagagccggttcaccatcagcagagacaccagcaagaacaccctgtacctccagatgaactccctgagagccgaggacaccgccgtgtactattgtgccagatggaccagcggcctggactattggggacagggaacactggtcaccgtgtcctctacgcgtatccagaaccctgatcctgccgtgtaccagctgcgggatagcaagagcagcgacaagttcgtgtgtctgttcaccgacttcgacagccagatcaacgtgtcccagagcaaggactccgacgtgtacatcaccgataagtgcgtgctggacatgcggagcatggacttcaagagcaactccgccgtggcctggtccaacaagtccgatttcacctgcgccaacgccttcaacaacagcattatccccgaggacacattcttcccaagccccgagagcagctgcgacgtgaagctggtggaaaagagcttcgagacagacaccaacctgaacttccagaacctgagcgtgatcggcttcagaatcctgctgctgaaagtggccggctttaacctgctgatgaccctgcggctgtggtccagc

SEQ ID NO: 38876 - DNA, 2277 bp, synthetic construct
  source 1..2277: mol_type = other DNA
atggccttaccagtgaccgccttgctcctgccgctggccttgctgctccacgccgccaggccggacatccagatgacacagagccctagcagcctgtctgccagcgtgggagacagagtgaccatcacatgcaaggccagcgacctgatccacaactggctggcctggtatcagcagaagcctggcaaggcccctaagctgctgatctacggcgctacctctctggaaacaggcgtgcccagcagattttctggcagcggctctggcaccgacttcaccctgacaatatccagcctccagcctgaggacttcgccacctactactgccagcagtactggaccacacctttcaccttcggccagggcaccaaggtggaaatcaaaagactcgaggacctgaagaacgtgttcccacctgaggtggccgtgttcgagcctagcgaggccgagatcagccacacccagaaagccaccctcgtgtgcctggctaccggcttctaccccgaccatgtggaactgtcttggtgggtcaacggcaaagaggtgcacagcggcgtgtgtaccgacccccagccactgaaagaacagcccgccctgaacgacagccggtactgcctgagcagcagactgagagtgtccgccaccttctggcagaacccccggaaccacttcagatgccaggtgcagttctacggcctgagcgagaacgacgagtggacccaggacagagccaagcccgtgacccagatcgtgtctgccgaagcctggggcagagccgattgcggctttaccagcgagagctaccagcagggcgtgctgagcgccaccatcctgtacgagatcctgctgggcaaggccaccctgtacgccgtgctggtgtctgccctggtgctgatggctatggtcaagcggaaggacagccggggaagggccaagcgatctggatctggagcaacaaacttctcactactcaaacaagcaggtgacgtggaggagaatcccgggcctactagtaccatggactggatttggcgcatccttttccttgtcggcgctgctaccggcgcccattccgggccccaggtgcagctccaagaaagcggacccggactggttaagccctctcagaccctgtctctgacctgcacagttagcggagccagcattaccacaggcgagtattattggaattggtttcggcagccaccaggcaaggggcttgagtggatgggtgctattgctgcctctggcagcaccacctactctcccagctttgagagcagaacctccatcagccgggacacctccaaaaaccagttctctctgaagctgtcctccgtgaccgctgctgacaccgccgtctattattgtggccggtctttcggcgtggcagctgtgaccacaggacagaacagaggccagggaacacttgtgaccgtgtcctctggatccggcggcggaggatctggcggaggcggatctgggggcggaggctctttcgaagaagtgcagctggttgaatcaggtggcggcctggttcaacctggcggatctctgagactgagctgtgccgccagcggctacagcatcaccaatgactacgcctggaactgggtccgacaggcccctggaaaaggactggaatgggtcggatatatcagctactccggctacaccacctacaatcccagcatcaagagccggttcaccatcagcagagacaccagcaagaacaccctgtacctccagatgaactccctgagagccgaggacaccgccgtgtactattgtgccagatggaccagcggcctggactattggggacagggaacactggtcaccgtgtcctctacgcgtatccagaaccctgatcctgccgtgtaccagctgcgggatagcaagagcagcgacaagagcgtgtgtctgttcaccgacttcgacagccagaccaacgtgtcccagagcaaggactccgacgtgtacatcaccgataagtgcgtgctggacatgcggagcatggacttcaagagcaactccgccgtggcctggtccaacaagtccgatttcgcctgcgccaacgccttcaacaacagcattatccccgaggacacattcttcccaagccccgagagcagctgcgacgtgaagctggtggaaaagagcttcgagacagacaccaacctgaacttccagaacctgagcgtgatcggcttcagaatcctgctgctgaaagtggccggctttaacctgctgatgaccctgcggctgtggtccagc

SEQ ID NO: 38877 - DNA, 2700 bp, synthetic construct
  source 1..2700: mol_type = other DNA
atggccttaccagtgaccgccttgctcctgccgctggccttgctgctccacgccgccaggccgcaggttcagctgcaagagtctggccctggcctggtcaagcctagccaaacactgagcctgacctgtaccgtgtctggcggctctatcaccaccggcgagttctactggaactggttcagacagcctcctggcaaaggactggaatggatgggagccattgccgccagcggcagcacaacatacagccctagcttcgagagccggaccagcatcagcagagacaccagcaagaatcagttcagcctgaagctgagcagcgtgacagccgccgatacagccgtgtattactgcggcagatcctttggagtggccgccgtgacaaccggccagaatagaggacagggcaccctggtcacagtgtctagcggtaccggcggaggcggatctggcggcggaggtagcggtggcggaggatctgaattcgacatccagatgacacagagccctagcagcctgtctgccagcgtgggagacagagtgaccatcacatgcaaggccagcgacctgatccacaactggctggcctggtatcagcagaagcctggcaaggcccctaagctgctgatctacggcgctacctctctggaaacaggcgtgcccagcagattttctggcagcggctctggcaccgacttcaccctgacaatatccagcctccagcctgaggacttcgccacctactactgccagcagtactggaccacacctttcaccttcggccagggcaccaaggtggaaatcaaaagactcgagatccagaaccctgatcctgccgtgtaccagctgcgggatagcaagagcagcgacaagagcgtgtgtctgttcaccgacttcgacagccagaccaacgtgtcccagagcaaggactccgacgtgtacatcaccgataagtgcgtgctggacatgcggagcatggacttcaagagcaactccgccgtggcctggtccaacaagtccgatttcgcctgcgccaacgccttcaacaacagcattatccccgaggacacattcttcccaagcagcgacgtgccctgcgacgtgaagctggtggaaaagagcttcgagacagacaccaacctgaacttccagaacctgagcgtgatcggcttcagaatcctgctgctgaaagtggccggctttaacctgctgatgaccctgcggctgtggtccagccgcgccaagagaagcggatctggcgtgaagcagaccctgaatttcgacctgctgaagctggctggcgacgtggaatccaacccaggccctactagtaccatggactggatttggcgcatccttttccttgtcggcgctgctaccggcgcccattccgggcccgaagtgcaactggttgaatccggtggcggcctggtgcaacccggcggatctctcagacttagctgtgccgcctccggcagaaccttcacaatgggatggtacaggcaggctccagggaaagagagagagttcgtcgccgccatctctctgtctcccacactggcctactacgccgactctgtgaaaggccggttcaccatctccagagataatagcaagaacaccgtggtgctgcaaatgaactctctgagagccgaggatacagccctgtactattgtgccgctgaccggaagtccgtgatgagcatcagacccgattactggggacagggcacactggtcacagtgtctagtggatccggcggcggaggatctggcggaggcggatctgggggcggaggctctttcgaagaagtgcagctggttgaatcaggtggcggcctggttcaacctggcggatctctgagactgagctgtgccgccagcggctacagcatcaccaatgactacgcctggaactgggtccgacaggcccctggaaaaggactggaatgggtcggatatatcagctactccggctacaccacctacaatcccagcatcaagagccggttcaccatcagcagagacaccagcaagaacaccctgtacctccagatgaactccctgagagccgaggacaccgccgtgtactattgtgccagatggaccagcggcctggactattggggacagggaacactggtcaccgtgtcctctacgcgtgaggacctgaagaacgtgttcccacctgaggtggccgtgttcgagcctagcaaggccgagatcgcccacacccagaaagccaccctcgtgtgcctggctaccggcttctaccccgaccatgtggaactgtcttggtgggtcaacggcaaagaggtgcacagcggcgtgtgtaccgacccccagccactgaaagaacagcccgccctgaacgacagccggtactgcctgagcagcagactgagagtgtccgccaccttctggcagaacccccggaaccacttcagatgccaggtgcagttctacggcctgagcgagaacgacgagtggacccaggacagagccaagcccgtgacccagatcgtgtctgccgaagcctggggcagagccgattgcggcatcaccagcgccagctaccaccagggcgtgctgagcgccaccatcctgtacgagatcctgctgggcaaggccaccctgtacgccgtgctggtgtctgccctggtgctgatggctatggtcaagcggaaggacagccgggga

SEQ ID NO: 38878 - DNA, 2289 bp, synthetic construct
  source 1..2289: mol_type = other DNA
atggccttaccagtgaccgccttgctcctgccgctggccttgctgctccacgccgccaggccgcaggttcagctgcaagagtctggccctggcctggtcaagcctagccaaacactgagcctgacctgtaccgtgtctggcggctctatcaccaccggcgagttctactggaactggttcagacagcctcctggcaaaggactggaatggatgggagccattgccgccagcggcagcacaacatacagccctagcttcgagagccggaccagcatcagcagagacaccagcaagaatcagttcagcctgaagctgagcagcgtgacagccgccgatacagccgtgtattactgcggcagatcctttggagtggccgccgtgacaaccggccagaatagaggacagggcaccctggtcacagtgtctagcggtaccggcggaggcggatctggcggcggaggtagcggtggcggaggatctgaattcgacatccagatgacacagagccctagcagcctgtctgccagcgtgggagacagagtgaccatcacatgcaaggccagcgacctgatccacaactggctggcctggtatcagcagaagcctggcaaggcccctaagctgctgatctacggcgctacctctctggaaacaggcgtgcccagcagattttctggcagcggctctggcaccgacttcaccctgacaatatccagcctccagcctgaggacttcgccacctactactgccagcagtactggaccacacctttcaccttcggccagggcaccaaggtggaaatcaaaagactcgagatccagaaccctgatcctgccgtgtaccagctgcgggatagcaagagcagcgacaagagcgtgtgtctgttcaccgacttcgacagccagaccaacgtgtcccagagcaaggactccgacgtgtacatcaccgataagtgcgtgctggacatgcggagcatggacttcaagagcaactccgccgtggcctggtccaacaagtccgatttcgcctgcgccaacgccttcaacaacagcattatccccgaggacacattcttcccaagcagcgacgtgccctgcgacgtgaagctggtggaaaagagcttcgagacagacaccaacctgaacttccagaacctgagcgtgatcggcttcagaatcctgctgctgaaagtggccggctttaacctgctgatgaccctgcggctgtggtccagccgcgccaagagaagcggatctggcgtgaagcagaccctgaatttcgacctgctgaagctggctggcgacgtggaatccaacccaggccctactagtaccatggactggatttggcgcatccttttccttgtcggcgctgctaccggcgcccattccttcgaagaagtgcagctggttgaatcaggtggcggcctggttcaacctggcggatctctgagactgagctgtgccgccagcggctacagcatcaccaatgactacgcctggaactgggtccgacaggcccctggaaaaggactggaatgggtcggatatatcagctactccggctacaccacctacaatcccagcatcaagagccggttcaccatcagcagagacaccagcaagaacaccctgtacctccagatgaactccctgagagccgaggacaccgccgtgtactattgtgccagatggaccagcggcctggactattggggacagggaacactggtcaccgtgtcctctacgcgtgaggacctgaagaacgtgttcccacctgaggtggccgtgttcgagcctagcaaggccgagatcgcccacacccagaaagccaccctcgtgtgcctggctaccggcttctaccccgaccatgtggaactgtcttggtgggtcaacggcaaagaggtgcacagcggcgtgtgtaccgacccccagccactgaaagaacagcccgccctgaacgacagccggtactgcctgagcagcagactgagagtgtccgccaccttctggcagaacccccggaaccacttcagatgccaggtgcagttctacggcctgagcgagaacgacgagtggacccaggacagagccaagcccgtgacccagatcgtgtctgccgaagcctggggcagagccgattgcggcatcaccagcgccagctaccaccagggcgtgctgagcgccaccatcctgtacgagatcctgctgggcaaggccaccctgtacgccgtgctggtgtctgccctggtgctgatggctatggtcaagcggaaggacagccgggga

SEQ ID NO: 38879 - DNA, 2688 bp, synthetic construct
  source 1..2688: mol_type = other DNA
atggccttaccagtgaccgccttgctcctgccgctggccttgctgctccacgccgccaggccggaagtgcagctggttgaatctggcggaggactggttcaggctggcggatctctgagactgtcttgtgccgccagcggcagaacctttagcatgggctggtttagacaggcccctggcaaagagagagagttcgtcgccgccatcacatactctggcggcagcccttactacgccgactctgtgaagggcagattcaccatcagccgggacaacgccaagaacaccgtgtacctccagatgaacagcctgaagcctgaggacaccgccgtgtactactgcgccgccaatccaacatacggcagcgactggaacgccgagaattggggccagggaacccaagtgacagtgtctagcggtaccggcggaggcggatctggcggcggaggtagcggtggcggaggatctgaattcgacatccagatgacacagagccctagcagcctgtctgccagcgtgggagacagagtgaccatcacatgcaaggccagcgacctgatccacaactggctggcctggtatcagcagaagcctggcaaggcccctaagctgctgatctacggcgctacctctctggaaacaggcgtgcccagcagattttctggcagcggctctggcaccgacttcaccctgacaatatccagcctccagcctgaggacttcgccacctactactgccagcagtactggaccacacctttcaccttcggccagggcaccaaggtggaaatcaaaagactcgaggacctgaagaacgtgttcccacctgaggtggccgtgttcgagcctagcgaggccgagatcagccacacccagaaagccaccctcgtgtgcctggctaccggcttctaccccgaccatgtggaactgtcttggtgggtcaacggcaaagaggtgcacagcggcgtgtgtaccgacccccagccactgaaagaacagcccgccctgaacgacagccggtactgcctgagcagcagactgagagtgtccgccaccttctggcagaacccccggaaccacttcagatgccaggtgcagttctacggcctgagcgagaacgacgagtggacccaggacagagccaagcccgtgacccagatcgtgtctgccgaagcctggggcagagccgattgcggctttaccagcgagagctaccagcagggcgtgctgagcgccaccatcctgtacgagatcctgctgggcaaggccaccctgtacgccgtgctggtgtctgccctggtgctgatggctatggtcaagcggaaggacagccggggaagggccaagcgatctggatctggagcaacaaacttctcactactcaaacaagcaggtgacgtggaggagaatcccgggcctactagtaccatggactggatttggcgcatccttttccttgtcggcgctgctaccggcgcccattccgggccccaggtgcagctccaagaaagcggacccggactggttaagccctctcagaccctgtctctgacctgcacagttagcggagccagcattaccacaggcgagtattattggaattggtttcggcagccaccaggcaaggggcttgagtggatgggtgctattgctgcctctggcagcaccacctactctcccagctttgagagcagaacctccatcagccgggacacctccaaaaaccagttctctctgaagctgtcctccgtgaccgctgctgacaccgccgtctattattgtggccggtctttcggcgtggcagctgtgaccacaggacagaacagaggccagggaacacttgtgaccgtgtcctctggatccggcggcggaggatctggcggaggcggatctgggggcggaggctctttcgaagaagtgcagctggttgaatcaggtggcggcctggttcaacctggcggatctctgagactgagctgtgccgccagcggctacagcatcaccaatgactacgcctggaactgggtccgacaggcccctggaaaaggactggaatgggtcggatatatcagctactccggctacaccacctacaatcccagcatcaagagccggttcaccatcagcagagacaccagcaagaacaccctgtacctccagatgaactccctgagagccgaggacaccgccgtgtactattgtgccagatggaccagcggcctggactattggggacagggaacactggtcaccgtgtcctctacgcgtatccagaaccctgatcctgccgtgtaccagctgcgggatagcaagagcagcgacaagagcgtgtgtctgttcaccgacttcgacagccagaccaacgtgtcccagagcaaggactccgacgtgtacatcaccgataagtgcgtgctggacatgcggagcatggacttcaagagcaactccgccgtggcctggtccaacaagtccgatttcgcctgcgccaacgccttcaacaacagcattatccccgaggacacattcttcccaagccccgagagcagctgcgacgtgaagctggtggaaaagagcttcgagacagacaccaacctgaacttccagaacctgagcgtgatcggcttcagaatcctgctgctgaaagtggccggctttaacctgctgatgaccctgcggctgtggtccagc

SEQ ID NO: 38880 - DNA, 2709 bp, synthetic construct
  source 1..2709: mol_type = other DNA
atggccttaccagtgaccgccttgctcctgccgctggccttgctgctccacgccgccaggccggaagtgcagctggttgaatctggcggaggactggttcaggctggcggatctctgagactgtcttgtgccgccagcggcagaacctttagcatgggctggtttagacaggcccctggcaaagagagagagttcgtcgccgccatcacatactctggcggcagcccttactacgccgactctgtgaagggcagattcaccatcagccgggacaacgccaagaacaccgtgtacctccagatgaacagcctgaagcctgaggacaccgccgtgtactactgcgccgccaatccaacatacggcagcgactggaacgccgagaattggggccagggaacccaagtgacagtgtctagcggtaccggcggaggcggatctggcggcggaggtagcggtggcggaggatctgaattcgacatccagatgacacagagccctagcagcctgtctgccagcgtgggagacagagtgaccatcacatgcaaggccagcgacctgatccacaactggctggcctggtatcagcagaagcctggcaaggcccctaagctgctgatctacggcgctacctctctggaaacaggcgtgcccagcagattttctggcagcggctctggcaccgacttcaccctgacaatatccagcctccagcctgaggacttcgccacctactactgccagcagtactggaccacacctttcaccttcggccagggcaccaaggtggaaatcaaaagactcgagatccagaaccctgatcctgccgtgtaccagctgcgggatagcaagagcagcgacaagagcgtgtgtctgttcaccgacttcgacagccagaccaacgtgtcccagagcaaggactccgacgtgtacatcaccgataagtgcgtgctggacatgcggagcatggacttcaagagcaactccgccgtggcctggtccaacaagtccgatttcgcctgcgccaacgccttcaacaacagcattatccccgaggacacattcttcccaagcagcgacgtgccctgcgacgtgaagctggtggaaaagagcttcgagacagacaccaacctgaacttccagaacctgagcgtgatcggcttcagaatcctgctgctgaaagtggccggctttaacctgctgatgaccctgcggctgtggtccagccgcgccaagagaagcggatctggcgtgaagcagaccctgaatttcgacctgctgaagctggctggcgacgtggaatccaacccaggccctactagtaccatggactggatttggcgcatccttttccttgtcggcgctgctaccggcgcccattccgggccccaggtgcagctggttgaatctggcggaggactggttcagcctggcggatctctgagactgtcttgtgccgccagcggcaacatcaacagcagaaactgcatgggctggttcagacaggcccctggcaagggaagagaaggcgtggcagctatcggccaagtgaccggcagaacctactacgtggacagcgtgaagggcagattcaccatcagcctggacaacagcaagaacaccctgtacctccagatgaacagcctgagagccgaggacaccgccgtgtactattgtgctgctgcccctggctgtctgctgtctgcacttagaagcgccgactacagaaactggggccagggcacactggtcaccgtttcttctggatccggcggcggaggatctggcggaggcggatctgggggcggaggctctttcgaagaagtgcagctggttgaatcaggtggcggcctggttcaacctggcggatctctgagactgagctgtgccgccagcggctacagcatcaccaatgactacgcctggaactgggtccgacaggcccctggaaaaggactggaatgggtcggatatatcagctactccggctacaccacctacaatcccagcatcaagagccggttcaccatcagcagagacaccagcaagaacaccctgtacctccagatgaactccctgagagccgaggacaccgccgtgtactattgtgccagatggaccagcggcctggactattggggacagggaacactggtcaccgtgtcctctacgcgtgaggacctgaagaacgtgttcccacctgaggtggccgtgttcgagcctagcaaggccgagatcgcccacacccagaaagccaccctcgtgtgcctggctaccggcttctaccccgaccatgtggaactgtcttggtgggtcaacggcaaagaggtgcacagcggcgtgtgtaccgacccccagccactgaaagaacagcccgccctgaacgacagccggtactgcctgagcagcagactgagagtgtccgccaccttctggcagaacccccggaaccacttcagatgccaggtgcagttctacggcctgagcgagaacgacgagtggacccaggacagagccaagcccgtgacccagatcgtgtctgccgaagcctggggcagagccgattgcggcatcaccagcgccagctaccaccagggcgtgctgagcgccaccatcctgtacgagatcctgctgggcaaggccaccctgtacgccgtgctggtgtctgccctggtgctgatggctatggtcaagcggaaggacagccgggga

SEQ ID NO: 38881 - DNA, 2697 bp, synthetic construct
  source 1..2697: mol_type = other DNA
atggccttaccagtgaccgccttgctcctgccgctggccttgctgctccacgccgccaggccggaagtgcagctggttgaatctggcggaggactggttcaggctggcggatctctgagactgtcttgtgccgccagcggcagaacctttagcatgggctggtttagacaggcccctggcaaagagagagagttcgtcgccgccatcacatactctggcggcagcccttactacgccgactctgtgaagggcagattcaccatcagccgggacaacgccaagaacaccgtgtacctccagatgaacagcctgaagcctgaggacaccgccgtgtactactgcgccgccaatccaacatacggcagcgactggaacgccgagaattggggccagggaacccaagtgacagtgtctagcggtaccggcggaggcggatctggcggcggaggtagcggtggcggaggatctgaattcgacatccagatgacacagagccctagcagcctgtctgccagcgtgggagacagagtgaccatcacatgcaaggccagcgacctgatccacaactggctggcctggtatcagcagaagcctggcaaggcccctaagctgctgatctacggcgctacctctctggaaacaggcgtgcccagcagattttctggcagcggctctggcaccgacttcaccctgacaatatccagcctccagcctgaggacttcgccacctactactgccagcagtactggaccacacctttcaccttcggccagggcaccaaggtggaaatcaaaagactcgaggacctgaagaacgtgttcccacctgaggtggccgtgttcgagcctagcgaggccgagatcagccacacccagaaagccaccctcgtgtgcctggctaccggcttctaccccgaccatgtggaactgtcttggtgggtcaacggcaaagaggtgcacagcggcgtgtgtaccgacccccagccactgaaagaacagcccgccctgaacgacagccggtactgcctgagcagcagactgagagtgtccgccaccttctggcagaacccccggaaccacttcagatgccaggtgcagttctacggcctgagcgagaacgacgagtggacccaggacagagccaagcccgtgacccagatcgtgtctgccgaagcctggggcagagccgattgcggctttaccagcgagagctaccagcagggcgtgctgagcgccaccatcctgtacgagatcctgctgggcaaggccaccctgtacgccgtgctggtgtctgccctggtgctgatggctatggtcaagcggaaggacagccggggaagggccaagcgatctggatctggagcaacaaacttctcactactcaaacaagcaggtgacgtggaggagaatcccgggcctactagtaccatggactggatttggcgcatccttttccttgtcggcgctgctaccggcgcccattccgggccccaggtgcagctggttgaatctggcggaggactggttcagcctggcggatctctgagactgtcttgtgccgccagcggcaacatcaacagcagaaactgcatgggctggttcagacaggcccctggcaagggaagagaaggcgtggcagctatcggccaagtgaccggcagaacctactacgtggacagcgtgaagggcagattcaccatcagcctggacaacagcaagaacaccctgtacctccagatgaacagcctgagagccgaggacaccgccgtgtactattgtgctgctgcccctggctgtctgctgtctgcacttagaagcgccgactacagaaactggggccagggcacactggtcaccgtttcttctggatccggcggcggaggatctggcggaggcggatctgggggcggaggctctttcgaagaagtgcagctggttgaatcaggtggcggcctggttcaacctggcggatctctgagactgagctgtgccgccagcggctacagcatcaccaatgactacgcctggaactgggtccgacaggcccctggaaaaggactggaatgggtcggatatatcagctactccggctacaccacctacaatcccagcatcaagagccggttcaccatcagcagagacaccagcaagaacaccctgtacctccagatgaactccctgagagccgaggacaccgccgtgtactattgtgccagatggaccagcggcctggactattggggacagggaacactggtcaccgtgtcctctacgcgtatccagaaccctgatcctgccgtgtaccagctgcgggatagcaagagcagcgacaagagcgtgtgtctgttcaccgacttcgacagccagaccaacgtgtcccagagcaaggactccgacgtgtacatcaccgataagtgcgtgctggacatgcggagcatggacttcaagagcaactccgccgtggcctggtccaacaagtccgatttcgcctgcgccaacgccttcaacaacagcattatccccgaggacacattcttcccaagccccgagagcagctgcgacgtgaagctggtggaaaagagcttcgagacagacaccaacctgaacttccagaacctgagcgtgatcggcttcagaatcctgctgctgaaagtggccggctttaacctgctgatgaccctgcggctgtggtccagc

SEQ ID NO: 38882 - DNA, 2697 bp, synthetic construct
  source 1..2697: mol_type = other DNA
atggccttaccagtgaccgccttgctcctgccgctggccttgctgctccacgccgccaggccggaagtgcaactggttgaatccggtggcggcctggtgcaagcaggcggatctctcagacttagctgtgccgcctccggcagaaccttcacaatgggatggtttaggcaggctccagggaaagagagagagttcgtcgccgccatctctctgtctcccacactggcctactacgccgactctgtgaaaggccggttcaccatctccagagataatgccaagaacaccgtggtgctgcaaatgaactctctgaaacccgaggatacagccctgtactattgtgccgctgaccggaagtccgtgatgagcatcagacccgattactggggacagggcacacaagtcacagtgtcctctggtaccggcggaggcggatctggcggcggaggtagcggtggcggaggatctgaattcgacatccagatgacacagagccctagcagcctgtctgccagcgtgggagacagagtgaccatcacatgcaaggccagcgacctgatccacaactggctggcctggtatcagcagaagcctggcaaggcccctaagctgctgatctacggcgctacctctctggaaacaggcgtgcccagcagattttctggcagcggctctggcaccgacttcaccctgacaatatccagcctccagcctgaggacttcgccacctactactgccagcagtactggaccacacctttcaccttcggccagggcaccaaggtggaaatcaaaagactcgaggacctgaagaacgtgttcccacctgaggtggccgtgttcgagcctagcgaggccgagatcagccacacccagaaagccaccctcgtgtgcctggctaccggcttctaccccgaccatgtggaactgtcttggtgggtcaacggcaaagaggtgcacagcggcgtgtgtaccgacccccagccactgaaagaacagcccgccctgaacgacagccggtactgcctgagcagcagactgagagtgtccgccaccttctggcagaacccccggaaccacttcagatgccaggtgcagttctacggcctgagcgagaacgacgagtggacccaggacagagccaagcccgtgacccagatcgtgtctgccgaagcctggggcagagccgattgcggctttaccagcgagagctaccagcagggcgtgctgagcgccaccatcctgtacgagatcctgctgggcaaggccaccctgtacgccgtgctggtgtctgccctggtgctgatggctatggtcaagcggaaggacagccggggaagggccaagcgatctggatctggagcaacaaacttctcactactcaaacaagcaggtgacgtggaggagaatcccgggcctactagtaccatggactggatttggcgcatccttttccttgtcggcgctgctaccggcgcccattccgggccccaggtgcagctggttgaatctggcggaggactggttcagcctggcggatctctgagactgtcttgtgccgccagcggcaacatcaacagcagaaactgcatgggctggttcagacaggcccctggcaagggaagagaaggcgtggcagctatcggccaagtgaccggcagaacctactacgtggacagcgtgaagggcagattcaccatcagcctggacaacagcaagaacaccctgtacctccagatgaacagcctgagagccgaggacaccgccgtgtactattgtgctgctgcccctggctgtctgctgtctgcacttagaagcgccgactacagaaactggggccagggcacactggtcaccgtttcttctggatccggcggcggaggatctggcggaggcggatctgggggcggaggctctttcgaagaagtgcagctggttgaatcaggtggcggcctggttcaacctggcggatctctgagactgagctgtgccgccagcggctacagcatcaccaatgactacgcctggaactgggtccgacaggcccctggaaaaggactggaatgggtcggatatatcagctactccggctacaccacctacaatcccagcatcaagagccggttcaccatcagcagagacaccagcaagaacaccctgtacctccagatgaactccctgagagccgaggacaccgccgtgtactattgtgccagatggaccagcggcctggactattggggacagggaacactggtcaccgtgtcctctacgcgtatccagaaccctgatcctgccgtgtaccagctgcgggatagcaagagcagcgacaagagcgtgtgtctgttcaccgacttcgacagccagaccaacgtgtcccagagcaaggactccgacgtgtacatcaccgataagtgcgtgctggacatgcggagcatggacttcaagagcaactccgccgtggcctggtccaacaagtccgatttcgcctgcgccaacgccttcaacaacagcattatccccgaggacacattcttcccaagccccgagagcagctgcgacgtgaagctggtggaaaagagcttcgagacagacaccaacctgaacttccagaacctgagcgtgatcggcttcagaatcctgctgctgaaagtggccggctttaacctgctgatgaccctgcggctgtggtccagc

SEQ ID NO: 38883 - DNA, 2709 bp, synthetic construct
  source 1..2709: mol_type = other DNA
atggccttaccagtgaccgccttgctcctgccgctggccttgctgctccacgccgccaggccgcaggttcagctgcaagagtctggccctggcctggtcaagcctagccaaacactgagcctgacctgtaccgtgtctggcggctctatcaccaccggcgagttctactggaactggttcagacagcctcctggcaaaggactggaatggatgggagccattgccgccagcggcagcacaacatacagccctagcttcgagagccggaccagcatcagcagagacaccagcaagaatcagttcagcctgaagctgagcagcgtgacagccgccgatacagccgtgtattactgcggcagatcctttggagtggccgccgtgacaaccggccagaatagaggacagggcaccctggtcacagtgtctagcggtaccggcggaggcggatctggcggcggaggtagcggtggcggaggatctgaattcgacatccagatgacacagagccctagcagcctgtctgccagcgtgggagacagagtgaccatcacatgcaaggccagcgacctgatccacaactggctggcctggtatcagcagaagcctggcaaggcccctaagctgctgatctacggcgctacctctctggaaacaggcgtgcccagcagattttctggcagcggctctggcaccgacttcaccctgacaatatccagcctccagcctgaggacttcgccacctactactgccagcagtactggaccacacctttcaccttcggccagggcaccaaggtggaaatcaaaagactcgaggacctgaagaacgtgttcccacctgaggtggccgtgttcgagcctagcgaggccgagatcagccacacccagaaagccaccctcgtgtgcctggctaccggcttctaccccgaccatgtggaactgtcttggtgggtcaacggcaaagaggtgcacagcggcgtgtgtaccgacccccagccactgaaagaacagcccgccctgaacgacagccggtactgcctgagcagcagactgagagtgtccgccaccttctggcagaacccccggaaccacttcagatgccaggtgcagttctacggcctgagcgagaacgacgagtggacccaggacagagccaagcccgtgacccagatcgtgtctgccgaagcctggggcagagccgattgcggctttaccagcgagagctaccagcagggcgtgctgagcgccaccatcctgtacgagatcctgctgggcaaggccaccctgtacgccgtgctggtgtctgccctggtgctgatggctatggtcaagcggaaggacagccggggaagggccaagcgatctggatctggagcaacaaacttctcactactcaaacaagcaggtgacgtggaggagaatcccgggcctactagtaccatggactggatttggcgcatccttttccttgtcggcgctgctaccggcgcccattccgggccccaggtgcagctggttgaatctggcggaggactggttcagcctggcggatctctgagactgtcttgtgccgccagcggcaacatcaacagcagaaactgcatgggctggttcagacaggcccctggcaagggaagagaaggcgtggcagctatcggccaagtgaccggcagaacctactacgtggacagcgtgaagggcagattcaccatcagcctggacaacagcaagaacaccctgtacctccagatgaacagcctgagagccgaggacaccgccgtgtactattgtgctgctgcccctggctgtctgctgtctgcacttagaagcgccgactacagaaactggggccagggcacactggtcaccgtttcttctggatccggcggcggaggatctggcggaggcggatctgggggcggaggctctttcgaagaagtgcagctggttgaatcaggtggcggcctggttcaacctggcggatctctgagactgagctgtgccgccagcggctacagcatcaccaatgactacgcctggaactgggtccgacaggcccctggaaaaggactggaatgggtcggatatatcagctactccggctacaccacctacaatcccagcatcaagagccggttcaccatcagcagagacaccagcaagaacaccctgtacctccagatgaactccctgagagccgaggacaccgccgtgtactattgtgccagatggaccagcggcctggactattggggacagggaacactggtcaccgtgtcctctacgcgtatccagaaccctgatcctgccgtgtaccagctgcgggatagcaagagcagcgacaagagcgtgtgtctgttcaccgacttcgacagccagaccaacgtgtcccagagcaaggactccgacgtgtacatcaccgataagtgcgtgctggacatgcggagcatggacttcaagagcaactccgccgtggcctggtccaacaagtccgatttcgcctgcgccaacgccttcaacaacagcattatccccgaggacacattcttcccaagccccgagagcagctgcgacgtgaagctggtggaaaagagcttcgagacagacaccaacctgaacttccagaacctgagcgtgatcggcttcagaatcctgctgctgaaagtggccggctttaacctgctgatgaccctgcggctgtggtccagc

SEQ ID NO: 38884 - DNA, 1443 bp, synthetic construct
  source 1..1443: mol_type = other DNA
atggccttaccagtgaccgccttgctcctgccgctggccttgctgctccacgccgccaggccgcagatcgtgctgacacagagccctgccatcatgtccgcttctcccggcgagaaagtgaccatgacatgtagcgccagcagcagcgtgtccttcatgcactggtatcagcagaagtccggcacaagccccaagcggtggatctacgataccagcacactggcctctggcgtgccagccagatttggcggatctggcagcggcacatcttacagcctgaccatcagcagcatggaagccgaagatgccgccacctactactgccagcagtggtccagcaatcccctgacatttggagccggcaccaagctggaactgaagagaggcggaggcggaagtggaggcggaggatctggcggcggaggctctcaagttcagctgcaacagagcggccctgagctggttaagcctggcgcttctgtgcggatctcttgcaaggccagcggctacaccttcaccagctactacatccactgggtcaagcagcggcctggacagggactcgaatggatcggctggatctaccccggcaacctgaacaccaagtacaacgagaagttcaagggcaaagccacactgaccgccgacaagagcagcagcacagcctacatgcagctgagcagcctgacaagcgaggacagcgccgtgtacttctgcgccagatacgactggtacttcgacgtgtggggagccggaaccaccgtgacagtttcttctacgcgtaaaattgaagttatgtatcctcctccttacctagacaatgagaagagcaatggaaccattatccatgtgaaagggaaacacctttgtccaagtcccctatttcccggaccttctaagcccttttgggtgctggtggtggttgggggagtcctggcttgctatagcttgctagtaacagtggcctttattattttctgggtgaggagtaagaggagcaggctcctgcacagtgactacatgaacatgactccacgccgccccggacccacccgcaagcattaccagccctatgccccaccacgcgacttcgcagcctatcgctccagagtgaagttcagcaggagcgcagacgcccccgcgtaccagcagggccagaaccagctctataacgagctcaatctaggacgaagagaggagtacgatgttttggacaagagacgtggccgggaccctgagatggggggaaagccgagaaggaagaaccctcaggaaggcctgtacaatgaactgcagaaagataagatggcggaggcctacagtgagattgggatgaaaggcgagcgccggaggggcaaggggcacgatggcctttaccagggtctcagtacagccaccaaggacacctacgacgcccttcacatgcaggccctgccccctcgc

SEQ ID NO: 38885 - DNA, 1461 bp, synthetic construct
  source 1..1461: mol_type = other DNA
atggccttaccagtgaccgccttgctcctgccgctggccttgctgctccacgccgccaggccgcagatcgtgctgacacagagccctgccatcatgtccgcttctcccggcgagaaagtgaccatgacatgtagcgccagcagcagcgtgtccttcatgcactggtatcagcagaagtccggcacaagccccaagcggtggatctacgataccagcacactggcctctggcgtgccagccagatttggcggatctggcagcggcacatcttacagcctgaccatcagcagcatggaagccgaagatgccgccacctactactgccagcagtggtccagcaatcccctgacatttggagccggcaccaagctggaactgaagagaggcggaggcggaagtggaggcggaggatctggcggcggaggctctcaagttcagctgcaacagagcggccctgagctggttaagcctggcgcttctgtgcggatctcttgcaaggccagcggctacaccttcaccagctactacatccactgggtcaagcagcggcctggacagggactcgaatggatcggctggatctaccccggcaacctgaacaccaagtacaacgagaagttcaagggcaaagccacactgaccgccgacaagagcagcagcacagcctacatgcagctgagcagcctgacaagcgaggacagcgccgtgtacttctgcgccagatacgactggtacttcgacgtgtggggagccggaaccaccgtgacagtttcttctacgcgtgcgaagcccaccacgacgccagcgccgcgaccaccaacaccggcgcccaccatcgcgtcgcagcccctgtccctgcgcccagaggcgtgccggccagcggcggggggcgcagtgcacacgagggggctggacttcgcctgtgacatctacatctgggcgcccttggccgggacttgtggggtccttctcctgtcactggttatcaccctttactgcaaacggggcagaaagaaactcctgtatatattcaaacaaccatttatgagaccagtacaaactactcaagaggaagatggctgtagctgccgatttccagaagaagaagaaggaggatgtgaactgagagtgaagttcagcaggagcgcagacgcccccgcgtaccagcagggccagaaccagctctataacgagctgaatctaggacgaagagaggagtacgatgttttggacaagagacgtggccgggaccctgagatggggggaaagccgagaaggaagaaccctcaggaaggcctgtacaatgaactgcagaaagataagatggcggaggcctacagtgagattgggatgaaaggcgagcgccggaggggcaaggggcacgatggcctttaccagggtctcagtacagccaccaaggacacctacgacgcccttcacatgcaggccctgccccctcgc

SEQ ID NO: 38886 - DNA, 1461 bp, synthetic construct
  source 1..1461: mol_type = other DNA
atggccttaccagtgaccgccttgctcctgccgctggccttgctgctccacgccgccaggccgcaagttcagctgcaacagagcggccctgagctggttaagcctggcgcttctgtgcggatctcttgcaaggccagcggctacaccttcaccagctactacatccactgggtcaagcagcggcctggacagggactcgaatggatcggctggatctaccccggcaacctgaacaccaagtacaacgagaagttcaagggcaaagccacactgaccgccgacaagagcagcagcacagcctacatgcagctgagcagcctgacaagcgaggacagcgccgtgtacttctgcgccagatacgactggtacttcgacgtgtggggagccggaaccaccgtgacagtttcttctggcggaggcggaagtggaggcggaggatctggcggcggaggctctcagatcgtgctgacacagagccctgccatcatgtccgcttctcccggcgagaaagtgaccatgacatgtagcgccagcagcagcgtgtccttcatgcactggtatcagcagaagtccggcacaagccccaagcggtggatctacgataccagcacactggcctctggcgtgccagccagatttggcggatctggcagcggcacatcttacagcctgaccatcagcagcatggaagccgaagatgccgccacctactactgccagcagtggtccagcaatcccctgacatttggagccggcaccaagctggaactgaagagaacgcgtgcgaagcccaccacgacgccagcgccgcgaccaccaacaccggcgcccaccatcgcgtcgcagcccctgtccctgcgcccagaggcgtgccggccagcggcggggggcgcagtgcacacgagggggctggacttcgcctgtgacatctacatctgggcgcccttggccgggacttgtggggtccttctcctgtcactggttatcaccctttactgcaaacggggcagaaagaaactcctgtatatattcaaacaaccatttatgagaccagtacaaactactcaagaggaagatggctgtagctgccgatttccagaagaagaagaaggaggatgtgaactgagagtgaagttcagcaggagcgcagacgcccccgcgtaccagcagggccagaaccagctctataacgagctgaatctaggacgaagagaggagtacgatgttttggacaagagacgtggccgggaccctgagatggggggaaagccgagaaggaagaaccctcaggaaggcctgtacaatgaactgcagaaagataagatggcggaggcctacagtgagattgggatgaaaggcgagcgccggaggggcaaggggcacgatggcctttaccagggtctcagtacagccaccaaggacacctacgacgcccttcacatgcaggccctgccccctcgc

SEQ ID NO: 38887 - DNA, 1860 bp, synthetic construct
  source 1..1860: mol_type = other DNA
atggccttaccagtgaccgccttgctcctgccgctggccttgctgctccacgccgccaggccgcagatcgtgctgacacagagccctgccatcatgtccgcttctcccggcgagaaagtgaccatgacatgtagcgccagcagcagcgtgtccttcatgcactggtatcagcagaagtccggcacaagccccaagcggtggatctacgataccagcacactggcctctggcgtgccagccagatttggcggatctggcagcggcacatcttacagcctgaccatcagcagcatggaagccgaagatgccgccacctactactgccagcagtggtccagcaatcccctgacatttggagccggcaccaagctggaactgaagagactcgagatccagaaccctgatcctgccgtgtaccagctgcgggatagcaagagcagcgacaagagcgtgtgtctgttcaccgacttcgacagccagaccaacgtgtcccagagcaaggactccgacgtgtacatcaccgataagtgcgtgctggacatgcggagcatggacttcaagagcaactccgccgtggcctggtccaacaagtccgatttcgcctgcgccaacgccttcaacaacagcattatccccgaggacacattcttcccaagcagcgacgtgccctgcgacgtgaagctggtggaaaagagcttcgagacagacaccaacctgaacttccagaacctgagcgtgatcggcttcagaatcctgctgctgaaagtggccggctttaacctgctgatgaccctgcggctgtggtccagccgcgccaagagaagcggatctggcgtgaagcagaccctgaatttcgacctgctgaagctggctggcgacgtggaatccaacccaggccctactagtatggactggatttggcgcatccttttccttgtcggcgctgctaccggcgcgcattccttcgaacaagttcagctgcaacagagcggccctgagctggttaagcctggcgcttctgtgcggatctcttgcaaggccagcggctacaccttcaccagctactacatccactgggtcaagcagcggcctggacagggactcgaatggatcggctggatctaccccggcaacctgaacaccaagtacaacgagaagttcaagggcaaagccacactgaccgccgacaagagcagcagcacagcctacatgcagctgagcagcctgacaagcgaggacagcgccgtgtacttctgcgccagatacgactggtacttcgacgtgtggggagccggaaccaccgtgacagtttcttctacgcgtgaggacctgaagaacgtgttcccacctgaggtggccgtgttcgagcctagcaaggccgagatcgcccacacccagaaagccaccctcgtgtgcctggctaccggcttctaccccgaccatgtggaactgtcttggtgggtcaacggcaaagaggtgcacagcggcgtgtgtaccgacccccagccactgaaagaacagcccgccctgaacgacagccggtactgcctgagcagcagactgagagtgtccgccaccttctggcagaacccccggaaccacttcagatgccaggtgcagttctacggcctgagcgagaacgacgagtggacccaggacagagccaagcccgtgacccagatcgtgtctgccgaagcctggggcagagccgattgcggcatcaccagcgccagctaccaccagggcgtgctgagcgccaccatcctgtacgagatcctgctgggcaaggccaccctgtacgccgtgctggtgtctgccctggtgctgatggctatggtcaagcggaaggacagccgggga

SEQ ID NO: 38888 - DNA, 1848 bp, synthetic construct
  source 1..1848: mol_type = other DNA
atggccttaccagtgaccgccttgctcctgccgctggccttgctgctccacgccgccaggccgcagatcgtgctgacacagagccctgccatcatgtccgcttctcccggcgagaaagtgaccatgacatgtagcgccagcagcagcgtgtccttcatgcactggtatcagcagaagtccggcacaagccccaagcggtggatctacgataccagcacactggcctctggcgtgccagccagatttggcggatctggcagcggcacatcttacagcctgaccatcagcagcatggaagccgaagatgccgccacctactactgccagcagtggtccagcaatcccctgacatttggagccggcaccaagctggaactgaagagactcgaggacctgaagaacgtgttcccacctgaggtggccgtgttcgagcctagcaaggccgagatcgcccacacccagaaagccaccctcgtgtgcctggctaccggcttctaccccgaccatgtggaactgtcttggtgggtcaacggcaaagaggtgcacagcggcgtgtgtaccgacccccagccactgaaagaacagcccgccctgaacgacagccggtactgcctgagcagcagactgagagtgtccgccaccttctggcagaacccccggaaccacttcagatgccaggtgcagttctacggcctgagcgagaacgacgagtggacccaggacagagccaagcccgtgacccagatcgtgtctgccgaagcctggggcagagccgattgcggcatcaccagcgccagctaccaccagggcgtgctgagcgccaccatcctgtacgagatcctgctgggcaaggccaccctgtacgccgtgctggtgtctgccctggtgctgatggctatggtcaagcggaaggacagccggggaagggccaagcgatctggatctggagcaacaaacttctcactactcaaacaagcaggtgacgtggaggagaatcccgggcctactagtatggactggatttggcgcatccttttccttgtcggcgctgctaccggcgcgcattccttcgaacaagttcagctgcaacagagcggccctgagctggttaagcctggcgcttctgtgcggatctcttgcaaggccagcggctacaccttcaccagctactacatccactgggtcaagcagcggcctggacagggactcgaatggatcggctggatctaccccggcaacctgaacaccaagtacaacgagaagttcaagggcaaagccacactgaccgccgacaagagcagcagcacagcctacatgcagctgagcagcctgacaagcgaggacagcgccgtgtacttctgcgccagatacgactggtacttcgacgtgtggggagccggaaccaccgtgacagtttcttctacgcgtatccagaaccctgatcctgccgtgtaccagctgcgggatagcaagagcagcgacaagagcgtgtgtctgttcaccgacttcgacagccagaccaacgtgtcccagagcaaggactccgacgtgtacatcaccgataagtgcgtgctggacatgcggagcatggacttcaagagcaactccgccgtggcctggtccaacaagtccgatttcgcctgcgccaacgccttcaacaacagcattatccccgaggacacattcttcccaagcagcgacgtgccctgcgacgtgaagctggtggaaaagagcttcgagacagacaccaacctgaacttccagaacctgagcgtgatcggcttcagaatcctgctgctgaaagtggccggctttaacctgctgatgaccctgcggctgtggtccagc

SEQ ID NO: 38889 - DNA, 1848 bp, synthetic construct
  source 1..1848: mol_type = other DNA
atggccttaccagtgaccgccttgctcctgccgctggccttgctgctccacgccgccaggccgcagatcgtgctgacacagagccctgccatcatgtccgcttctcccggcgagaaagtgaccatgacatgtagcgccagcagcagcgtgtccttcatgcactggtatcagcagaagtccggcacaagccccaagcggtggatctacgataccagcacactggcctctggcgtgccagccagatttggcggatctggcagcggcacatcttacagcctgaccatcagcagcatggaagccgaagatgccgccacctactactgccagcagtggtccagcaatcccctgacatttggagccggcaccaagctggaactgaagagactcgaggacctgaagaacgtgttcccacctgaggtggccgtgttcgagcctagcgaggccgagatcagccacacccagaaagccaccctcgtgtgcctggctaccggcttctaccccgaccatgtggaactgtcttggtgggtcaacggcaaagaggtgcacagcggcgtgtgtaccgacccccagccactgaaagaacagcccgccctgaacgacagccggtactgcctgagcagcagactgagagtgtccgccaccttctggcagaacccccggaaccacttcagatgccaggtgcagttctacggcctgagcgagaacgacgagtggacccaggacagagccaagcccgtgacccagatcgtgtctgccgaagcctggggcagagccgattgcggctttaccagcgagagctaccagcagggcgtgctgagcgccaccatcctgtacgagatcctgctgggcaaggccaccctgtacgccgtgctggtgtctgccctggtgctgatggctatggtcaagcggaaggacagccggggaagggccaagcgatctggatctggagcaacaaacttctcactactcaaacaagcaggtgacgtggaggagaatcccgggcctactagtatggactggatttggcgcatccttttccttgtcggcgctgctaccggcgcgcattccttcgaacaagttcagctgcaacagagcggccctgagctggttaagcctggcgcttctgtgcggatctcttgcaaggccagcggctacaccttcaccagctactacatccactgggtcaagcagcggcctggacagggactcgaatggatcggctggatctaccccggcaacctgaacaccaagtacaacgagaagttcaagggcaaagccacactgaccgccgacaagagcagcagcacagcctacatgcagctgagcagcctgacaagcgaggacagcgccgtgtacttctgcgccagatacgactggtacttcgacgtgtggggagccggaaccaccgtgacagtttcttctacgcgtatccagaaccctgatcctgccgtgtaccagctgcgggatagcaagagcagcgacaagagcgtgtgtctgttcaccgacttcgacagccagaccaacgtgtcccagagcaaggactccgacgtgtacatcaccgataagtgcgtgctggacatgcggagcatggacttcaagagcaactccgccgtggcctggtccaacaagtccgatttcgcctgcgccaacgccttcaacaacagcattatccccgaggacacattcttcccaagccccgagagcagctgcgacgtgaagctggtggaaaagagcttcgagacagacaccaacctgaacttccagaacctgagcgtgatcggcttcagaatcctgctgctgaaagtggccggctttaacctgctgatgaccctgcggctgtggtccagc

SEQ ID NO: 38890 - DNA, 1860 bp, synthetic construct
  source 1..1860: mol_type = other DNA
atggccttaccagtgaccgccttgctcctgccgctggccttgctgctccacgccgccaggccgcagatcgtgctgacacagagccctgccatcatgtccgcttctcccggcgagaaagtgaccatgacatgtagcgccagcagcagcgtgtccttcatgcactggtatcagcagaagtccggcacaagccccaagcggtggatctacgataccagcacactggcctctggcgtgccagccagatttggcggatctggcagcggcacatcttacagcctgaccatcagcagcatggaagccgaagatgccgccacctactactgccagcagtggtccagcaatcccctgacatttggagccggcaccaagctggaactgaagagactcgagatccagaaccctgatcctgccgtgtaccagctgcgggatagcaagagcagcgacaagagcgtgtgtctgttcaccgacttcgacagccagaccaacgtgtcccagagcaaggactccgacgtgtacatcaccgataagtgcgtgctggacatgcggagcatggacttcaagagcaactccgccgtggcctggtccaacaagtccgatttcgcctgcgccaacgccttcaacaacagcattatccccgaggacacattcttcccaagccccgagagcagctgcgacgtgaagctggtggaaaagagcttcgagacagacaccaacctgaacttccagaacctgagcgtgatcggcttcagaatcctgctgctgaaagtggccggctttaacctgctgatgaccctgcggctgtggtccagccgcgccaagagaagcggatctggcgtgaagcagaccctgaatttcgacctgctgaagctggctggcgacgtggaatccaacccaggccctactagtatggactggatttggcgcatccttttccttgtcggcgctgctaccggcgcgcattccttcgaacaagttcagctgcaacagagcggccctgagctggttaagcctggcgcttctgtgcggatctcttgcaaggccagcggctacaccttcaccagctactacatccactgggtcaagcagcggcctggacagggactcgaatggatcggctggatctaccccggcaacctgaacaccaagtacaacgagaagttcaagggcaaagccacactgaccgccgacaagagcagcagcacagcctacatgcagctgagcagcctgacaagcgaggacagcgccgtgtacttctgcgccagatacgactggtacttcgacgtgtggggagccggaaccaccgtgacagtttcttctacgcgtgaggacctgaagaacgtgttcccacctgaggtggccgtgttcgagcctagcgaggccgagatcagccacacccagaaagccaccctcgtgtgcctggctaccggcttctaccccgaccatgtggaactgtcttggtgggtcaacggcaaagaggtgcacagcggcgtgtgtaccgacccccagccactgaaagaacagcccgccctgaacgacagccggtactgcctgagcagcagactgagagtgtccgccaccttctggcagaacccccggaaccacttcagatgccaggtgcagttctacggcctgagcgagaacgacgagtggacccaggacagagccaagcccgtgacccagatcgtgtctgccgaagcctggggcagagccgattgcggctttaccagcgagagctaccagcagggcgtgctgagcgccaccatcctgtacgagatcctgctgggcaaggccaccctgtacgccgtgctggtgtctgccctggtgctgatggctatggtcaagcggaaggacagccgggga

SEQ ID NO: 38891 - DNA, 1896 bp, synthetic construct
  source 1..1896: mol_type = other DNA
atggccttaccagtgaccgccttgctcctgccgctggccttgctgctccacgccgccaggccgctcgaggaggacctgaagaacgtgttcccacctgaggtggccgtgttcgagcctagcaaggccgagatcgcccacacccagaaagccaccctcgtgtgcctggctaccggcttctaccccgaccatgtggaactgtcttggtgggtcaacggcaaagaggtgcacagcggcgtgtgtaccgacccccagccactgaaagaacagcccgccctgaacgacagccggtactgcctgagcagcagactgagagtgtccgccaccttctggcagaacccccggaaccacttcagatgccaggtgcagttctacggcctgagcgagaacgacgagtggacccaggacagagccaagcccgtgacccagatcgtgtctgccgaagcctggggcagagccgattgcggcatcaccagcgccagctaccaccagggcgtgctgagcgccaccatcctgtacgagatcctgctgggcaaggccaccctgtacgccgtgctggtgtctgccctggtgctgatggctatggtcaagcggaaggacagccggggaagggccaagcgatctggatctggagcaacaaacttctcactactcaaacaagcaggtgacgtggaggagaatcccgggcctactagcatggccttaccagtgaccgccttgctcctgccgctggccttgctgctccacgccgccaggccgcagatcgtgctgacacagagccctgccatcatgtccgcttctcccggcgagaaagtgaccatgacatgtagcgccagcagcagcgtgtccttcatgcactggtatcagcagaagtccggcacaagccccaagcggtggatctacgataccagcacactggcctctggcgtgccagccagatttggcggatctggcagcggcacatcttacagcctgaccatcagcagcatggaagccgaagatgccgccacctactactgccagcagtggtccagcaatcccctgacatttggagccggcaccaagctggaactgaagagaggcggaggcggaagtggaggcggaggatctggcggcggaggctctcaagttcagctgcaacagagcggccctgagctggttaagcctggcgcttctgtgcggatctcttgcaaggccagcggctacaccttcaccagctactacatccactgggtcaagcagcggcctggacagggactcgaatggatcggctggatctaccccggcaacctgaacaccaagtacaacgagaagttcaagggcaaagccacactgaccgccgacaagagcagcagcacagcctacatgcagctgagcagcctgacaagcgaggacagcgccgtgtacttctgcgccagatacgactggtacttcgacgtgtggggagccggaaccaccgtgacagtttcttctacgcgtatccagaaccctgatcctgccgtgtaccagctgcgggatagcaagagcagcgacaagagcgtgtgtctgttcaccgacttcgacagccagaccaacgtgtcccagagcaaggactccgacgtgtacatcaccgataagtgcgtgctggacatgcggagcatggacttcaagagcaactccgccgtggcctggtccaacaagtccgatttcgcctgcgccaacgccttcaacaacagcattatccccgaggacacattcttcccaagcagcgacgtgccctgcgacgtgaagctggtggaaaagagcttcgagacagacaccaacctgaacttccagaacctgagcgtgatcggcttcagaatcctgctgctgaaagtggccggctttaacctgctgatgaccctgcggctgtggtccagc

SEQ ID NO: 38892 - DNA, 1917 bp, synthetic construct
  source 1..1917: mol_type = other DNA
atggccttaccagtgaccgccttgctcctgccgctggccttgctgctccacgccgccaggccgctcgagggctccggcgatcgccctgatcctgccgtgtaccagctgcgggatagcaagagcagcgacaagagcgtgtgtctgttcaccgacttcgacagccagaccaacgtgtcccagagcaaggactccgacgtgtacatcaccgataagtgcgtgctggacatgcggagcatggacttcaagagcaactccgccgtggcctggtccaacaagtccgatttcgcctgcgccaacgccttcaacaacagcattatccccgaggacacattcttcccaagccccgagagcagctgcgacgtgaagctggtggaaaagagcttcgagacagacaccaacctgaacttccagaacctgagcgtgatcggcttcagaatcctgctgctgaaagtggccggctttaacctgctgatgaccctgcggctgtggtccagctctagtcgcgccaagagaagcggatctggcgtgaagcagaccctgaatttcgacctgctgaagctggctggcgacgtggaatccaacccaggccccactagcatggccttaccagtgaccgccttgctcctgccgctggccttgctgctccacgccgccaggccgcagatcgtgctgacacagagccctgccatcatgtccgcttctcccggcgagaaagtgaccatgacatgtagcgccagcagcagcgtgtccttcatgcactggtatcagcagaagtccggcacaagccccaagcggtggatctacgataccagcacactggcctctggcgtgccagccagatttggcggatctggcagcggcacatcttacagcctgaccatcagcagcatggaagccgaagatgccgccacctactactgccagcagtggtccagcaatcccctgacatttggagccggcaccaagctggaactgaagagaggcggaggcggaagtggaggcggaggatctggcggcggaggctctcaagttcagctgcaacagagcggccctgagctggttaagcctggcgcttctgtgcggatctcttgcaaggccagcggctacaccttcaccagctactacatccactgggtcaagcagcggcctggacagggactcgaatggatcggctggatctaccccggcaacctgaacaccaagtacaacgagaagttcaagggcaaagccacactgaccgccgacaagagcagcagcacagcctacatgcagctgagcagcctgacaagcgaggacagcgccgtgtacttctgcgccagatacgactggtacttcgacgtgtggggagccggaaccaccgtgacagtttcttctacgcgtgaggacctgaagaacgtgttcccacctgaggtggccgtgttcgagcctagcgaggccgagatcagccacacccagaaagccaccctcgtgtgcctggctaccggcttctaccccgaccatgtggaactgtcttggtgggtcaacggcaaagaggtgcacagcggcgtgtgtaccgacccccagccactgaaagaacagcccgccctgaacgacagccggtactgcctgagcagcagactgagagtgtccgccaccttctggcagaacccccggaaccacttcagatgccaggtgcagttctacggcctgagcgagaacgacgagtggacccaggacagagccaagcccgtgacccagatcgtgtctgccgaagcctggggcagagccgattgcggctttaccagcgagagctaccagcagggcgtgctgagcgccaccatcctgtacgagatcctgctgggcaaggccaccctgtacgccgtgctggtgtctgccctggtgctgatggctatggtcaagcggaaggacagccgggga

SEQ ID NO: 38893 - DNA, 1848 bp, synthetic construct
  source 1..1848: mol_type = other DNA
atggccttaccagtgaccgccttgctcctgccgctggccttgctgctccacgccgccaggccgcagatcgtgctgacacagagccctgccatcatgtccgcttctcccggcgagaaagtgaccatgacatgtagcgccagcagcagcgtgtccttcatgcactggtatcagcagaagtccggcacaagccccaagcggtggatctacgataccagcacactggcctctggcgtgccagccagatttggcggatctggcagcggcacatcttacagcctgaccatcagcagcatggaagccgaagatgccgccacctactactgccagcagtggtccagcaatcccctgacatttggagccggcaccaagctggaactgaagagactcgaggacctgaagaacgtgttcccacctgaggtggccgtgttcgagcctagcgaggccgagatcagccacacccagaaagccaccctcgtgtgcctggctaccggcttctaccccgaccatgtggaactgtcttggtgggtcaacggcaaagaggtgcacagcggcgtgtctaccgacccccagccactgaaagaacagcccgccctgaacgacagccggtactgcctgagcagcagactgagagtgtccgccaccttctggcagaacccccggaaccacttcagatgccaggtgcagttctacggcctgagcgagaacgacgagtggacccaggacagagccaagcccgtgacccagatcgtgtctgccgaagcctggggcagagccgattgcggctttaccagcgagagctaccagcagggcgtgctgagcgccaccatcctgtacgagatcctgctgggcaaggccaccctgtacgccgtgctggtgtctgccctggtgctgatggctatggtcaagcggaaggacagccggggaagggccaagcgatctggatctggagcaacaaacttctcactactcaaacaagcaggtgacgtggaggagaatcccgggcctactagtatggactggatttggcgcatccttttccttgtcggcgctgctaccggcgcgcattccttcgaacaagttcagctgcaacagagcggccctgagctggttaagcctggcgcttctgtgcggatctcttgcaaggccagcggctacaccttcaccagctactacatccactgggtcaagcagcggcctggacagggactcgaatggatcggctggatctaccccggcaacctgaacaccaagtacaacgagaagttcaagggcaaagccacactgaccgccgacaagagcagcagcacagcctacatgcagctgagcagcctgacaagcgaggacagcgccgtgtacttctgcgccagatacgactggtacttcgacgtgtggggagccggaaccaccgtgacagtttcttctacgcgtatccagaaccctgatcctgccgtgtaccagctgcgggatagcaagagcagcgacaagagcgtgtgtctgttcaccgacttcgacagccagaccaacgtgtcccagagcaaggactccgacgtgtacatcaccgataagaccgtgctggacatgcggagcatggacttcaagagcaactccgccgtggcctggtccaacaagtccgatttcgcctgcgccaacgccttcaacaacagcattatccccgaggacacattcttcccaagccccgagagcagctgcgacgtgaagctggtggaaaagagcttcgagacagacaccaacctgaacttccagaacctgagcgtgatcggcttcagaatcctgctgctgaaagtggccggctttaacctgctgatgaccctgcggctgtggtccagc

SEQ ID NO: 38894 - DNA, 1872 bp, synthetic construct
  source 1..1872: mol_type = other DNA
atggccttaccagtgaccgccttgctcctgccgctggccttgctgctccacgccgccaggccgcagatcgtgctgacacagagccctgccatcatgtccgcttctcccggcgagaaagtgaccatgacatgtagcgccagcagcagcgtgtccttcatgcactggtatcagcagaagtccggcacaagccccaagcggtggatctacgataccagcacactggcctctggcgtgccagccagatttggcggatctggcagcggcacatcttacagcctgaccatcagcagcatggaagccgaagatgccgccacctactactgccagcagtggtccagcaatcccctgacatttggagccggcaccaagctggaactgaagagactcgaggacaagcagctggacgccgacgtgtcccccaagcctaccatcttcctgccctctatcgccgagacaaagctccagaaggccggcacctacctgtgcctgctggaaaagttcttcccagatgtgattaagatccactggcaggaaaagaagtccaacaccatcctgggcagccaggaaggcaacaccatgaagaccaacgacacctacatgaagttcagctggctgaccgtgcccgagaagtccctggacaaagaacacagatgcatcgtgcggcacgaaaacaacaagaacggcgtggaccaggaaatcatcttcccacccatcaagaccgatgtgattacaatggaccccaaggacaactgctccaaggacgccaacgataccctgctgctccagctgaccaacaccagcgcctactacatgtacttgttgctgctgctgaagtccgtggtgtacttcgccatcatcacatgctgcctgctgcggagaaccgccttctgctgcaacggcgagaagtctagggccaagcgatctggatctggagcaacaaacttctcactactcaaacaagcaggtgacgtggaggagaatcccgggcctactagtatggactggatttggcgcatccttttccttgtcggcgctgctaccggcgcgcattccttcgaacaagttcagctgcaacagagcggccctgagctggttaagcctggcgcttctgtgcggatctcttgcaaggccagcggctacaccttcaccagctactacatccactgggtcaagcagcggcctggacagggactcgaatggatcggctggatctaccccggcaacctgaacaccaagtacaacgagaagttcaagggcaaagccacactgaccgccgacaagagcagcagcacagcctacatgcagctgagcagcctgacaagcgaggacagcgccgtgtacttctgcgccagatacgactggtacttcgacgtgtggggagccggaaccaccgtgacagtttcttctacgcgtagccagcctcacaccaagcccagcgtgttcgtgatgaagaacggcaccaacgtggcctgcctcgtgaaagagttctaccccaaggacatcaggatcaacctggtgtccagcaagaagatcaccgagttcgaccccgccatcgtgatctcccccagcggcaagtacaacgccgtgaagctggggaagtacgaggacagcaacagcgtgacctgctccgtgcagcacgacaacaagaccgtgcacagcaccgactttgaagtgaaaaccgactccaccgaccacgtgaagcccaaagagacagagaacaccaagcagcccagcaagagctgccacaagcccaaggccatcgtgcacaccgagaaagtgaacatgatgagcctgaccgtgctgggcctgcggatgctgttcgccaaaaccgtggccgtgaacttcctgctgaccgccaagctgttcttcctc

SEQ ID NO: 38895 - DNA, 1872 bp, synthetic construct
  source 1..1872: mol_type = other DNA
atggccttaccagtgaccgccttgctcctgccgctggccttgctgctccacgccgccaggccgcagatcgtgctgacacagagccctgccatcatgtccgcttctcccggcgagaaagtgaccatgacatgtagcgccagcagcagcgtgtccttcatgcactggtatcagcagaagtccggcacaagccccaagcggtggatctacgataccagcacactggcctctggcgtgccagccagatttggcggatctggcagcggcacatcttacagcctgaccatcagcagcatggaagccgaagatgccgccacctactactgccagcagtggtccagcaatcccctgacatttggagccggcaccaagctggaactgaagagactcgagagccagcctcacaccaagcccagcgtgttcgtgatgaagaacggcaccaacgtggcctgcctcgtgaaagagttctaccccaaggacatcaggatcaacctggtgtccagcaagaagatcaccgagttcgaccccgccatcgtgatctcccccagcggcaagtacaacgccgtgaagctggggaagtacgaggacagcaacagcgtgacctgctccgtgcagcacgacaacaagaccgtgcacagcaccgactttgaagtgaaaaccgactccaccgaccacgtgaagcccaaagagacagagaacaccaagcagcccagcaagagctgccacaagcccaaggccatcgtgcacaccgagaaagtgaacatgatgagcctgaccgtgctgggcctgcggatgctgttcgccaaaaccgtggccgtgaacttcctgctgaccgccaagctgttcttcctcagggccaagcgatctggatctggagcaacaaacttctcactactcaaacaagcaggtgacgtggaggagaatcccgggcctactagtatggactggatttggcgcatccttttccttgtcggcgctgctaccggcgcgcattccttcgaacaagttcagctgcaacagagcggccctgagctggttaagcctggcgcttctgtgcggatctcttgcaaggccagcggctacaccttcaccagctactacatccactgggtcaagcagcggcctggacagggactcgaatggatcggctggatctaccccggcaacctgaacaccaagtacaacgagaagttcaagggcaaagccacactgaccgccgacaagagcagcagcacagcctacatgcagctgagcagcctgacaagcgaggacagcgccgtgtacttctgcgccagatacgactggtacttcgacgtgtggggagccggaaccaccgtgacagtttcttctacgcgtgacaagcagctggacgccgacgtgtcccccaagcctaccatcttcctgccctctatcgccgagacaaagctccagaaggccggcacctacctgtgcctgctggaaaagttcttcccagatgtgattaagatccactggcaggaaaagaagtccaacaccatcctgggcagccaggaaggcaacaccatgaagaccaacgacacctacatgaagttcagctggctgaccgtgcccgagaagtccctggacaaagaacacagatgcatcgtgcggcacgaaaacaacaagaacggcgtggaccaggaaatcatcttcccacccatcaagaccgatgtgattacaatggaccccaaggacaactgctccaaggacgccaacgataccctgctgctccagctgaccaacaccagcgcctactacatgtacttgttgctgctgctgaagtccgtggtgtacttcgccatcatcacatgctgcctgctgcggagaaccgccttctgctgcaacggcgagaagtct

SEQ ID NO: 38896 - DNA, 1917 bp, synthetic construct
  source 1..1917: mol_type = other DNA
atggccttaccagtgaccgccttgctcctgccgctggccttgctgctccacgccgccaggccgctcgaggacaagcagctggacgccgacgtgtcccccaagcctaccatcttcctgccctctatcgccgagacaaagctccagaaggccggcacctacctgtgcctgctggaaaagttcttcccagatgtgattaagatccactggcaggaaaagaagtccaacaccatcctgggcagccaggaaggcaacaccatgaagaccaacgacacctacatgaagttcagctggctgaccgtgcccgagaagtccctggacaaagaacacagatgcatcgtgcggcacgaaaacaacaagaacggcgtggaccaggaaatcatcttcccacccatcaagaccgatgtgattacaatggaccccaaggacaactgctccaaggacgccaacgataccctgctgctccagctgaccaacaccagcgcctactacatgtacttgttgctgctgctgaagtccgtggtgtacttcgccatcatcacatgctgcctgctgcggagaaccgccttctgctgcaacggcgagaagtctagggccaagcgatctggatctggagcaacaaacttctcactactcaaacaagcaggtgacgtggaggagaatcccgggcctactagcatggccttaccagtgaccgccttgctcctgccgctggccttgctgctccacgccgccaggccgcagatcgtgctgacacagagccctgccatcatgtccgcttctcccggcgagaaagtgaccatgacatgtagcgccagcagcagcgtgtccttcatgcactggtatcagcagaagtccggcacaagccccaagcggtggatctacgataccagcacactggcctctggcgtgccagccagatttggcggatctggcagcggcacatcttacagcctgaccatcagcagcatggaagccgaagatgccgccacctactactgccagcagtggtccagcaatcccctgacatttggagccggcaccaagctggaactgaagagaggcggaggcggaagtggaggcggaggatctggcggcggaggctctcaagttcagctgcaacagagcggccctgagctggttaagcctggcgcttctgtgcggatctcttgcaaggccagcggctacaccttcaccagctactacatccactgggtcaagcagcggcctggacagggactcgaatggatcggctggatctaccccggcaacctgaacaccaagtacaacgagaagttcaagggcaaagccacactgaccgccgacaagagcagcagcacagcctacatgcagctgagcagcctgacaagcgaggacagcgccgtgtacttctgcgccagatacgactggtacttcgacgtgtggggagccggaaccaccgtgacagtttcttctacgcgtagccagcctcacaccaagcccagcgtgttcgtgatgaagaacggcaccaacgtggcctgcctcgtgaaagagttctaccccaaggacatcaggatcaacctggtgtccagcaagaagatcaccgagttcgaccccgccatcgtgatctcccccagcggcaagtacaacgccgtgaagctggggaagtacgaggacagcaacagcgtgacctgctccgtgcagcacgacaacaagaccgtgcacagcaccgactttgaagtgaaaaccgactccaccgaccacgtgaagcccaaagagacagagaacaccaagcagcccagcaagagctgccacaagcccaaggccatcgtgcacaccgagaaagtgaacatgatgagcctgaccgtgctgggcctgcggatgctgttcgccaaaaccgtggccgtgaacttcctgctgaccgccaagctgttcttcctc

SEQ ID NO: 38897 - DNA, 2379 bp, synthetic construct
  source 1..2379: mol_type = other DNA
atggccttaccagtgaccgccttgctcctgccgctggccttgctgctccacgccgccaggccgcagatcgtgctgacacagagccctgccatcatgtccgcttctcccggcgagaaagtgaccatgacatgtagcgccagcagcagcgtgtccttcatgcactggtatcagcagaagtccggcacaagccccaagcggtggatctacgataccagcacactggcctctggcgtgccagccagatttggcggatctggcagcggcacatcttacagcctgaccatcagcagcatggaagccgaagatgccgccacctactactgccagcagtggtccagcaatcccctgacatttggagccggcaccaagctggaactgaagagaggacagcctaaggccaatcctaccgtgacactgttccctccaagcagcgaagaactccaggccaacaaggccacacttgtgtgcctgatctccgacttctaccctggggctgtgacagtggcttggaaggccgatggatctcctgtgaaagccggcgtggaaaccaccaagccatccaagcagagcaacaacaaatacgccgccagctcctacctgagcctgacacctgagcagtggaagtcccacagatcctacagctgccaagtgacccacgaaggcagcaccgtggaaaagacagtggcccctacagagtgcagcggatcccagagcttcggcctgctggaccccaagctgtgctacctgctggatggcatcctgttcatctacggcgtgatcctgaccgccctgttcctgagagtgaagttcagcagaagcgccgacgcccctgcctaccagcagggacagaaccaactgtacaacgagctgaacctgggcagacgggaagagtacgacgtgctggacaagcggagaggcagggaccctgagatgggcggaaagccccagcggagaaagaacccccaggaaggactgtataacgaactccagaaagacaagatggccgaagcctacagcgagatcggcatgaagggcgagcggagaagaggcaagggccacgatggcctgtaccagggcctgagcaccgccaccaaggacacctatgacgccctgcacatgcaggccctgcctccaagaagggccaagcgatctggatctggagcaacaaacttctcactactcaaacaagcaggtgacgtggaggagaatcccgggcctactagtatggactggatttggcgcatccttttccttgtcggcgctgctaccggcgcgcattccttcgaacaagttcagctgcaacagagcggccctgagctggttaagcctggcgcttctgtgcggatctcttgcaaggccagcggctacaccttcaccagctactacatccactgggtcaagcagcggcctggacagggactcgaatggatcggctggatctaccccggcaacctgaacaccaagtacaacgagaagttcaagggcaaagccacactgaccgccgacaagagcagcagcacagcctacatgcagctgagcagcctgacaagcgaggacagcgccgtgtacttctgcgccagatacgactggtacttcgacgtgtggggagccggaaccaccgtgacagtttcttctgcctctacaaagggaccctccgtgtttcctctggctcccagcagcaagtctacaagcggaggaacagccgctctgggctgcctggtcaaggattactttcccgagcctgtgaccgtgtcctggaatagcggagcactgacaagcggcgtgcacacctttccagccgtgctgcaaagcagcggcctgtactctctgagcagcgtggtcacagtgcctagctctagcctgggcacccagacctacatctgcaatgtgaaccacaagcctagcaacaccaaggtggacaagagagtggaacccaagagctgtggtacccagagttttgggttgttggaccctaaattgtgctatctgttggacggaatcctgttcatttacggagtgatcctgaccgcattgttcctgcgggttaagttttccagatccgcagacgcacccgcttaccaacaagggcagaaccaactctacaatgaacttaatttggggcggagggaagagtacgacgttctggacaaaaggaggggacgagatcccgagatgggcggaaagcctcagcgaaggaagaatccgcaagaggggctttataacgaactccagaaagataaaatggcagaagcctatagtgagattgggatgaagggagaaaggaggaggggtaaaggtcacgatgggttgtaccaaggattgagcacagccactaaagatacctatgatgcgctccacatgcaggccctgccgccaaga

SEQ ID NO: 38898 - DNA, 2436 bp, synthetic construct
  source 1..2436: mol_type = other DNA
atggccttaccagtgaccgccttgctcctgccgctggccttgctgctccacgccgccaggccgcagatcgtgctgacacagagccctgccatcatgtccgcttctcccggcgagaaagtgaccatgacatgtagcgccagcagcagcgtgtccttcatgcactggtatcagcagaagtccggcacaagccccaagcggtggatctacgataccagcacactggcctctggcgtgccagccagatttggcggatctggcagcggcacatcttacagcctgaccatcagcagcatggaagccgaagatgccgccacctactactgccagcagtggtccagcaatcccctgacatttggagccggcaccaagctggaactgaagagactcgaggacctgaagaacgtgttcccacctgaggtggccgtgttcgagcctagcgaggccgagatcagccacacccagaaagccaccctcgtgtgcctggctaccggcttctaccccgaccatgtggaactgtcttggtgggtcaacggcaaagaggtgcacagcggcgtgtctaccgacccccagccactgaaagaacagcccgccctgaacgacagccggtactgcctgagcagcagactgagagtgtccgccaccttctggcagaacccccggaaccacttcagatgccaggtgcagttctacggcctgagcgagaacgacgagtggacccaggacagagccaagcccgtgacccagatcgtgtctgccgaagcctggggcagagccgattgcggatcccagagcttcggcctgctggaccccaagctgtgctacctgctggatggcatcctgttcatctacggcgtgatcctgaccgccctgttcctgagagtgaagttcagcagaagcgccgacgcccctgcctaccagcagggacagaaccaactgtacaacgagctgaacctgggcagacgggaagagtacgacgtgctggacaagcggagaggcagggaccctgagatgggcggaaagccccagcggagaaagaacccccaggaaggactgtataacgaactccagaaagacaagatggccgaagcctacagcgagatcggcatgaagggcgagcggagaagaggcaagggccacgatggcctgtaccagggcctgagcaccgccaccaaggacacctatgacgccctgcacatgcaggccctgcctccaagaagggccaagcgatctggatctggagcaacaaacttctcactactcaaacaagcaggtgacgtggaggagaatcccgggcctactagtatggactggatttggcgcatccttttccttgtcggcgctgctaccggcgcgcattccttcgaacaagttcagctgcaacagagcggccctgagctggttaagcctggcgcttctgtgcggatctcttgcaaggccagcggctacaccttcaccagctactacatccactgggtcaagcagcggcctggacagggactcgaatggatcggctggatctaccccggcaacctgaacaccaagtacaacgagaagttcaagggcaaagccacactgaccgccgacaagagcagcagcacagcctacatgcagctgagcagcctgacaagcgaggacagcgccgtgtacttctgcgccagatacgactggtacttcgacgtgtggggagccggaaccaccgtgacagtttcttctacgcgtatccagaaccctgatcctgccgtgtaccagctgcgggatagcaagagcagcgacaagagcgtgtgtctgttcaccgacttcgacagccagaccaacgtgtcccagagcaaggactccgacgtgtacatcaccgataagaccgtgctggacatgcggagcatggacttcaagagcaactccgccgtggcctggtccaacaagtccgatttcgcctgcgccaacgccttcaacaacagcattatccccgaggacacattcttcccaagccccgagagcagctgcggtacccagagttttgggttgttggaccctaaattgtgctatctgttggacggaatcctgttcatttacggagtgatcctgaccgcattgttcctgcgggttaagttttccagatccgcagacgcacccgcttaccaacaagggcagaaccaactctacaatgaacttaatttggggcggagggaagagtacgacgttctggacaaaaggaggggacgagatcccgagatgggcggaaagcctcagcgaaggaagaatccgcaagaggggctttataacgaactccagaaagataaaatggcagaagcctatagtgagattgggatgaagggagaaaggaggaggggtaaaggtcacgatgggttgtaccaaggattgagcacagccactaaagatacctatgatgcgctccacatgcaggccctgccgccaaga

SEQ ID NO: 38899 - DNA, 2562 bp, synthetic construct
  source 1..2562: mol_type = other DNA
atggccttaccagtgaccgccttgctcctgccgctggccttgctgctccacgccgccaggccgcagatcgtgctgacacagagccctgccatcatgtccgcttctcccggcgagaaagtgaccatgacatgtagcgccagcagcagcgtgtccttcatgcactggtatcagcagaagtccggcacaagccccaagcggtggatctacgataccagcacactggcctctggcgtgccagccagatttggcggatctggcagcggcacatcttacagcctgaccatcagcagcatggaagccgaagatgccgccacctactactgccagcagtggtccagcaatcccctgacatttggagccggcaccaagctggaactgaagagactcgaggaggacctgaagaacgtgttcccacctgaggtggccgtgttcgagcctagcgaggccgagatcagccacacccagaaagccaccctcgtgtgcctggctaccggcttctaccccgaccatgtggaactgtcttggtgggtcaacggcaaagaggtgcacagcggcgtgtctaccgacccccagccactgaaagaacagcccgccctgaacgacagccggtactgcctgagcagcagactgagagtgtccgccaccttctggcagaacccccggaaccacttcagatgccaggtgcagttctacggcctgagcgagaacgacgagtggacccaggacagagccaagcccgtgacccagatcgtgtctgccgaagcctggggcagagccgattgcggatcccagagcttcggcctgctggaccccaagctgtgctacctgctggatggcatcctgttcatctacggcgtgatcctgaccgccctgttcctgagagtgaagttcagcagaagcgccgacgcccctgcctaccagcagggacagaaccaactgtacaacgagctgaacctgggcagacgggaagagtacgacgtgctggacaagcggagaggcagggaccctgagatgggcggaaagccccagcggagaaagaacccccaggaaggactgtataacgaactccagaaagacaagatggccgaagcctacagcgagatcggcatgaagggcgagcggagaagaggcaagggccacgatggcctgtaccagggcctgagcaccgccaccaaggacacctatgacgccctgcacatgcaggccctgcctccaagaagggccaagcgatctggatctggagcaacaaacttctcactactcaaacaagcaggtgacgtggaggagaatcccgggcctactagtatggactggatttggcgcatccttttccttgtcggcgctgctaccggcgcgcattccttcgaacaagttcagctgcaacagagcggccctgagctggttaagcctggcgcttctgtgcggatctcttgcaaggccagcggctacaccttcaccagctactacatccactgggtcaagcagcggcctggacagggactcgaatggatcggctggatctaccccggcaacctgaacaccaagtacaacgagaagttcaagggcaaagccacactgaccgccgacaagagcagcagcacagcctacatgcagctgagcagcctgacaagcgaggacagcgccgtgtacttctgcgccagatacgactggtacttcgacgtgtggggagccggaaccaccgtgacagtttcttctacgcgtatccagaaccctgatcctgccgtgtaccagctgcgggatagcaagagcagcgacaagagcgtgtgtctgttcaccgacttcgacagccagaccaacgtgtcccagagcaaggactccgacgtgtacatcaccgataagaccgtgctggacatgcggagcatggacttcaagagcaactccgccgtggcctggtccaacaagtccgatttcgcctgcgccaacgccttcaacaacagcattatccccgaggacacattcttcccaagccccgagagcagctgcggtacccagagttttgggttgttggaccctaaattgtgctatctgttggacggaatcctgttcatttacggagtgatcctgaccgcattgttcctgaggagcaagcggtcacggctgctccacagcgattacatgaatatgacaccacgaagaccgggtcctactcgcaaacactaccaaccctacgcacctccccgcgactttgcagcgtaccgatctcgggttaagttttccagatccgcagacgcacccgcttaccaacaagggcagaaccaactctacaatgaacttaatttggggcggagggaagagtacgacgttctggacaaaaggaggggacgagatcccgagatgggcggaaagcctcagcgaaggaagaatccgcaagaggggctttataacgaactccagaaagataaaatggcagaagcctatagtgagattgggatgaagggagaaaggaggaggggtaaaggtcacgatgggttgtaccaaggattgagcacagccactaaagatacctatgatgcgctccacatgcaggccctgccgccaaga

SEQ ID NO: 38900 - DNA, 2691 bp, synthetic construct
  source 1..2691: mol_type = other DNA
atggccttaccagtgaccgccttgctcctgccgctggccttgctgctccacgccgccaggccgcagatcgtgctgacacagagccctgccatcatgtccgcttctcccggcgagaaagtgaccatgacatgtagcgccagcagcagcgtgtccttcatgcactggtatcagcagaagtccggcacaagccccaagcggtggatctacgataccagcacactggcctctggcgtgccagccagatttggcggatctggcagcggcacatcttacagcctgaccatcagcagcatggaagccgaagatgccgccacctactactgccagcagtggtccagcaatcccctgacatttggagccggcaccaagctggaactgaagagactcgaggaggacctgaagaacgtgttcccacctgaggtggccgtgttcgagcctagcgaggccgagatcagccacacccagaaagccaccctcgtgtgcctggctaccggcttctaccccgaccatgtggaactgtcttggtgggtcaacggcaaagaggtgcacagcggcgtgtctaccgacccccagccactgaaagaacagcccgccctgaacgacagccggtactgcctgagcagcagactgagagtgtccgccaccttctggcagaacccccggaaccacttcagatgccaggtgcagttctacggcctgagcgagaacgacgagtggacccaggacagagccaagcccgtgacccagatcgtgtctgccgaagcctggggcagagccgattgcggatcccagagcttcggcctgctggaccccaagctgtgctacctgctggatggcatcctgttcatctacggcgtgatcctgaccgccctgttcctgaaacggggcagaaagaaactcctgtatatattcaaacaaccatttatgagaccagtacaaactactcaagaggaagatggctgtagctgccgatttccagaagaagaagaaggaggatgtgaactgagagtgaagttcagcagaagcgccgacgcccctgcctaccagcagggacagaaccaactgtacaacgagctgaacctgggcagacgggaagagtacgacgtgctggacaagcggagaggcagggaccctgagatgggcggaaagccccagcggagaaagaacccccaggaaggactgtataacgaactccagaaagacaagatggccgaagcctacagcgagatcggcatgaagggcgagcggagaagaggcaagggccacgatggcctgtaccagggcctgagcaccgccaccaaggacacctatgacgccctgcacatgcaggccctgcctccaagaagggccaagcgatctggatctggagcaacaaacttctcactactcaaacaagcaggtgacgtggaggagaatcccgggcctactagtatggactggatttggcgcatccttttccttgtcggcgctgctaccggcgcgcattccttcgaacaagttcagctgcaacagagcggccctgagctggttaagcctggcgcttctgtgcggatctcttgcaaggccagcggctacaccttcaccagctactacatccactgggtcaagcagcggcctggacagggactcgaatggatcggctggatctaccccggcaacctgaacaccaagtacaacgagaagttcaagggcaaagccacactgaccgccgacaagagcagcagcacagcctacatgcagctgagcagcctgacaagcgaggacagcgccgtgtacttctgcgccagatacgactggtacttcgacgtgtggggagccggaaccaccgtgacagtttcttctacgcgtatccagaaccctgatcctgccgtgtaccagctgcgggatagcaagagcagcgacaagagcgtgtgtctgttcaccgacttcgacagccagaccaacgtgtcccagagcaaggactccgacgtgtacatcaccgataagaccgtgctggacatgcggagcatggacttcaagagcaactccgccgtggcctggtccaacaagtccgatttcgcctgcgccaacgccttcaacaacagcattatccccgaggacacattcttcccaagccccgagagcagctgcggtacccagagttttgggttgttggaccctaaattgtgctatctgttggacggaatcctgttcatttacggagtgatcctgaccgcattgttcctgaagagaggccggaagaagctgctgtacatcttcaagcagcctttcatgcggcccgtgcagaccacccaggaagaggacggctgctcctgccggttccccgaggaagaagaaggcggctgcgagctgcgggttaagttttccagatccgcagacgcacccgcttaccaacaagggcagaaccaactctacaatgaacttaatttggggcggagggaagagtacgacgttctggacaaaaggaggggacgagatcccgagatgggcggaaagcctcagcgaaggaagaatccgcaagaggggctttataacgaactccagaaagataaaatggcagaagcctatagtgagattgggatgaagggagaaaggaggaggggtaaaggtcacgatgggttgtaccaaggattgagcacagccactaaagatacctatgatgcgctccacatgcaggccctgccgccaaga

SEQ ID NO: 38901 - DNA, 1752 bp, synthetic construct
  source 1..1752: mol_type = other DNA
atggccttaccagtgaccgccttgctcctgccgctggccttgctgctccacgccgccaggccgcagatcgtgctgacacagagccctgccatcatgtccgcttctcccggcgagaaagtgaccatgacatgtagcgccagcagcagcgtgtccttcatgcactggtatcagcagaagtccggcacaagccccaagcggtggatctacgataccagcacactggcctctggcgtgccagccagatttggcggatctggcagcggcacatcttacagcctgaccatcagcagcatggaagccgaagatgccgccacctactactgccagcagtggtccagcaatcccctgacatttggagccggcaccaagctggaactgaagagactcgagcagagcttcggcctgctggaccccaagctgtgctacctgctggatggcatcctgttcatctacggcgtgatcctgaccgccctgttcctgagagtgaagttcagcagaagcgccgacgcccctgcctaccagcagggacagaaccaactgtacaacgagctgaacctgggcagacgggaagagtacgacgtgctggacaagcggagaggcagggaccctgagatgggcggaaagccccagcggagaaagaacccccaggaaggactgtataacgaactccagaaagacaagatggccgaagcctacagcgagatcggcatgaagggcgagcggagaagaggcaagggccacgatggcctgtaccagggcctgagcaccgccaccaaggacacctatgacgccctgcacatgcaggccctgcctccaagaagggccaagcgatctggatctggagcaacaaacttctcactactcaaacaagcaggtgacgtggaggagaatcccgggcctactagtatggactggatttggcgcatccttttccttgtcggcgctgctaccggcgcgcattccttcgaacaagttcagctgcaacagagcggccctgagctggttaagcctggcgcttctgtgcggatctcttgcaaggccagcggctacaccttcaccagctactacatccactgggtcaagcagcggcctggacagggactcgaatggatcggctggatctaccccggcaacctgaacaccaagtacaacgagaagttcaagggcaaagccacactgaccgccgacaagagcagcagcacagcctacatgcagctgagcagcctgacaagcgaggacagcgccgtgtacttctgcgccagatacgactggtacttcgacgtgtggggagccggaaccaccgtgacagtttcttctacgcgtcagagttttgggttgttggaccctaaattgtgctatctgttggacggaatcctgttcatttacggagtgatcctgaccgcattgttcctgcgggttaagttttccagatccgcagacgcacccgcttaccaacaagggcagaaccaactctacaatgaacttaatttggggcggagggaagagtacgacgttctggacaaaaggaggggacgagatcccgagatgggcggaaagcctcagcgaaggaagaatccgcaagaggggctttataacgaactccagaaagataaaatggcagaagcctatagtgagattgggatgaagggagaaaggaggaggggtaaaggtcacgatgggttgtaccaaggattgagcacagccactaaagatacctatgatgcgctccacatgcaggccctgccgccaaga

SEQ ID NO: 38902 - DNA, 1926 bp, synthetic construct
  source 1..1926: mol_type = other DNA
atggccttaccagtgaccgccttgctcctgccgctggccttgctgctccacgccgccaggccgcagatcgtgctgacacagagccctgccatcatgtccgcttctcccggcgagaaagtgaccatgacatgtagcgccagcagcagcgtgtccttcatgcactggtatcagcagaagtccggcacaagccccaagcggtggatctacgataccagcacactggcctctggcgtgccagccagatttggcggatctggcagcggcacatcttacagcctgaccatcagcagcatggaagccgaagatgccgccacctactactgccagcagtggtccagcaatcccctgacatttggagccggcaccaagctggaactgaagagactcgagggacagcctaaggccaatcctaccgtgacactgttccctccaagcagcgaagaactccaggccaacaaggccacacttgtgtgcctgatctccgacttctaccctggggctgtgacagtggcttggaaggccgatggatctcctgtgaaagccggcgtggaaaccaccaagccatccaagcagagcaacaacaaatacgccgccagctcctacctgagcctgacacctgagcagtggaagtcccacagatcctacagctgccaagtgacccacgaaggcagcaccgtggaaaagacagtggcccctacagagtgcagccccatcaagaccgatgtgattacaatggaccccaaggacaactgctccaaggacgccaacgataccctgctgctccagctgaccaacaccagcgcctactacatgtacttgttgctgctgctgaagtccgtggtgtacttcgccatcatcacatgctgcctgctgcggagaaccgccttctgctgcaacggcgagaagtctagggccaagcgatctggatctggagcaacaaacttctcactactcaaacaagcaggtgacgtggaggagaatcccgggcctactagtatggactggatttggcgcatccttttccttgtcggcgctgctaccggcgcgcattccttcgaacaagttcagctgcaacagagcggccctgagctggttaagcctggcgcttctgtgcggatctcttgcaaggccagcggctacaccttcaccagctactacatccactgggtcaagcagcggcctggacagggactcgaatggatcggctggatctaccccggcaacctgaacaccaagtacaacgagaagttcaagggcaaagccacactgaccgccgacaagagcagcagcacagcctacatgcagctgagcagcctgacaagcgaggacagcgccgtgtacttctgcgccagatacgactggtacttcgacgtgtggggagccggaaccaccgtgacagtttcttctacgcgtgcctctacaaagggaccctccgtgtttcctctggctcccagcagcaagtctacaagcggaggaacagccgctctgggctgcctggtcaaggattactttcccgagcctgtgaccgtgtcctggaatagcggagcactgacaagcggcgtgcacacctttccagccgtgctgcaaagcagcggcctgtactctctgagcagcgtggtcacagtgcctagctctagcctgggcacccagacctacatctgcaatgtgaaccacaagcctagcaacaccaaggtggacaagagagtggaacccaagagctgtgaagtgaaaaccgactccaccgaccacgtgaagcccaaagagacagagaacaccaagcagcccagcaagagctgccacaagcccaaggccatcgtgcacaccgagaaagtgaacatgatgagcctgaccgtgctgggcctgcggatgctgttcgccaaaaccgtggccgtgaacttcctgctgaccgccaagctgttcttcctc

SEQ ID NO: 38903 - DNA, 1860 bp, synthetic construct
  source 1..1860: mol_type = other DNA
atggccttaccagtgaccgccttgctcctgccgctggccttgctgctccacgccgccaggccgcagatcgtgctgacacagagccctgccatcatgtccgcttctcccggcgagaaagtgaccatgacatgtagcgccagcagcagcgtgtccttcatgcactggtatcagcagaagtccggcacaagccccaagcggtggatctacgataccagcacactggcctctggcgtgccagccagatttggcggatctggcagcggcacatcttacagcctgaccatcagcagcatggaagccgaagatgccgccacctactactgccagcagtggtccagcaatcccctgacatttggagccggcaccaagctggaactgaagagactcgagggacagcctaaggccaatcctaccgtgacactgttccctccaagcagcgaagaactccaggccaacaaggccacacttgtgtgcctgatctccgacttctaccctggggctgtgacagtggcttggaaggccgatggatctcctgtgaaagccggcgtggaaaccaccaagccatccaagcagagcaacaacaaatacgccgccagctcctacctgagcctgacacctgagcagtggaagtcccacagatcctacagctgccaagtgacccacgaaggcagcaccgtggaaaagacagtggcccctacagagtgcagcggcagagccgattgcggcatcaccagcgccagctaccaccagggcgtgctgagcgccaccatcctgtacgagatcctgctgggcaaggccaccctgtacgccgtgctggtgtctgccctggtgctgatggctatggtcaagcggaaggacagccggggaagggccaagcgatctggatctggagcaacaaacttctcactactcaaacaagcaggtgacgtggaggagaatcccgggcctactagtatggactggatttggcgcatccttttccttgtcggcgctgctaccggcgcgcattccttcgaacaagttcagctgcaacagagcggccctgagctggttaagcctggcgcttctgtgcggatctcttgcaaggccagcggctacaccttcaccagctactacatccactgggtcaagcagcggcctggacagggactcgaatggatcggctggatctaccccggcaacctgaacaccaagtacaacgagaagttcaagggcaaagccacactgaccgccgacaagagcagcagcacagcctacatgcagctgagcagcctgacaagcgaggacagcgccgtgtacttctgcgccagatacgactggtacttcgacgtgtggggagccggaaccaccgtgacagtttcttctacgcgtgcctctacaaagggaccctccgtgtttcctctggctcccagcagcaagtctacaagcggaggaacagccgctctgggctgcctggtcaaggattactttcccgagcctgtgaccgtgtcctggaatagcggagcactgacaagcggcgtgcacacctttccagccgtgctgcaaagcagcggcctgtactctctgagcagcgtggtcacagtgcctagctctagcctgggcacccagacctacatctgcaatgtgaaccacaagcctagcaacaccaaggtggacaagagagtggaacccaagagctgtatccccgaggacacattcttcccaagcagcgacgtgccctgcgacgtgaagctggtggaaaagagcttcgagacagacaccaacctgaacttccagaacctgagcgtgatcggcttcagaatcctgctgctgaaagtggccggctttaacctgctgatgaccctgcggctgtggtccagc

SEQ ID NO: 38904 - DNA, 1860 bp, synthetic construct
  source 1..1860: mol_type = other DNA
atggccttaccagtgaccgccttgctcctgccgctggccttgctgctccacgccgccaggccgcagatcgtgctgacacagagccctgccatcatgtccgcttctcccggcgagaaagtgaccatgacatgtagcgccagcagcagcgtgtccttcatgcactggtatcagcagaagtccggcacaagccccaagcggtggatctacgataccagcacactggcctctggcgtgccagccagatttggcggatctggcagcggcacatcttacagcctgaccatcagcagcatggaagccgaagatgccgccacctactactgccagcagtggtccagcaatcccctgacatttggagccggcaccaagctggaactgaagagactcgagggacagcctaaggccaatcctaccgtgacactgttccctccaagcagcgaagaactccaggccaacaaggccacacttgtgtgcctgatctccgacttctaccctggggctgtgacagtggcttggaaggccgatggatctcctgtgaaagccggcgtggaaaccaccaagccatccaagcagagcaacaacaaatacgccgccagctcctacctgagcctgacacctgagcagtggaagtcccacagatcctacagctgccaagtgacccacgaaggcagcaccgtggaaaagacagtggcccctacagagtgcagcggcagagccgattgcggctttaccagcgagagctaccagcagggcgtgctgagcgccaccatcctgtacgagatcctgctgggcaaggccaccctgtacgccgtgctggtgtctgccctggtgctgatggctatggtcaagcggaaggacagccggggaagggccaagcgatctggatctggagcaacaaacttctcactactcaaacaagcaggtgacgtggaggagaatcccgggcctactagtatggactggatttggcgcatccttttccttgtcggcgctgctaccggcgcgcattccttcgaacaagttcagctgcaacagagcggccctgagctggttaagcctggcgcttctgtgcggatctcttgcaaggccagcggctacaccttcaccagctactacatccactgggtcaagcagcggcctggacagggactcgaatggatcggctggatctaccccggcaacctgaacaccaagtacaacgagaagttcaagggcaaagccacactgaccgccgacaagagcagcagcacagcctacatgcagctgagcagcctgacaagcgaggacagcgccgtgtacttctgcgccagatacgactggtacttcgacgtgtggggagccggaaccaccgtgacagtttcttctacgcgtgcctctacaaagggaccctccgtgtttcctctggctcccagcagcaagtctacaagcggaggaacagccgctctgggctgcctggtcaaggattactttcccgagcctgtgaccgtgtcctggaatagcggagcactgacaagcggcgtgcacacctttccagccgtgctgcaaagcagcggcctgtactctctgagcagcgtggtcacagtgcctagctctagcctgggcacccagacctacatctgcaatgtgaaccacaagcctagcaacaccaaggtggacaagagagtggaacccaagagctgtatccccgaggacacattcttcccaagccccgagagcagctgcgacgtgaagctggtggaaaagagcttcgagacagacaccaacctgaacttccagaacctgagcgtgatcggcttcagaatcctgctgctgaaagtggccggctttaacctgctgatgaccctgcggctgtggtccagc

SEQ ID NO: 38905 - DNA, 1338 bp, synthetic construct
  source 1..1338: mol_type = other DNA
atggccttaccagtgaccgccttgctcctgccgctggccttgctgctccacgccgccaggccgcagatcgtgctgacacagagccctgccatcatgtccgcttctcccggcgagaaagtgaccatgacatgtagcgccagcagcagcgtgtccttcatgcactggtatcagcagaagtccggcacaagccccaagcggtggatctacgataccagcacactggcctctggcgtgccagccagatttggcggatctggcagcggcacatcttacagcctgaccatcagcagcatggaagccgaagatgccgccacctactactgccagcagtggtccagcaatcccctgacatttggagccggcaccaagctggaactgaagagaggcggaggcggaagtggaggcggaggatctggcggcggaggctctcaagttcagctgcaacagagcggccctgagctggttaagcctggcgcttctgtgcggatctcttgcaaggccagcggctacaccttcaccagctactacatccactgggtcaagcagcggcctggacagggactcgaatggatcggctggatctaccccggcaacctgaacaccaagtacaacgagaagttcaagggcaaagccacactgaccgccgacaagagcagcagcacagcctacatgcagctgagcagcctgacaagcgaggacagcgccgtgtacttctgcgccagatacgactggtacttcgacgtgtggggagccggaaccaccgtgacagtttcttctacgcgtgacggtaacgaggagatgggaggaatcactcaaaccccttacaaagtctcaatttcaggaacaactgttatccttacatgtccccagtatcctggcagcgagatcctttggcagcataacgacaagaatatagggggagatgaagacgataagaatatcggatctgacgaggatcacttgagcctgaaagagttctccgagcttgaacaaagcggatattatgtgtgctatccgcgcgggtcaaagccggaagacgctaacttttacctttatctccgagccagagtgtgcgaaaattgcatggaaatggacgttatgtccgttgctacaatagttatcgtagatatatgcatcacgggtggactgcttctgctggtttattattggtccaagaatagaaaggccaaagctaaacccgtgaccagaggcgctggcgcaggcggaaggcaaaggggacaaaacaaagaacggccaccaccagtgccaaatccagattatgagcctattcggaaaggacagagggacctgtactctggcctgaatcagagaagaatc

SEQ ID NO: 38906 - DNA, 1233 bp, synthetic construct
  source 1..1233: mol_type = other DNA
atggccttaccagtgaccgccttgctcctgccgctggccttgctgctccacgccgccaggccgcagatcgtgctgacacagagccctgccatcatgtccgcttctcccggcgagaaagtgaccatgacatgtagcgccagcagcagcgtgtccttcatgcactggtatcagcagaagtccggcacaagccccaagcggtggatctacgataccagcacactggcctctggcgtgccagccagatttggcggatctggcagcggcacatcttacagcctgaccatcagcagcatggaagccgaagatgccgccacctactactgccagcagtggtccagcaatcccctgacatttggagccggcaccaagctggaactgaagagaggcggaggcggaagtggaggcggaggatctggcggcggaggctctcaagttcagctgcaacagagcggccctgagctggttaagcctggcgcttctgtgcggatctcttgcaaggccagcggctacaccttcaccagctactacatccactgggtcaagcagcggcctggacagggactcgaatggatcggctggatctaccccggcaacctgaacaccaagtacaacgagaagttcaagggcaaagccacactgaccgccgacaagagcagcagcacagcctacatgcagctgagcagcctgacaagcgaggacagcgccgtgtacttctgcgccagatacgactggtacttcgacgtgtggggagccggaaccaccgtgacagtttcttctacgcgtttcaagatccccatcgaggaactggaagatcgggtgttcgtgaactgcaacacctctatcacctgggtggaaggcaccgtgggaacactgctgagcgacatcaccagactggacctcggcaagcggattctggaccctcggggcatctacagatgcaacggcaccgacatctacaaggacaaagaaagcaccgtgcaggtccactacagaatgtgccagtcctgcgtggaactggaccctgctacagtggccggcatcatcgtgaccgatgtgatcgctactctgctgctggctctgggagtgttctgcttcgccggacacgaaacaggcagactgtctggcgctgccgatacacaggccctgctgagaaacgaccaagtgtatcagcccctgcgcgacagagatgatgcccagtattctcacctcggcggcaactgggctagaaacaag

SEQ ID NO: 38907 - DNA, 1263 bp, synthetic construct
  source 1..1263: mol_type = other DNA
atggccttaccagtgaccgccttgctcctgccgctggccttgctgctccacgccgccaggccgcagatcgtgctgacacagagccctgccatcatgtccgcttctcccggcgagaaagtgaccatgacatgtagcgccagcagcagcgtgtccttcatgcactggtatcagcagaagtccggcacaagccccaagcggtggatctacgataccagcacactggcctctggcgtgccagccagatttggcggatctggcagcggcacatcttacagcctgaccatcagcagcatggaagccgaagatgccgccacctactactgccagcagtggtccagcaatcccctgacatttggagccggcaccaagctggaactgaagagaggcggaggcggaagtggaggcggaggatctggcggcggaggctctcaagttcagctgcaacagagcggccctgagctggttaagcctggcgcttctgtgcggatctcttgcaaggccagcggctacaccttcaccagctactacatccactgggtcaagcagcggcctggacagggactcgaatggatcggctggatctaccccggcaacctgaacaccaagtacaacgagaagttcaagggcaaagccacactgaccgccgacaagagcagcagcacagcctacatgcagctgagcagcctgacaagcgaggacagcgccgtgtacttctgcgccagatacgactggtacttcgacgtgtggggagccggaaccaccgtgacagtttcttctacgcgtcagagcatcaagggcaaccacctggtcaaggtgtacgactaccaagaggacggcagcgtgctgctgacatgtgatgccgaggccaagaacatcacctggtttaaggacggcaagatgatcggcttcctgaccgaggacaagaagaagtggaacctgggcagcaacgctaaggaccccagaggcatgtatcagtgcaagggcagccagaacaagagcaagcccctccaggtgtactaccggatgtgccagaactgcatcgagctgaacgccgctaccatcagcggctttctgttcgccgagatcgtgtccatcttcgtgctggccgtgggcgtgtactttatcgctggacaggatggcgtgcggcagagcagagcttccgataagcaaaccctgctgcctaacgaccagctgtaccagcctctgaaggacagagaggacgaccagtacagccacctccagggcaatcagctgagaagaaac

SEQ ID NO: 38908 - DNA, 1212 bp, synthetic construct
  source 1..1212: mol_type = other DNA
atggccttaccagtgaccgccttgctcctgccgctggccttgctgctccacgccgccaggccgcagatcgtgctgacacagagccctgccatcatgtccgcttctcccggcgagaaagtgaccatgacatgtagcgccagcagcagcgtgtccttcatgcactggtatcagcagaagtccggcacaagccccaagcggtggatctacgataccagcacactggcctctggcgtgccagccagatttggcggatctggcagcggcacatcttacagcctgaccatcagcagcatggaagccgaagatgccgccacctactactgccagcagtggtccagcaatcccctgacatttggagccggcaccaagctggaactgaagagaggcggaggcggaagtggaggcggaggatctggcggcggaggctctcaagttcagctgcaacagagcggccctgagctggttaagcctggcgcttctgtgcggatctcttgcaaggccagcggctacaccttcaccagctactacatccactgggtcaagcagcggcctggacagggactcgaatggatcggctggatctaccccggcaacctgaacaccaagtacaacgagaagttcaagggcaaagccacactgaccgccgacaagagcagcagcacagcctacatgcagctgagcagcctgacaagcgaggacagcgccgtgtacttctgcgccagatacgactggtacttcgacgtgtggggagccggaaccaccgtgacagtttcttctacgcgtcagagttttgggttgttggaccctaaattgtgctatctgttggacggaatcctgttcatttacggagtgatcctgaccgcattgttcctgcgggttaagttttccagatccgcagacgcacccgcttaccaacaagggcagaaccaactctacaatgaacttaatttggggcggagggaagagtacgacgttctggacaaaaggaggggacgagatcccgagatgggcggaaagcctcagcgaaggaagaatccgcaagaggggctttataacgaactccagaaagataaaatggcagaagcctatagtgagattgggatgaagggagaaaggaggaggggtaaaggtcacgatgggttgtaccaaggattgagcacagccactaaagatacctatgatgcgctccacatgcaggccctgccgccaaga

SEQ ID NO: 38909 - DNA, 1497 bp, synthetic construct
  source 1..1497: mol_type = other DNA
atggccttaccagtgaccgccttgctcctgccgctggccttgctgctccacgccgccaggccgcagatcgtgctgacacagagccctgccatcatgtccgcttctcccggcgagaaagtgaccatgacatgtagcgccagcagcagcgtgtccttcatgcactggtatcagcagaagtccggcacaagccccaagcggtggatctacgataccagcacactggcctctggcgtgccagccagatttggcggatctggcagcggcacatcttacagcctgaccatcagcagcatggaagccgaagatgccgccacctactactgccagcagtggtccagcaatcccctgacatttggagccggcaccaagctggaactgaagagaggcggaggcggaagtggaggcggaggatctggcggcggaggctctcaagttcagctgcaacagagcggccctgagctggttaagcctggcgcttctgtgcggatctcttgcaaggccagcggctacaccttcaccagctactacatccactgggtcaagcagcggcctggacagggactcgaatggatcggctggatctaccccggcaacctgaacaccaagtacaacgagaagttcaagggcaaagccacactgaccgccgacaagagcagcagcacagcctacatgcagctgagcagcctgacaagcgaggacagcgccgtgtacttctgcgccagatacgactggtacttcgacgtgtggggagccggaaccaccgtgacagtttcttctacgcgtggaatgaggactgaggatcttcccaaagctgtcgtctttctcgaaccccaatggtatcgggtgctcgaaaaagactctgtgacactgaaatgccaaggggcctactctcccgaggacaactccacacagtggtttcataatgagtccctcatcagctctcaggccagctcttatttcattgatgccgctacagtggacgactccggcgagtatcggtgtcagaccaatctgtctacactgtctgaccccgtgcagcttgaggtccacattggatggttgctcttgcaagccccacgctgggttttcaaagaggaagatccaatccatctgcggtgccacagctggaaaaacaccgctctccacaaagtcacatacctgcaaaatggcaaaggacgcaaatacttccatcacaattccgatttttacattccgaaggctaccctgaaagacagcggcagctatttctgccggggactcgtcggctccaagaatgtgtcctccgaaaccgtgaatatcacgattacccaaggactggctgtgcctacaatctctagcttctttccgcctggataccaagtctccttctgtcttgtgatggtcctcctgtttgctgtggacacaggactgtacttttccgtgaaaacgaacatccgcagctccacacgcgattggaaagatcacaagtttaaatggcgcaaagatccccaggacaag

SEQ ID NO: 38910 - DNA, 1422 bp, synthetic construct
  source 1..1422: mol_type = other DNA
atggccttaccagtgaccgccttgctcctgccgctggccttgctgctccacgccgccaggccgcagatcgtgctgacacagagccctgccatcatgtccgcttctcccggcgagaaagtgaccatgacatgtagcgccagcagcagcgtgtccttcatgcactggtatcagcagaagtccggcacaagccccaagcggtggatctacgataccagcacactggcctctggcgtgccagccagatttggcggatctggcagcggcacatcttacagcctgaccatcagcagcatggaagccgaagatgccgccacctactactgccagcagtggtccagcaatcccctgacatttggagccggcaccaagctggaactgaagagaggcggaggcggaagtggaggcggaggatctggcggcggaggctctcaagttcagctgcaacagagcggccctgagctggttaagcctggcgcttctgtgcggatctcttgcaaggccagcggctacaccttcaccagctactacatccactgggtcaagcagcggcctggacagggactcgaatggatcggctggatctaccccggcaacctgaacaccaagtacaacgagaagttcaagggcaaagccacactgaccgccgacaagagcagcagcacagcctacatgcagctgagcagcctgacaagcgaggacagcgccgtgtacttctgcgccagatacgactggtacttcgacgtgtggggagccggaaccaccgtgacagtttcttctacgcgtggaatgaggactgaggatcttcccaaagctgtcgtctttctcgaaccccaatggtatcgggtgctcgaaaaagactctgtgacactgaaatgccaaggggcctactctcccgaggacaactccacacagtggtttcataatgagtccctcatcagctctcaggccagctcttatttcattgatgccgctacagtggacgactccggcgagtatcggtgtcagaccaatctgtctacactgtctgaccccgtgcagcttgaggtccacattggatggttgctcttgcaagccccacgctgggttttcaaagaggaagatccaatccatctgcggtgccacagctggaaaaacaccgctctccacaaagtcacatacctgcaaaatggcaaaggacgcaaatacttccatcacaattccgatttttacattccgaaggctaccctgaaagacagcggcagctatttctgccggggactcgtcggctccaagaatgtgtcctccgaaaccgtgaatatcacgattacccaaggactggctgtgcctacaatctctagcttctttccgcctggataccaagtctccttctgtcttgtgatggtcctcctgtttgctgtggacacaggactgtacttttccgtg

SEQ ID NO: 38911 - DNA, 1425 bp, synthetic construct
  source 1..1425: mol_type = other DNA
atggccttaccagtgaccgccttgctcctgccgctggccttgctgctccacgccgccaggccgcagatcgtgctgacacagagccctgccatcatgtccgcttctcccggcgagaaagtgaccatgacatgtagcgccagcagcagcgtgtccttcatgcactggtatcagcagaagtccggcacaagccccaagcggtggatctacgataccagcacactggcctctggcgtgccagccagatttggcggatctggcagcggcacatcttacagcctgaccatcagcagcatggaagccgaagatgccgccacctactactgccagcagtggtccagcaatcccctgacatttggagccggcaccaagctggaactgaagagaggcggaggcggaagtggaggcggaggatctggcggcggaggctctcaagttcagctgcaacagagcggccctgagctggttaagcctggcgcttctgtgcggatctcttgcaaggccagcggctacaccttcaccagctactacatccactgggtcaagcagcggcctggacagggactcgaatggatcggctggatctaccccggcaacctgaacaccaagtacaacgagaagttcaagggcaaagccacactgaccgccgacaagagcagcagcacagcctacatgcagctgagcagcctgacaagcgaggacagcgccgtgtacttctgcgccagatacgactggtacttcgacgtgtggggagccggaaccaccgtgacagtttcttctacgcgtggaatgaggactgaggatcttcccaaagctgtcgtctttctcgaaccccaatggtatcgggtgctcgaaaaagactctgtgacactgaaatgccaaggggcctactctcccgaggacaactccacacagtggtttcataatgagtccctcatcagctctcaggccagctcttatttcattgatgccgctacagtggacgactccggcgagtatcggtgtcagaccaatctgtctacactgtctgaccccgtgcagcttgaggtccacattggatggttgctcttgcaagccccacgctgggttttcaaagaggaagatccaatccatctgcggtgccacagctggaaaaacaccgctctccacaaagtcacatacctgcaaaatggcaaaggacgcaaatacttccatcacaattccgatttttacattccgaaggctaccctgaaagacagcggcagctatttctgccggggactcgtcggctccaagaatgtgtcctccgaaaccgtgaatatcacgattacccaaggactggctgtgcctacaatctctagcttctttccgcctggataccaagtctccttctgtcttgtgatggtcctcctgtttgctgtggacacaggactgtacttttccgtgaaa

SEQ ID NO: 38912 - DNA, 2157 bp, synthetic construct
  source 1..2157: mol_type = other DNA
atggccttaccagtgaccgccttgctcctgccgctggccttgctgctccacgccgccaggccgcagatcgtgctgacacagagccctgccatcatgtccgcttctcccggcgagaaagtgaccatgacatgtagcgccagcagcagcgtgtccttcatgcactggtatcagcagaagtccggcacaagccccaagcggtggatctacgataccagcacactggcctctggcgtgccagccagatttggcggatctggcagcggcacatcttacagcctgaccatcagcagcatggaagccgaagatgccgccacctactactgccagcagtggtccagcaatcccctgacatttggagccggcaccaagctggaactgaagagactcgagggacagcctaaggccaatcctaccgtgacactgttccctccaagcagcgaagaactccaggccaacaaggccacacttgtgtgcctgatctccgacttctaccctggggctgtgacagtggcttggaaggccgatggatctcctgtgaaagccggcgtggaaaccaccaagccatccaagcagagcaacaacaaatacgccgccagctcctacctgagcctgacacctgagcagtggaagtcccacagatcctacagctgccaagtgacccacgaaggcagcaccgtggaaaagacagtggcccctacagagtgcagcggatcccagagcttcggcctgctggaccccaagctgtgctacctgctggatggcatcctgttcatctacggcgtgatcctgaccgccctgttcctgagagtgaagttcagcagaagcgccgacgcccctgcctaccagcagggacagaaccaactgtacaacgagctgaacctgggcagacgggaagagtacgacgtgctggacaagcggagaggcagggaccctgagatgggcggaaagccccagcggagaaagaacccccaggaaggactgtataacgaactccagaaagacaagatggccgaagcctacagcgagatcggcatgaagggcgagcggagaagaggcaagggccacgatggcctgtaccagggcctgagcaccgccaccaaggacacctatgacgccctgcacatgcaggccctgcctccaagaagggccaagcgatctggatctggagcaacaaacttctcactactcaaacaagcaggtgacgtggaggagaatcccgggcctactagtatggactggatttggcgcatccttttccttgtcggcgctgctaccggcgcgcattccttcgaacaagttcagctgcaacagagcggccctgagctggttaagcctggcgcttctgtgcggatctcttgcaaggccagcggctacaccttcaccagctactacatccactgggtcaagcagcggcctggacagggactcgaatggatcggctggatctaccccggcaacctgaacaccaagtacaacgagaagttcaagggcaaagccacactgaccgccgacaagagcagcagcacagcctacatgcagctgagcagcctgacaagcgaggacagcgccgtgtacttctgcgccagatacgactggtacttcgacgtgtggggagccggaaccaccgtgacagtttcttctacgcgtgcctctacaaagggaccctccgtgtttcctctggctcccagcagcaagtctacaagcggaggaacagccgctctgggctgcctggtcaaggattactttcccgagcctgtgaccgtgtcctggaatagcggagcactgacaagcggcgtgcacacctttccagccgtgctgcaaagcagcggcctgtactctctgagcagcgtggtcacagtgcctagctctagcctgggcacccagacctacatctgcaatgtgaaccacaagcctagcaacaccaaggtggacaagagagtggaacccaagagctgtggtaccatcactcaaggtttggcagtgtcaaccatctcatcattctttccacctggctaccaagtgtccttctgcctggtcatggtgctgctgttcgccgtggataccggcctgtacttcagcgtcaagaccaacatccggtccagcaccagagactggaaggaccacaagttcaagtggcggaaggaccctcaggacaag

SEQ ID NO: 38913 - DNA, 2202 bp, synthetic construct
  source 1..2202: mol_type = other DNA
atggccttaccagtgaccgccttgctcctgccgctggccttgctgctccacgccgccaggccgcagatcgtgctgacacagagccctgccatcatgtccgcttctcccggcgagaaagtgaccatgacatgtagcgccagcagcagcgtgtccttcatgcactggtatcagcagaagtccggcacaagccccaagcggtggatctacgataccagcacactggcctctggcgtgccagccagatttggcggatctggcagcggcacatcttacagcctgaccatcagcagcatggaagccgaagatgccgccacctactactgccagcagtggtccagcaatcccctgacatttggagccggcaccaagctggaactgaagagactcgaggacctgaagaacgtgttcccacctgaggtggccgtgttcgagcctagcgaggccgagatcagccacacccagaaagccaccctcgtgtgcctggctaccggcttctaccccgaccatgtggaactgtcttggtgggtcaacggcaaagaggtgcacagcggcgtgtctaccgacccccagccactgaaagaacagcccgccctgaacgacagccggtactgcctgagcagcagactgagagtgtccgccaccttctggcagaacccccggaaccacttcagatgccaggtgcagttctacggcctgagcgagaacgacgagtggacccaggacagagccaagcccgtgacccagatcgtgtctgccgaagcctggggcagagccgattgcggatcccagagcttcggcctgctggaccccaagctgtgctacctgctggatggcatcctgttcatctacggcgtgatcctgaccgccctgttcctgagagtgaagttcagcagaagcgccgacgcccctgcctaccagcagggacagaaccaactgtacaacgagctgaacctgggcagacgggaagagtacgacgtgctggacaagcggagaggcagggaccctgagatgggcggaaagccccagcggagaaagaacccccaggaaggactgtataacgaactccagaaagacaagatggccgaagcctacagcgagatcggcatgaagggcgagcggagaagaggcaagggccacgatggcctgtaccagggcctgagcaccgccaccaaggacacctatgacgccctgcacatgcaggccctgcctccaagaagggccaagcgatctggatctggagcaacaaacttctcactactcaaacaagcaggtgacgtggaggagaatcccgggcctactagtatggactggatttggcgcatccttttccttgtcggcgctgctaccggcgcgcattccttcgaacaagttcagctgcaacagagcggccctgagctggttaagcctggcgcttctgtgcggatctcttgcaaggccagcggctacaccttcaccagctactacatccactgggtcaagcagcggcctggacagggactcgaatggatcggctggatctaccccggcaacctgaacaccaagtacaacgagaagttcaagggcaaagccacactgaccgccgacaagagcagcagcacagcctacatgcagctgagcagcctgacaagcgaggacagcgccgtgtacttctgcgccagatacgactggtacttcgacgtgtggggagccggaaccaccgtgacagtttcttctacgcgtatccagaaccctgatcctgccgtgtaccagctgcgggatagcaagagcagcgacaagagcgtgtgtctgttcaccgacttcgacagccagaccaacgtgtcccagagcaaggactccgacgtgtacatcaccgataagaccgtgctggacatgcggagcatggacttcaagagcaactccgccgtggcctggtccaacaagtccgatttcgcctgcgccaacgccttcaacaacagcattatccccgaggacacattcttcccaagccccgagagcagctgcggtaccatcactcaaggtttggcagtgtcaaccatctcatcattctttccacctggctaccaagtgtccttctgcctggtcatggtgctgctgttcgccgtggataccggcctgtacttcagcgtcaagaccaacatccggtccagcaccagagactggaaggaccacaagttcaagtggcggaaggaccctcaggacaag

SEQ ID NO: 38914 - DNA, 2127 bp, synthetic construct
  source 1..2127: mol_type = other DNA
atggccttaccagtgaccgccttgctcctgccgctggccttgctgctccacgccgccaggccgcagatcgtgctgacacagagccctgccatcatgtccgcttctcccggcgagaaagtgaccatgacatgtagcgccagcagcagcgtgtccttcatgcactggtatcagcagaagtccggcacaagccccaagcggtggatctacgataccagcacactggcctctggcgtgccagccagatttggcggatctggcagcggcacatcttacagcctgaccatcagcagcatggaagccgaagatgccgccacctactactgccagcagtggtccagcaatcccctgacatttggagccggcaccaagctggaactgaagagactcgaggacctgaagaacgtgttcccacctgaggtggccgtgttcgagcctagcgaggccgagatcagccacacccagaaagccaccctcgtgtgcctggctaccggcttctaccccgaccatgtggaactgtcttggtgggtcaacggcaaagaggtgcacagcggcgtgtctaccgacccccagccactgaaagaacagcccgccctgaacgacagccggtactgcctgagcagcagactgagagtgtccgccaccttctggcagaacccccggaaccacttcagatgccaggtgcagttctacggcctgagcgagaacgacgagtggacccaggacagagccaagcccgtgacccagatcgtgtctgccgaagcctggggcagagccgattgcggatcccagagcttcggcctgctggaccccaagctgtgctacctgctggatggcatcctgttcatctacggcgtgatcctgaccgccctgttcctgagagtgaagttcagcagaagcgccgacgcccctgcctaccagcagggacagaaccaactgtacaacgagctgaacctgggcagacgggaagagtacgacgtgctggacaagcggagaggcagggaccctgagatgggcggaaagccccagcggagaaagaacccccaggaaggactgtataacgaactccagaaagacaagatggccgaagcctacagcgagatcggcatgaagggcgagcggagaagaggcaagggccacgatggcctgtaccagggcctgagcaccgccaccaaggacacctatgacgccctgcacatgcaggccctgcctccaagaagggccaagcgatctggatctggagcaacaaacttctcactactcaaacaagcaggtgacgtggaggagaatcccgggcctactagtatggactggatttggcgcatccttttccttgtcggcgctgctaccggcgcgcattccttcgaacaagttcagctgcaacagagcggccctgagctggttaagcctggcgcttctgtgcggatctcttgcaaggccagcggctacaccttcaccagctactacatccactgggtcaagcagcggcctggacagggactcgaatggatcggctggatctaccccggcaacctgaacaccaagtacaacgagaagttcaagggcaaagccacactgaccgccgacaagagcagcagcacagcctacatgcagctgagcagcctgacaagcgaggacagcgccgtgtacttctgcgccagatacgactggtacttcgacgtgtggggagccggaaccaccgtgacagtttcttctacgcgtatccagaaccctgatcctgccgtgtaccagctgcgggatagcaagagcagcgacaagagcgtgtgtctgttcaccgacttcgacagccagaccaacgtgtcccagagcaaggactccgacgtgtacatcaccgataagaccgtgctggacatgcggagcatggacttcaagagcaactccgccgtggcctggtccaacaagtccgatttcgcctgcgccaacgccttcaacaacagcattatccccgaggacacattcttcccaagccccgagagcagctgcggtaccatcactcaaggtttggcagtgtcaaccatctcatcattctttccacctggctaccaagtgtccttctgcctggtcatggtgctgctgttcgccgtggataccggcctgtacttcagcgtc

SEQ ID NO: 38915 - DNA, 2130 bp, synthetic construct
  source 1..2130: mol_type = other DNA
atggccttaccagtgaccgccttgctcctgccgctggccttgctgctccacgccgccaggccgcagatcgtgctgacacagagccctgccatcatgtccgcttctcccggcgagaaagtgaccatgacatgtagcgccagcagcagcgtgtccttcatgcactggtatcagcagaagtccggcacaagccccaagcggtggatctacgataccagcacactggcctctggcgtgccagccagatttggcggatctggcagcggcacatcttacagcctgaccatcagcagcatggaagccgaagatgccgccacctactactgccagcagtggtccagcaatcccctgacatttggagccggcaccaagctggaactgaagagactcgaggacctgaagaacgtgttcccacctgaggtggccgtgttcgagcctagcgaggccgagatcagccacacccagaaagccaccctcgtgtgcctggctaccggcttctaccccgaccatgtggaactgtcttggtgggtcaacggcaaagaggtgcacagcggcgtgtctaccgacccccagccactgaaagaacagcccgccctgaacgacagccggtactgcctgagcagcagactgagagtgtccgccaccttctggcagaacccccggaaccacttcagatgccaggtgcagttctacggcctgagcgagaacgacgagtggacccaggacagagccaagcccgtgacccagatcgtgtctgccgaagcctggggcagagccgattgcggatcccagagcttcggcctgctggaccccaagctgtgctacctgctggatggcatcctgttcatctacggcgtgatcctgaccgccctgttcctgagagtgaagttcagcagaagcgccgacgcccctgcctaccagcagggacagaaccaactgtacaacgagctgaacctgggcagacgggaagagtacgacgtgctggacaagcggagaggcagggaccctgagatgggcggaaagccccagcggagaaagaacccccaggaaggactgtataacgaactccagaaagacaagatggccgaagcctacagcgagatcggcatgaagggcgagcggagaagaggcaagggccacgatggcctgtaccagggcctgagcaccgccaccaaggacacctatgacgccctgcacatgcaggccctgcctccaagaagggccaagcgatctggatctggagcaacaaacttctcactactcaaacaagcaggtgacgtggaggagaatcccgggcctactagtatggactggatttggcgcatccttttccttgtcggcgctgctaccggcgcgcattccttcgaacaagttcagctgcaacagagcggccctgagctggttaagcctggcgcttctgtgcggatctcttgcaaggccagcggctacaccttcaccagctactacatccactgggtcaagcagcggcctggacagggactcgaatggatcggctggatctaccccggcaacctgaacaccaagtacaacgagaagttcaagggcaaagccacactgaccgccgacaagagcagcagcacagcctacatgcagctgagcagcctgacaagcgaggacagcgccgtgtacttctgcgccagatacgactggtacttcgacgtgtggggagccggaaccaccgtgacagtttcttctacgcgtatccagaaccctgatcctgccgtgtaccagctgcgggatagcaagagcagcgacaagagcgtgtgtctgttcaccgacttcgacagccagaccaacgtgtcccagagcaaggactccgacgtgtacatcaccgataagaccgtgctggacatgcggagcatggacttcaagagcaactccgccgtggcctggtccaacaagtccgatttcgcctgcgccaacgccttcaacaacagcattatccccgaggacacattcttcccaagccccgagagcagctgcggtaccatcactcaaggtttggcagtgtcaaccatctcatcattctttccacctggctaccaagtgtccttctgcctggtcatggtgctgctgttcgccgtggataccggcctgtacttcagcgtcaag

SEQ ID NO: 38916 - DNA, 2133 bp, synthetic construct
  source 1..2133: mol_type = other DNA
atggccttaccagtgaccgccttgctcctgccgctggccttgctgctccacgccgccaggccgcagatcgtgctgacacagagccctgccatcatgtccgcttctcccggcgagaaagtgaccatgacatgtagcgccagcagcagcgtgtccttcatgcactggtatcagcagaagtccggcacaagccccaagcggtggatctacgataccagcacactggcctctggcgtgccagccagatttggcggatctggcagcggcacatcttacagcctgaccatcagcagcatggaagccgaagatgccgccacctactactgccagcagtggtccagcaatcccctgacatttggagccggcaccaagctggaactgaagagactcgaggacctgaagaacgtgttcccacctgaggtggccgtgttcgagcctagcgaggccgagatcagccacacccagaaagccaccctcgtgtgcctggctaccggcttctaccccgaccatgtggaactgtcttggtgggtcaacggcaaagaggtgcacagcggcgtgtctaccgacccccagccactgaaagaacagcccgccctgaacgacagccggtactgcctgagcagcagactgagagtgtccgccaccttctggcagaacccccggaaccacttcagatgccaggtgcagttctacggcctgagcgagaacgacgagtggacccaggacagagccaagcccgtgacccagatcgtgtctgccgaagcctggggcagagccgattgcggatcccagagcttcggcctgctggaccccaagctgtgctacctgctggatggcatcctgttcatctacggcgtgatcctgaccgccctgttcctgagagtgaagttcagcagaagcgccgacgcccctgcctaccagcagggacagaaccaactgtacaacgagctgaacctgggcagacgggaagagtacgacgtgctggacaagcggagaggcagggaccctgagatgggcggaaagccccagcggagaaagaacccccaggaaggactgtataacgaactccagaaagacaagatggccgaagcctacagcgagatcggcatgaagggcgagcggagaagaggcaagggccacgatggcctgtaccagggcctgagcaccgccaccaaggacacctatgacgccctgcacatgcaggccctgcctccaagaagggccaagcgatctggatctggagcaacaaacttctcactactcaaacaagcaggtgacgtggaggagaatcccgggcctactagtatggactggatttggcgcatccttttccttgtcggcgctgctaccggcgcgcattccttcgaacaagttcagctgcaacagagcggccctgagctggttaagcctggcgcttctgtgcggatctcttgcaaggccagcggctacaccttcaccagctactacatccactgggtcaagcagcggcctggacagggactcgaatggatcggctggatctaccccggcaacctgaacaccaagtacaacgagaagttcaagggcaaagccacactgaccgccgacaagagcagcagcacagcctacatgcagctgagcagcctgacaagcgaggacagcgccgtgtacttctgcgccagatacgactggtacttcgacgtgtggggagccggaaccaccgtgacagtttcttctacgcgtatccagaaccctgatcctgccgtgtaccagctgcgggatagcaagagcagcgacaagagcgtgtgtctgttcaccgacttcgacagccagaccaacgtgtcccagagcaaggactccgacgtgtacatcaccgataagaccgtgctggacatgcggagcatggacttcaagagcaactccgccgtggcctggtccaacaagtccgatttcgcctgcgccaacgccttcaacaacagcattatccccgaggacacattcttcccaagccccgagagcagctgcggtaccatcactcaaggtttggcagtgtcaaccatctcatcattctttccacctggctaccaagtgtccttctgcctggtcatggtgctgctgttcgccgtggataccggcctgtacttcagcgtcaagacc

SEQ ID NO: 38917 - DNA, 1944 bp, synthetic construct
  source 1..1944: mol_type = other DNA
atggccttaccagtgaccgccttgctcctgccgctggccttgctgctccacgccgccaggccgcagatcgtgctgacacagagccctgccatcatgtccgcttctcccggcgagaaagtgaccatgacatgtagcgccagcagcagcgtgtccttcatgcactggtatcagcagaagtccggcacaagccccaagcggtggatctacgataccagcacactggcctctggcgtgccagccagatttggcggatctggcagcggcacatcttacagcctgaccatcagcagcatggaagccgaagatgccgccacctactactgccagcagtggtccagcaatcccctgacatttggagccggcaccaagctggaactgaagagactcgagggacagcctaaggccaatcctaccgtgacactgttccctccaagcagcgaagaactccaggccaacaaggccacacttgtgtgcctgatctccgacttctaccctggggctgtgacagtggcttggaaggccgatggatctcctgtgaaagccggcgtggaaaccaccaagccatccaagcagagcaacaacaaatacgccgccagctcctacctgagcctgacacctgagcagtggaagtcccacagatcctacagctgccaagtgacccacgaaggcagcaccgtggaaaagacagtggcccctacagagtgcagcggatccctgggagagcctcagctgtgctatatcctggacgccatcctgtttctgtacggcatcgtgctgaccctgctgtactgccggctgaagatccaagtgcggaaggccgccatcaccagctacgagaaatccgacggcgtgtacaccggcctgagcaccagaaatcaagagacatacgagacactgaagcacgaaaagcctccacaaagggccaagcgatctggatctggagcaacaaacttctcactactcaaacaagcaggtgacgtggaggagaatcccgggcctactagtatggactggatttggcgcatccttttccttgtcggcgctgctaccggcgcgcattccttcgaacaagttcagctgcaacagagcggccctgagctggttaagcctggcgcttctgtgcggatctcttgcaaggccagcggctacaccttcaccagctactacatccactgggtcaagcagcggcctggacagggactcgaatggatcggctggatctaccccggcaacctgaacaccaagtacaacgagaagttcaagggcaaagccacactgaccgccgacaagagcagcagcacagcctacatgcagctgagcagcctgacaagcgaggacagcgccgtgtacttctgcgccagatacgactggtacttcgacgtgtggggagccggaaccaccgtgacagtttcttctacgcgtgcctctacaaagggaccctccgtgtttcctctggctcccagcagcaagtctacaagcggaggaacagccgctctgggctgcctggtcaaggattactttcccgagcctgtgaccgtgtcctggaatagcggagcactgacaagcggcgtgcacacctttccagccgtgctgcaaagcagcggcctgtactctctgagcagcgtggtcacagtgcctagctctagcctgggcacccagacctacatctgcaatgtgaaccacaagcctagcaacaccaaggtggacaagagagtggaacccaagagctgtggtaccctcggagaaccacagctctgttacattctggatgctatcctgttcctctatgggatcgtcctgacactcctgtattgcagactcaaaattcaagttcgcaaagccgccattacctcttacgagaagagtgatggggtgtacacaggactgtctacccggaatcaagaaacctacgaaaccctcaaacatgagaagccacctcagtaa

SEQ ID NO: 38918 - DNA, 1851 bp, synthetic construct
  source 1..1851: mol_type = other DNA
atggccttaccagtgaccgccttgctcctgccgctggccttgctgctccacgccgccaggccgcagatcgtgctgacacagagccctgccatcatgtccgcttctcccggcgagaaagtgaccatgacatgtagcgccagcagcagcgtgtccttcatgcactggtatcagcagaagtccggcacaagccccaagcggtggatctacgataccagcacactggcctctggcgtgccagccagatttggcggatctggcagcggcacatcttacagcctgaccatcagcagcatggaagccgaagatgccgccacctactactgccagcagtggtccagcaatcccctgacatttggagccggcaccaagctggaactgaagagactcgaggacctgaagaacgtgttcccacctgaggtggccgtgttcgagcctagcgaggccgagatcagccacacccagaaagccaccctcgtgtgcctggctaccggcttctaccccgaccatgtggaactgtcttggtgggtcaacggcaaagaggtgcacagcggcgtgtgtaccgacccccagccactgaaagaacagcccgccctgaacgacagccggtactgcctgagcagcagactgagagtgtccgccaccttctggcagaacccccggaaccacttcagatgccaggtgcagttctacggcctgagcgagaacgacgagtggacccaggacagagccaagcccgtgacccagatcgtgtctgccgaagcctggggcagagccgattgcggctttaccagcgagagctaccagcagggcgtgctgagcgcctactacatgtacttgttgctgctgctgaagtccgtggtgtacttcgccatcatcacatgctgcctgctgcggagaaccgccttctgctgcaacggcgagaagtctagggccaagcgatctggatctggagcaacaaacttctcactactcaaacaagcaggtgacgtggaggagaatcccgggcctactagtatggactggatttggcgcatccttttccttgtcggcgctgctaccggcgcgcattccttcgaacaagttcagctgcaacagagcggccctgagctggttaagcctggcgcttctgtgcggatctcttgcaaggccagcggctacaccttcaccagctactacatccactgggtcaagcagcggcctggacagggactcgaatggatcggctggatctaccccggcaacctgaacaccaagtacaacgagaagttcaagggcaaagccacactgaccgccgacaagagcagcagcacagcctacatgcagctgagcagcctgacaagcgaggacagcgccgtgtacttctgcgccagatacgactggtacttcgacgtgtggggagccggaaccaccgtgacagtttcttctacgcgtatccagaaccctgatcctgccgtgtaccagctgcgggatagcaagagcagcgacaagagcgtgtgtctgttcaccgacttcgacagccagaccaacgtgtcccagagcaaggactccgacgtgtacatcaccgataagtgcgtgctggacatgcggagcatggacttcaagagcaactccgccgtggcctggtccaacaagtccgatttcgcctgcgccaacgccttcaacaacagcattatccccgaggacacattcttcccaagccccgagagcagctgcgacgtgaagctggtggaaaagagcttcgagacagacaccaacctgaacttccagaacctgagcgtgatcggcttcagaatcctgctgctgaaagtggccggctttaacctgctgatgaccctgcggctgtggtccagc

SEQ ID NO: 38919 - DNA, 1872 bp, synthetic construct
  source 1..1872: mol_type = other DNA
atggccttaccagtgaccgccttgctcctgccgctggccttgctgctccacgccgccaggccgcagatcgtgctgacacagagccctgccatcatgtccgcttctcccggcgagaaagtgaccatgacatgtagcgccagcagcagcgtgtccttcatgcactggtatcagcagaagtccggcacaagccccaagcggtggatctacgataccagcacactggcctctggcgtgccagccagatttggcggatctggcagcggcacatcttacagcctgaccatcagcagcatggaagccgaagatgccgccacctactactgccagcagtggtccagcaatcccctgacatttggagccggcaccaagctggaactgaagagactcgaggacaagcagctggacgccgacgtgtcccccaagcctaccatcttcctgccctctatcgccgagacaaagctccagaaggccggcacctacctgtgcctgctggaaaagttcttcccagatgtgattaagatccactggcaggaaaagaagtccaacaccatcctgggcagccaggaaggcaacaccatgaagaccaacgacacctacatgaagttcagctggctgaccgtgcccgagaagtccctggacaaagaacacagatgcatcgtgcggcacgaaaacaacaagaacggcgtggaccaggaaatcatcttcccacccatcaagaccgatgtgattacaatggaccccaaggacaactgctccaaggacgccaacgataccctgctgctccagctgaccaacaccagcgcctactacatgtacgagatcctgctgggcaaggccaccctgtacgccgtgctggtgtctgccctggtgctgatggctatggtcaagcggaaggacagccggggaagggccaagcgatctggatctggagcaacaaacttctcactactcaaacaagcaggtgacgtggaggagaatcccgggcctactagtatggactggatttggcgcatccttttccttgtcggcgctgctaccggcgcgcattccttcgaacaagttcagctgcaacagagcggccctgagctggttaagcctggcgcttctgtgcggatctcttgcaaggccagcggctacaccttcaccagctactacatccactgggtcaagcagcggcctggacagggactcgaatggatcggctggatctaccccggcaacctgaacaccaagtacaacgagaagttcaagggcaaagccacactgaccgccgacaagagcagcagcacagcctacatgcagctgagcagcctgacaagcgaggacagcgccgtgtacttctgcgccagatacgactggtacttcgacgtgtggggagccggaaccaccgtgacagtttcttctacgcgtagccagcctcacaccaagcccagcgtgttcgtgatgaagaacggcaccaacgtggcctgcctcgtgaaagagttctaccccaaggacatcaggatcaacctggtgtccagcaagaagatcaccgagttcgaccccgccatcgtgatctcccccagcggcaagtacaacgccgtgaagctggggaagtatgaggacagcaacagcgtgacctgctccgtgcagcacgacaacaagaccgtgcacagcaccgactttgaagtgaaaaccgactccaccgaccacgtgaagcccaaagagacagagaacaccaagcagcccagcaagagctgccacaagcccaaggccatcgtgcacaccgagaaagtgaacatgatgagcctgaccgtgatcggcttcagaatcctgctgctgaaagtggccggctttaacctgctgatgaccctgcggctgtggtccagctaa

SEQ ID NO: 38920 - DNA, 1872 bp, synthetic construct
  source 1..1872: mol_type = other DNA
atggccttaccagtgaccgccttgctcctgccgctggccttgctgctccacgccgccaggccgcagatcgtgctgacacagagccctgccatcatgtccgcttctcccggcgagaaagtgaccatgacatgtagcgccagcagcagcgtgtccttcatgcactggtatcagcagaagtccggcacaagccccaagcggtggatctacgataccagcacactggcctctggcgtgccagccagatttggcggatctggcagcggcacatcttacagcctgaccatcagcagcatggaagccgaagatgccgccacctactactgccagcagtggtccagcaatcccctgacatttggagccggcaccaagctggaactgaagagactcgaggacaagcagctggacgccgacgtgtcccccaagcctaccatcttcctgccctctatcgccgagacaaagctccagaaggccggcacctacctgtgcctgctggaaaagttcttcccagatgtgattaagatccactggcaggaaaagaagtccaacaccatcctgggcagccaggaaggcaacaccatgaagaccaacgacacctacatgaagttcagctggctgaccgtgcccgagaagtccctggacaaagaacacagatgcatcgtgcggcacgaaaacaacaagaacggcgtggaccaggaaatcatcttcccacccatcaagaccgatgtgattacaatggaccccaaggacaactgctccaaggacgccaacgataccctgctgctccagctgaccaacaccagcgccaccatcctgtacgagatcctgctgggcaaggccaccctgtacgccgtgctggtgtctgccctggtgctgatggctatggtcaagcggaaggacagccggggaagggccaagcgatctggatctggagcaacaaacttctcactactcaaacaagcaggtgacgtggaggagaatcccgggcctactagtatggactggatttggcgcatccttttccttgtcggcgctgctaccggcgcgcattccttcgaacaagttcagctgcaacagagcggccctgagctggttaagcctggcgcttctgtgcggatctcttgcaaggccagcggctacaccttcaccagctactacatccactgggtcaagcagcggcctggacagggactcgaatggatcggctggatctaccccggcaacctgaacaccaagtacaacgagaagttcaagggcaaagccacactgaccgccgacaagagcagcagcacagcctacatgcagctgagcagcctgacaagcgaggacagcgccgtgtacttctgcgccagatacgactggtacttcgacgtgtggggagccggaaccaccgtgacagtttcttctacgcgtagccagcctcacaccaagcccagcgtgttcgtgatgaagaacggcaccaacgtggcctgcctcgtgaaagagttctaccccaaggacatcaggatcaacctggtgtccagcaagaagatcaccgagttcgaccccgccatcgtgatctcccccagcggcaagtacaacgccgtgaagctggggaagtatgaggacagcaacagcgtgacctgctccgtgcagcacgacaacaagaccgtgcacagcaccgactttgaagtgaaaaccgactccaccgaccacgtgaagcccaaagagacagagaacaccaagcagcccagcaagagctgccacaagcccaaggccatcgtgcacaccgagaaagtgaacatgatgagcctgaccgtgatcggcttcagaatcctgctgctgaaagtggccggctttaacctgctgatgaccctgcggctgtggtccagctaa

SEQ ID NO: 38921 - DNA, 1872 bp, synthetic construct
  source 1..1872: mol_type = other DNA
atggccttaccagtgaccgccttgctcctgccgctggccttgctgctccacgccgccaggccgcagatcgtgctgacacagagccctgccatcatgtccgcttctcccggcgagaaagtgaccatgacatgtagcgccagcagcagcgtgtccttcatgcactggtatcagcagaagtccggcacaagccccaagcggtggatctacgataccagcacactggcctctggcgtgccagccagatttggcggatctggcagcggcacatcttacagcctgaccatcagcagcatggaagccgaagatgccgccacctactactgccagcagtggtccagcaatcccctgacatttggagccggcaccaagctggaactgaagagactcgaggacaagcagctggacgccgacgtgtcccccaagcctaccatcttcctgccctctatcgccgagacaaagctccagaaggccggcacctacctgtgcctgctggaaaagttcttcccagatgtgattaagatccactggcaggaaaagaagtccaacaccatcctgggcagccaggaaggcaacaccatgaagaccaacgacacctacatgaagttcagctggctgaccgtgcccgagaagtccctggacaaagaacacagatgcatcgtgcggcacgaaaacaacaagaacggcgtggaccaggaaatcatcttcccacccatcaagaccgatgtgattacaatggaccccaaggacaactgctccaaggacgccaacgataccctgctgctccagctgaccaacaccagcgcctactacatgtacgagatcctgctgggcaaggccaccctgtacgccgtgctggtgtctgccctggtgctgatggctatggtcaagcggaaggacagccggggaagggccaagcgatctggatctggagcaacaaacttctcactactcaaacaagcaggtgacgtggaggagaatcccgggcctactagtatggactggatttggcgcatccttttccttgtcggcgctgctaccggcgcgcattccttcgaacaagttcagctgcaacagagcggccctgagctggttaagcctggcgcttctgtgcggatctcttgcaaggccagcggctacaccttcaccagctactacatccactgggtcaagcagcggcctggacagggactcgaatggatcggctggatctaccccggcaacctgaacaccaagtacaacgagaagttcaagggcaaagccacactgaccgccgacaagagcagcagcacagcctacatgcagctgagcagcctgacaagcgaggacagcgccgtgtacttctgcgccagatacgactggtacttcgacgtgtggggagccggaaccaccgtgacagtttcttctacgcgtagccagcctcacaccaagcccagcgtgttcgtgatgaagaacggcaccaacgtggcctgcctcgtgaaagagttctaccccaaggacatcaggatcaacctggtgtccagcaagaagatcaccgagttcgaccccgccatcgtgatctcccccagcggcaagtacaacgccgtgaagctggggaagtacgaggacagcaacagcgtgacctgctccgtgcagcacgacaacaagaccgtgcacagcaccgactttgaagtgaaaaccgactccaccgaccacgtgaagcccaaagagacagagaacaccaagcagcccagcaagagctgccacaagcccaaggccatcgtgcacaccgagaaagtgaacatgatgagcctgaccgtgctgggcttcagaatcctgctgctgaaagtggccggctttaacctgctgatgaccctgcggctgtggtccagctaa

SEQ ID NO: 38922 - DNA, 1872 bp, synthetic construct
  source 1..1872: mol_type = other DNA
atggccttaccagtgaccgccttgctcctgccgctggccttgctgctccacgccgccaggccgcagatcgtgctgacacagagccctgccatcatgtccgcttctcccggcgagaaagtgaccatgacatgtagcgccagcagcagcgtgtccttcatgcactggtatcagcagaagtccggcacaagccccaagcggtggatctacgataccagcacactggcctctggcgtgccagccagatttggcggatctggcagcggcacatcttacagcctgaccatcagcagcatggaagccgaagatgccgccacctactactgccagcagtggtccagcaatcccctgacatttggagccggcaccaagctggaactgaagagactcgaggacaagcagctggacgccgacgtgtcccccaagcctaccatcttcctgccctctatcgccgagacaaagctccagaaggccggcacctacctgtgcctgctggaaaagttcttcccagatgtgattaagatccactggcaggaaaagaagtccaacaccatcctgggcagccaggaaggcaacaccatgaagaccaacgacacctacatgaagttcagctggctgaccgtgcccgagaagtccctggacaaagaacacagatgcatcgtgcggcacgaaaacaacaagaacggcgtggaccaggaaatcatcttcccacccatcaagaccgatgtgattacaatggaccccaaggacaactgctccaaggacgccaacgataccctgctgctccagctgaccaacaccagcgccaccatcctgtacgagatcctgctgggcaaggccaccctgtacgccgtgctggtgtctgccctggtgctgatggctatggtcaagcggaaggacagccggggaagggccaagcgatctggatctggagcaacaaacttctcactactcaaacaagcaggtgacgtggaggagaatcccgggcctactagtatggactggatttggcgcatccttttccttgtcggcgctgctaccggcgcgcattccttcgaacaagttcagctgcaacagagcggccctgagctggttaagcctggcgcttctgtgcggatctcttgcaaggccagcggctacaccttcaccagctactacatccactgggtcaagcagcggcctggacagggactcgaatggatcggctggatctaccccggcaacctgaacaccaagtacaacgagaagttcaagggcaaagccacactgaccgccgacaagagcagcagcacagcctacatgcagctgagcagcctgacaagcgaggacagcgccgtgtacttctgcgccagatacgactggtacttcgacgtgtggggagccggaaccaccgtgacagtttcttctacgcgtagccagcctcacaccaagcccagcgtgttcgtgatgaagaacggcaccaacgtggcctgcctcgtgaaagagttctaccccaaggacatcaggatcaacctggtgtccagcaagaagatcaccgagttcgaccccgccatcgtgatctcccccagcggcaagtacaacgccgtgaagctggggaagtacgaggacagcaacagcgtgacctgctccgtgcagcacgacaacaagaccgtgcacagcaccgactttgaagtgaaaaccgactccaccgaccacgtgaagcccaaagagacagagaacaccaagcagcccagcaagagctgccacaagcccaaggccatcgtgcacaccgagaaagtgaacatgatgagcctgaccgtgctgggcttcagaatcctgctgctgaaagtggccggctttaacctgctgatgaccctgcggctgtggtccagctaa

SEQ ID NO: 38923 - DNA, 1854 bp, synthetic construct
  source 1..1854: mol_type = other DNA
atggccttaccagtgaccgccttgctcctgccgctggccttgctgctccacgccgccaggccgcagatcgtgctgacacagagccctgccatcatgtccgcttctcccggcgagaaagtgaccatgacatgtagcgccagcagcagcgtgtccttcatgcactggtatcagcagaagtccggcacaagccccaagcggtggatctacgataccagcacactggcctctggcgtgccagccagatttggcggatctggcagcggcacatcttacagcctgaccatcagcagcatggaagccgaagatgccgccacctactactgccagcagtggtccagcaatcccctgacatttggagccggcaccaagctggaactgaagagactcgaggacctgaagaacgtgttcccacctgaggtggccgtgttcgagcctagcgaggccgagatcagccacacccagaaagccaccctcgtgtgcctggctaccggcttctaccccgaccatgtggaactgtcttggtgggtcaacggcaaagaggtgcacagcggcgtgtgtaccgacccccagccactgaaagaacagcccgccctgaacgacagccggtactgcctgagcagcagactgagagtgtccgccaccttctggcagaacccccggaaccacttcagatgccaggtgcagttctacggcctgagcgagaacgacgagtggacccaggacagagccaagcccgtgacccagatcgtgtctgccgaagcctggggcagagccgattgcggctttaccagcgagagctaccagcagggcgtgctgagcgccaccatcctgtacttgttgctgctgctgaagtccgtggtgtacttcgccatcatcacatgctgcctgctgcggagaaccgccttctgctgcaacggcgagaagtctagggccaagcgatctggatctggagcaacaaacttctcactactcaaacaagcaggtgacgtggaggagaatcccgggcctactagtatggactggatttggcgcatccttttccttgtcggcgctgctaccggcgcgcattccttcgaacaagttcagctgcaacagagcggccctgagctggttaagcctggcgcttctgtgcggatctcttgcaaggccagcggctacaccttcaccagctactacatccactgggtcaagcagcggcctggacagggactcgaatggatcggctggatctaccccggcaacctgaacaccaagtacaacgagaagttcaagggcaaagccacactgaccgccgacaagagcagcagcacagcctacatgcagctgagcagcctgacaagcgaggacagcgccgtgtacttctgcgccagatacgactggtacttcgacgtgtggggagccggaaccaccgtgacagtttcttctacgcgtatccagaaccctgatcctgccgtgtaccagctgcgggatagcaagagcagcgacaagagcgtgtgtctgttcaccgacttcgacagccagaccaacgtgtcccagagcaaggactccgacgtgtacatcaccgataagtgcgtgctggacatgcggagcatggacttcaagagcaactccgccgtggcctggtccaacaagtccgatttcgcctgcgccaacgccttcaacaacagcattatccccgaggacacattcttcccaagccccgagagcagctgcgacgtgaagctggtggaaaagagcttcgagacagacaccaacctgaacttccagaacctgagcgtgatcggcctgcggatgctgttcgccaaaaccgtggccgtgaacttcctgctgaccgccaagctgttcttcctctaa

SEQ ID NO: 38924 - DNA, 1941 bp, synthetic construct
  source 1..1941: mol_type = other DNA
atggccttaccagtgaccgccttgctcctgccgctggccttgctgctccacgccgccaggccgcagatcgtgctgacacagagccctgccatcatgtccgcttctcccggcgagaaagtgaccatgacatgtagcgccagcagcagcgtgtccttcatgcactggtatcagcagaagtccggcacaagccccaagcggtggatctacgataccagcacactggcctctggcgtgccagccagatttggcggatctggcagcggcacatcttacagcctgaccatcagcagcatggaagccgaagatgccgccacctactactgccagcagtggtccagcaatcccctgacatttggagccggcaccaagctggaactgaagagactcgaggacctgaagaacgtgttcccacctgaggtggccgtgttcgagcctagcgaggccgagatcagccacacccagaaagccaccctcgtgtgcctggctaccggcttctaccccgaccatgtggaactgtcttggtgggtcaacggcaaagaggtgcacagcggcgtgtctaccgacccccagccactgaaagaacagcccgccctgaacgacagccggtactgcctgagcagcagactgagagtgtccgccaccttctggcagaacccccggaaccacttcagatgccaggtgcagttctacggcctgagcgagaacgacgagtggacccaggacagagccaagcccgtgacccagatcgtgtctgccgaagcctggggcagagccgattgcggatcctccaaggacgccaacgataccctgctgctccagctgaccaacaccagcgcctactacatgtacttgttgctgctgctgaagtccgtggtgtacttcgccatcatcacatgctgcctgctgcggagaaccgccttctgctgcaacggcgagaagtctagggccaagcgatctggatctggagcaacaaacttctcactactcaaacaagcaggtgacgtggaggagaatcccgggcctactagtatggactggatttggcgcatccttttccttgtcggcgctgctaccggcgcgcattccttcgaacaagttcagctgcaacagagcggccctgagctggttaagcctggcgcttctgtgcggatctcttgcaaggccagcggctacaccttcaccagctactacatccactgggtcaagcagcggcctggacagggactcgaatggatcggctggatctaccccggcaacctgaacaccaagtacaacgagaagttcaagggcaaagccacactgaccgccgacaagagcagcagcacagcctacatgcagctgagcagcctgacaagcgaggacagcgccgtgtacttctgcgccagatacgactggtacttcgacgtgtggggagccggaaccaccgtgacagtttcttctacgcgtatccagaaccctgatcctgccgtgtaccagctgcgggatagcaagagcagcgacaagagcgtgtgtctgttcaccgacttcgacagccagaccaacgtgtcccagagcaaggactccgacgtgtacatcaccgataagaccgtgctggacatgcggagcatggacttcaagagcaactccgccgtggcctggtccaacaagtccgatttcgcctgcgccaacgccttcaacaacagcattatccccgaggacacattcttcccaagccccgagagcagctgcggtaccgaagtgaaaaccgactccaccgaccacgtgaagcccaaagagacagagaacaccaagcagcccagcaagagctgccacaagcccaaggccatcgtgcacaccgagaaagtgaacatgatgagcctgaccgtgctgggcctgcggatgctgttcgccaaaaccgtggccgtgaacttcctgctgaccgccaagctgttcttcctctaa

SEQ ID NO: 38925 - DNA, 1851 bp, synthetic construct
  source 1..1851: mol_type = other DNA
atggccttaccagtgaccgccttgctcctgccgctggccttgctgctccacgccgccaggccgcagatcgtgctgacacagagccctgccatcatgtccgcttctcccggcgagaaagtgaccatgacatgtagcgccagcagcagcgtgtccttcatgcactggtatcagcagaagtccggcacaagccccaagcggtggatctacgataccagcacactggcctctggcgtgccagccagatttggcggatctggcagcggcacatcttacagcctgaccatcagcagcatggaagccgaagatgccgccacctactactgccagcagtggtccagcaatcccctgacatttggagccggcaccaagctggaactgaagagactcgaggacctgaagaacgtgttcccacctgaggtggccgtgttcgagcctagcgaggccgagatcagccacacccagaaagccaccctcgtgtgcctggctaccggcttctaccccgaccatgtggaactgtcttggtgggtcaacggcaaagaggtgcacagcggcgtgtgtaccgacccccagccactgaaagaacagcccgccctgaacgacagccggtactgcctgagcagcagactgagagtgtccgccaccttctggcagaacccccggaaccacttcagatgccaggtgcagttctacggcctgagcgagaacgacgagtggacccaggacagagccaagcccgtgacccagatcgtgtctgccgaagcctggggcagagccgattgcgacgtgaagctggtggaaaagagcttcgagacagacaccaacctgaacttccagaacctgagcgtgatcggcttcagaatcctgctgctgaaagtggccggctttaacctgctgatgaccctgcggctgtggtccagcagggccaagcgatctggatctggagcaacaaacttctcactactcaaacaagcaggtgacgtggaggagaatcccgggcctactagtatggactggatttggcgcatccttttccttgtcggcgctgctaccggcgcgcattccttcgaacaagttcagctgcaacagagcggccctgagctggttaagcctggcgcttctgtgcggatctcttgcaaggccagcggctacaccttcaccagctactacatccactgggtcaagcagcggcctggacagggactcgaatggatcggctggatctaccccggcaacctgaacaccaagtacaacgagaagttcaagggcaaagccacactgaccgccgacaagagcagcagcacagcctacatgcagctgagcagcctgacaagcgaggacagcgccgtgtacttctgcgccagatacgactggtacttcgacgtgtggggagccggaaccaccgtgacagtttcttctacgcgtatccagaaccctgatcctgccgtgtaccagctgcgggatagcaagagcagcgacaagagcgtgtgtctgttcaccgacttcgacagccagaccaacgtgtcccagagcaaggactccgacgtgtacatcaccgataagtgcgtgctggacatgcggagcatggacttcaagagcaactccgccgtggcctggtccaacaagtccgatttcgcctgcgccaacgccttcaacaacagcattatccccgaggacacattcttcccaagccccgagagcagctgcggctttaccagcgagagctaccagcagggcgtgctgagcgccaccatcctgtacgagatcctgctgggcaaggccaccctgtacgccgtgctggtgtctgccctggtgctgatggctatggtcaagcggaaggacagccggggataa

SEQ ID NO: 38926 - DNA, 1851 bp, synthetic construct
  source 1..1851: mol_type = other DNA
atggccttaccagtgaccgccttgctcctgccgctggccttgctgctccacgccgccaggccgcagatcgtgctgacacagagccctgccatcatgtccgcttctcccggcgagaaagtgaccatgacatgtagcgccagcagcagcgtgtccttcatgcactggtatcagcagaagtccggcacaagccccaagcggtggatctacgataccagcacactggcctctggcgtgccagccagatttggcggatctggcagcggcacatcttacagcctgaccatcagcagcatggaagccgaagatgccgccacctactactgccagcagtggtccagcaatcccctgacatttggagccggcaccaagctggaactgaagagactcgaggacctgaagaacgtgttcccacctgaggtggccgtgttcgagcctagcgaggccgagatcagccacacccagaaagccaccctcgtgtgcctggctaccggcttctaccccgaccatgtggaactgtcttggtgggtcaacggcaaagaggtgcacagcggcgtgtgtaccgacccccagccactgaaagaacagcccgccctgaacgacagccggtactgcctgagcagcagactgagagtgtccgccaccttctggcagaacccccggaaccacttcagatgccaggtgcagttctacggcctgagcgagaacgacgagtggacccaggacagagccaagcccgtgacccagatcgtgtctgccgaagcctggggcagagccgattgcggctttaccagcgagagctaccagcagggcgtgctgagcgccaccaacctgagcgtgatcggcttcagaatcctgctgctgaaagtggccggctttaacctgctgatgaccctgcggctgtggtccagcagggccaagcgatctggatctggagcaacaaacttctcactactcaaacaagcaggtgacgtggaggagaatcccgggcctactagtatggactggatttggcgcatccttttccttgtcggcgctgctaccggcgcgcattccttcgaacaagttcagctgcaacagagcggccctgagctggttaagcctggcgcttctgtgcggatctcttgcaaggccagcggctacaccttcaccagctactacatccactgggtcaagcagcggcctggacagggactcgaatggatcggctggatctaccccggcaacctgaacaccaagtacaacgagaagttcaagggcaaagccacactgaccgccgacaagagcagcagcacagcctacatgcagctgagcagcctgacaagcgaggacagcgccgtgtacttctgcgccagatacgactggtacttcgacgtgtggggagccggaaccaccgtgacagtttcttctacgcgtatccagaaccctgatcctgccgtgtaccagctgcgggatagcaagagcagcgacaagagcgtgtgtctgttcaccgacttcgacagccagaccaacgtgtcccagagcaaggactccgacgtgtacatcaccgataagtgcgtgctggacatgcggagcatggacttcaagagcaactccgccgtggcctggtccaacaagtccgatttcgcctgcgccaacgccttcaacaacagcattatccccgaggacacattcttcccaagccccgagagcagctgcgacgtgaagctggtggaaaagagcttcgagacagacaccaacctgaacttccagatcctgtacgagatcctgctgggcaaggccaccctgtacgccgtgctggtgtctgccctggtgctgatggctatggtcaagcggaaggacagccggggataa

SEQ ID NO: 38927 - DNA, 1851 bp, synthetic construct; identical to SEQ ID NO: 38925
  source 1..1851: mol_type = other DNA

SEQ ID NO: 38928 - DNA, 1851 bp, synthetic construct; identical to SEQ ID NO: 38926
  source 1..1851: mol_type = other DNA

SEQ ID NO: 38929 - DNA, 1848 bp, synthetic construct
  source 1..1848: mol_type = other DNA
atggccttaccagtgaccgccttgctcctgccgctggccttgctgctccacgccgccaggccgcagatcgtgctgacacagagccctgccatcatgtccgcttctcccggcgagaaagtgaccatgacatgtagcgccagcagcagcgtgtccttcatgcactggtatcagcagaagtccggcacaagccccaagcggtggatctacgataccagcacactggcctctggcgtgccagccagatttggcggatctggcagcggcacatcttacagcctgaccatcagcagcatggaagccgaagatgccgccacctactactgccagcagtggtccagcaatcccctgacatttggagccggcaccaagctggaactgaagagactcgaggacctgaagaacgtgttcccacctgaggtggccgtgttcgagcctagcgaggccgagatcagccacacccagaaagccaccctcgtgtgcctggctaccggcttctaccccgaccatgtggaactgtcttggtgggtcaacggcaaagaggtgcacagcggcgtgtgtaccgacccccagccactgaaagaacagcccgccctgaacgacagccggtactgcctgagcagcagactgagagtgtccgccaccttctggcagaacccccggaaccacttcagatgccaggtgcagttctacggcctgagcgagaacgacgagtggacccaggacagagccaagcccgtgacccagatcgtgtctgccgaagcctggggcagagccgattgcgacgtgaagctggtggaaaagagcttcgagacagacaccaacctgaacttccagaacctgagcgtgatcggcttcagaatcctgctgctgaaagtggccggctttaacctgctgatgaccctgcggctgtggtccagcagggccaagcgatctggatctggagcaacaaacttctcactactcaaacaagcaggtgacgtggaggagaatcccgggcctactagtatggactggatttggcgcatccttttccttgtcggcgctgctaccggcgcgcattccttcgaacaagttcagctgcaacagagcggccctgagctggttaagcctggcgcttctgtgcggatctcttgcaaggccagcggctacaccttcaccagctactacatccactgggtcaagcagcggcctggacagggactcgaatggatcggctggatctaccccggcaacctgaacaccaagtacaacgagaagttcaagggcaaagccacactgaccgccgacaagagcagcagcacagcctacatgcagctgagcagcctgacaagcgaggacagcgccgtgtacttctgcgccagatacgactggtacttcgacgtgtggggagccggaaccaccgtgacagtttcttctacgcgtatccagaaccctgatcctgccgtgtaccagctgcgggatagcaagagcagcgacaagagcgtgtgtctgttcaccgacttcgacagccagaccaacgtgtcccagagcaaggactccgacgtgtacatcaccgataagtgcgtgctggacatgcggagcatggacttcaagagcaactccgccgtggcctggtccaacaagtccgatttcgcctgcgccaacgccttcaacaacagcattatccccgaggacacattcttcccaagccccgagagcagctgcggctttaccagcgagagctaccagcagggcgtgctgagcgccaccatcctgtacgagatcctgctgggcaaggccaccctgtacgccgtgctggtgtctgccctggtgctgatggctatggtcaagcggaaggacagccgggga

SEQ ID NO: 38930 - DNA, 1860 bp, synthetic construct
  source 1..1860: mol_type = other DNA
atggccttaccagtgaccgccttgctcctgccgctggccttgctgctccacgccgccaggccgcagatcgtgctgacacagagccctgccatcatgtccgcttctcccggcgagaaagtgaccatgacatgtagcgccagcagcagcgtgtccttcatgcactggtatcagcagaagtccggcacaagccccaagcggtggatctacgataccagcacactggcctctggcgtgccagccagatttggcggatctggcagcggcacatcttacagcctgaccatcagcagcatggaagccgaagatgccgccacctactactgccagcagtggtccagcaatcccctgacatttggagccggcaccaagctggaactgaagagactcgaggccgacgtgtcccccaagcctaccatcttcctgccctctatcgccgagacaaagctccagaaggccggcacctacctgtgcctgctggaaaagttcttcccagatgtgattaagatccactggcaggaaaagaagtccaacaccatcctgggcagccaggaaggcaacaccatgaagaccaacgacacctacatgaagttcagctggctgaccgtgcccgagaagtccctggacaaagaacacagatgcatcgtgcggcacgaaaacaacaagaacggcgtggaccaggaaatcatcttcccacccatcaagaccgatgtgattacaatggaccccaaggacaactgctccaaggacgccaacgataccctgctgctccagctgaccaacaccagcgcctactacatgtacttgttgctgctgctgaagtccgtggtgtacttcgccatcatcacatgctgcctgctgcggagaaccgccttctgctgcaacggcgagaagtctagggccaagcgatctggatctggagcaacaaacttctcactactcaaacaagcaggtgacgtggaggagaatcccgggcctactagtatggactggatttggcgcatccttttccttgtcggcgctgctaccggcgcgcattccttcgaacaagttcagctgcaacagagcggccctgagctggttaagcctggcgcttctgtgcggatctcttgcaaggccagcggctacaccttcaccagctactacatccactgggtcaagcagcggcctggacagggactcgaatggatcggctggatctaccccggcaacctgaacaccaagtacaacgagaagttcaagggcaaagccacactgaccgccgacaagagcagcagcacagcctacatgcagctgagcagcctgacaagcgaggacagcgccgtgtacttctgcgccagatacgactggtacttcgacgtgtggggagccggaaccaccgtgacagtttcttctacgcgtagccagcctcacaccaagcccagcgtgttcgtgatgaagaacggcaccaacgtggcctgcctcgtgaaagagttctaccccaaggacatcaggatcaacctggtgtccagcaagaagatcaccgagttcgaccccgccatcgtgatctcccccagcggcaagtacaacgccgtgaagctggggaagtatgaggacagcaacagcgtgacctgctccgtgcagcacgacaacaagaccgtgcacagcaccgactttgaagtgaaaaccgactccaccgaccacgtgaagcccaaagagacagagaacaccaagcagcccagcaagagctgccacaagcccaaggccatcgtgcacaccgagaaagtgaacatgatgagcctgaccgtgatcggcttcagaatcctgctgctgaaagtggccggctttaacctgctgatgaccctgcggctgtggtccagctaa

SEQ ID NO: 38931 - DNA, 1860 bp, synthetic construct
  source 1..1860: mol_type = other DNA
atggccttaccagtgaccgccttgctcctgccgctggccttgctgctccacgccgccaggccgcagatcgtgctgacacagagccctgccatcatgtccgcttctcccggcgagaaagtgaccatgacatgtagcgccagcagcagcgtgtccttcatgcactggtatcagcagaagtccggcacaagccccaagcggtggatctacgataccagcacactggcctctggcgtgccagccagatttggcggatctggcagcggcacatcttacagcctgaccatcagcagcatggaagccgaagatgccgccacctactactgccagcagtggtccagcaatcccctgacatttggagccggcaccaagctggaactgaagagactcgaggccgacgtgtcccccaagcctaccatcttcctgccctctatcgccgagacaaagctccagaaggccggcacctacctgtgcctgctggaaaagttcttcccagatgtgattaagatccactggcaggaaaagaagtccaacaccatcctgggcagccaggaaggcaacaccatgaagaccaacgacacctacatgaagttcagctggctgaccgtgcccgagaagtccctggacaaagaacacagatgcatcgtgcggcacgaaaacaacaagaacggcgtggaccaggaaatcatcttcccacccatcaagaccgatgtgattacaatggaccccaaggacaactgctccaaggacgccaacgataccctgctgctccagctgaccaacaccagcgcctactacatgtacttgttgctgctgctgaagtccgtggtgtacttcgccatcatcacatgctgcctgctgcggagaaccgccttctgctgcaacggcgagaagtctagggccaagcgatctggatctggagcaacaaacttctcactactcaaacaagcaggtgacgtggaggagaatcccgggcctactagtatggactggatttggcgcatccttttccttgtcggcgctgctaccggcgcgcattccttcgaacaagttcagctgcaacagagcggccctgagctggttaagcctggcgcttctgtgcggatctcttgcaaggccagcggctacaccttcaccagctactacatccactgggtcaagcagcggcctggacagggactcgaatggatcggctggatctaccccggcaacctgaacaccaagtacaacgagaagttcaagggcaaagccacactgaccgccgacaagagcagcagcacagcctacatgcagctgagcagcctgacaagcgaggacagcgccgtgtacttctgcgccagatacgactggtacttcgacgtgtggggagccggaaccaccgtgacagtttcttctacgcgtagccagcctcacaccaagcccagcgtgttcgtgatgaagaacggcaccaacgtggcctgcctcgtgaaagagttctaccccaaggacatcaggatcaacctggtgtccagcaagaagatcaccgagttcgaccccgccatcgtgatctcccccagcggcaagtacaacgccgtgaagctggggaagtacgaggacagcaacagcgtgacctgctccgtgcagcacgacaacaagaccgtgcacagcaccgactttgaagtgaaaaccgactccaccgaccacgtgaagcccaaagagacagagaacaccaagcagcccagcaagagctgccacaagcccaaggccatcgtgcacaccgagaaagtgaacatgatgagcctgaccgtgctgggcttcagaatcctgctgctgaaagtggccggctttaacctgctgatgaccctgcggctgtggtccagctaa

SEQ ID NO: 38932 - DNA, 1848 bp, synthetic construct; identical to SEQ ID NO: 38929
  source 1..1848: mol_type = other DNA

SEQ ID NO: 38933 - DNA, 1860 bp, synthetic construct
  source 1..1860: mol_type = other DNA
atggccttaccagtgaccgccttgctcctgccgctggccttgctgctccacgccgccaggccgcagatcgtgctgacacagagccctgccatcatgtccgcttctcccggcgagaaagtgaccatgacatgtagcgccagcagcagcgtgtccttcatgcactggtatcagcagaagtccggcacaagccccaagcggtggatctacgataccagcacactggcctctggcgtgccagccagatttggcggatctggcagcggcacatcttacagcctgaccatcagcagcatggaagccgaagatgccgccacctactactgccagcagtggtccagcaatcccctgacatttggagccggcaccaagctggaactgaagagactcgagatccagaaccctgatcctgccgtgtaccagctgcgggatagcaagagcagcgacaagagcgtgtgtctgttcaccgacttcgacagccagaccaacgtgtcccagagcaaggactccgacgtgtacatcaccgataagtgcgtgctggacatgcggagcatggacttcaagagcaactccgccgtggcctggtccaacaagtccgatttcgcctgcgccaacgccttcaacaacagcattatccccgaggacacattcttcccaagccccgagagcagctgcggctttaccagcgagagctaccagcagggcgtgctgagcgccaccatcctgtacgagatcctgctgggcaaggccaccctgtacgccgtgctggtgtctgccctggtgctgatggctatggtcaagcggaaggacagccggggacgcgccaagagaagcggatctggcgtgaagcagaccctgaatttcgacctgctgaagctggctggcgacgtggaatccaacccaggccctactagtatggactggatttggcgcatccttttccttgtcggcgctgctaccggcgcgcattccttcgaacaagttcagctgcaacagagcggccctgagctggttaagcctggcgcttctgtgcggatctcttgcaaggccagcggctacaccttcaccagctactacatccactgggtcaagcagcggcctggacagggactcgaatggatcggctggatctaccccggcaacctgaacaccaagtacaacgagaagttcaagggcaaagccacactgaccgccgacaagagcagcagcacagcctacatgcagctgagcagcctgacaagcgaggacagcgccgtgtacttctgcgccagatacgactggtacttcgacgtgtggggagccggaaccaccgtgacagtttcttctacgcgtgaggacctgaagaacgtgttcccacctgaggtggccgtgttcgagcctagcgaggccgagatcagccacacccagaaagccaccctcgtgtgcctggctaccggcttctaccccgaccatgtggaactgtcttggtgggtcaacggcaaagaggtgcacagcggcgtgtgtaccgacccccagccactgaaagaacagcccgccctgaacgacagccggtactgcctgagcagcagactgagagtgtccgccaccttctggcagaacccccggaaccacttcagatgccaggtgcagttctacggcctgagcgagaacgacgagtggacccaggacagagccaagcccgtgacccagatcgtgtctgccgaagcctggggcagagccgattgcgacgtgaagctggtggaaaagagcttcgagacagacaccaacctgaacttccagaacctgagcgtgatcggcttcagaatcctgctgctgaaagtggccggctttaacctgctgatgaccctgcggctgtggtccagc

SEQ ID NO: 38934 - DNA, 2253 bp, synthetic construct
  source 1..2253: mol_type = other DNA
atggccttaccagtgaccgccttgctcctgccgctggccttgctgctccacgccgccaggccggaagtgcagctggttgaatctggcggaggactggttcagcctggcggatctctgagactgtcttgtgccgccagcggcttcagcttcagcgacttttggatgagctgggtccgacaggcccctggcaaaggacttgaatgggtcgccacaatcagccaggccggcagcgagaaggactacgtggactctgtgaagggcagattcaccatcagccgggacaacgccaagaagtccctgtacctccagatgaacagcctgagagccgaggacaccgccgtgtactattgtgcctctggcgtgtacagcttcgactacagaggccagggcaccctggtcacagtctcttctggtaccggcggaggcggatctggcggcggaggtagcggtggcggaggatctgaattccagatcgtgctgacacagagccctgccatcatgtccgcttctcccggcgagaaagtgaccatgacatgtagcgccagcagcagcgtgtccttcatgcactggtatcagcagaagtccggcacaagccccaagcggtggatctacgataccagcacactggcctctggcgtgccagccagatttggcggatctggcagcggcacatcttacagcctgaccatcagcagcatggaagccgaagatgccgccacctactactgccagcagtggtccagcaatcccctgacatttggagccggcaccaagctggaactgaagagactcgaggacctgaagaacgtgttcccacctgaggtggccgtgttcgagcctagcgaggccgagatcagccacacccagaaagccaccctcgtgtgcctggctaccggcttctaccccgaccatgtggaactgtcttggtgggtcaacggcaaagaggtgcacagcggcgtgtgtaccgacccccagccactgaaagaacagcccgccctgaacgacagccggtactgcctgagcagcagactgagagtgtccgccaccttctggcagaacccccggaaccacttcagatgccaggtgcagttctacggcctgagcgagaacgacgagtggacccaggacagagccaagcccgtgacccagatcgtgtctgccgaagcctggggcagagccgattgcgacgtgaagctggtggaaaagagcttcgagacagacaccaacctgaacttccagaacctgagcgtgatcggcttcagaatcctgctgctgaaagtggccggctttaacctgctgatgaccctgcggctgtggtccagcagggccaagcgatctggatctggagcaacaaacttctcactactcaaacaagcaggtgacgtggaggagaatcccgggcctactagtatggactggatttggcgcatccttttccttgtcggcgctgctaccggcgcgcattccttcgaacaagttcagctgcaacagagcggccctgagctggttaagcctggcgcttctgtgcggatctcttgcaaggccagcggctacaccttcaccagctactacatccactgggtcaagcagcggcctggacagggactcgaatggatcggctggatctaccccggcaacctgaacaccaagtacaacgagaagttcaagggcaaagccacactgaccgccgacaagagcagcagcacagcctacatgcagctgagcagcctgacaagcgaggacagcgccgtgtacttctgcgccagatacgactggtacttcgacgtgtggggagccggaaccaccgtgacagtttcttctacgcgtatccagaaccctgatcctgccgtgtaccagctgcgggatagcaagagcagcgacaagagcgtgtgtctgttcaccgacttcgacagccagaccaacgtgtcccagagcaaggactccgacgtgtacatcaccgataagtgcgtgctggacatgcggagcatggacttcaagagcaactccgccgtggcctggtccaacaagtccgatttcgcctgcgccaacgccttcaacaacagcattatccccgaggacacattcttcccaagccccgagagcagctgcggctttaccagcgagagctaccagcagggcgtgctgagcgccaccatcctgtacgagatcctgctgggcaaggccaccctgtacgccgtgctggtgtctgccctggtgctgatggctatggtcaagcggaaggacagccgggga

SEQ ID NO: 38935 - DNA, 2265 bp, synthetic construct
  source 1..2265: mol_type = other DNA
atggccttaccagtgaccgccttgctcctgccgctggccttgctgctccacgccgccaggccggaagtgcagctggttgaatctggcggaggactggttcagcctggcggatctctgagactgtcttgtgccgccagcggcttcagcttcagcgacttttggatgagctgggtccgacaggcccctggcaaaggacttgaatgggtcgccacaatcagccaggccggcagcgagaaggactacgtggactctgtgaagggcagattcaccatcagccgggacaacgccaagaagtccctgtacctccagatgaacagcctgagagccgaggacaccgccgtgtactattgtgcctctggcgtgtacagcttcgactacagaggccagggcaccctggtcacagtctcttctggtaccggcggaggcggatctggcggcggaggtagcggtggcggaggatctgaattccagatcgtgctgacacagagccctgccatcatgtccgcttctcccggcgagaaagtgaccatgacatgtagcgccagcagcagcgtgtccttcatgcactggtatcagcagaagtccggcacaagccccaagcggtggatctacgataccagcacactggcctctggcgtgccagccagatttggcggatctggcagcggcacatcttacagcctgaccatcagcagcatggaagccgaagatgccgccacctactactgccagcagtggtccagcaatcccctgacatttggagccggcaccaagctggaactgaagagactcgagatccagaaccctgatcctgccgtgtaccagctgcgggatagcaagagcagcgacaagagcgtgtgtctgttcaccgacttcgacagccagaccaacgtgtcccagagcaaggactccgacgtgtacatcaccgataagtgcgtgctggacatgcggagcatggacttcaagagcaactccgccgtggcctggtccaacaagtccgatttcgcctgcgccaacgccttcaacaacagcattatccccgaggacacattcttcccaagccccgagagcagctgcggctttaccagcgagagctaccagcagggcgtgctgagcgccaccatcctgtacgagatcctgctgggcaaggccaccctgtacgccgtgctggtgtctgccctggtgctgatggctatggtcaagcggaaggacagccggggacgcgccaagagaagcggatctggcgtgaagcagaccctgaatttcgacctgctgaagctggctggcgacgtggaatccaacccaggccctactagtatggactggatttggcgcatccttttccttgtcggcgctgctaccggcgcgcattccttcgaacaagttcagctgcaacagagcggccctgagctggttaagcctggcgcttctgtgcggatctcttgcaaggccagcggctacaccttcaccagctactacatccactgggtcaagcagcggcctggacagggactcgaatggatcggctggatctaccccggcaacctgaacaccaagtacaacgagaagttcaagggcaaagccacactgaccgccgacaagagcagcagcacagcctacatgcagctgagcagcctgacaagcgaggacagcgccgtgtacttctgcgccagatacgactggtacttcgacgtgtggggagccggaaccaccgtgacagtttcttctacgcgtgaggacctgaagaacgtgttcccacctgaggtggccgtgttcgagcctagcgaggccgagatcagccacacccagaaagccaccctcgtgtgcctggctaccggcttctaccccgaccatgtggaactgtcttggtgggtcaacggcaaagaggtgcacagcggcgtgtgtaccgacccccagccactgaaagaacagcccgccctgaacgacagccggtactgcctgagcagcagactgagagtgtccgccaccttctggcagaacccccggaaccacttcagatgccaggtgcagttctacggcctgagcgagaacgacgagtggacccaggacagagccaagcccgtgacccagatcgtgtctgccgaagcctggggcagagccgattgcgacgtgaagctggtggaaaagagcttcgagacagacaccaacctgaacttccagaacctgagcgtgatcggcttcagaatcctgctgctgaaagtggccggctttaacctgctgatgaccctgcggctgtggtccagc

SEQ ID NO: 38936 - DNA, 2664 bp, synthetic construct
  source 1..2664: mol_type = other DNA
atggccttaccagtgaccgccttgctcctgccgctggccttgctgctccacgccgccaggccggaagtgcagctggttgaatctggcggaggactggttcagcctggcggatctctgagactgtcttgtgccgccagcggcttcagcttcagcgacttttggatgagctgggtccgacaggcccctggcaaaggacttgaatgggtcgccacaatcagccaggccggcagcgagaaggactacgtggactctgtgaagggcagattcaccatcagccgggacaacgccaagaagtccctgtacctccagatgaacagcctgagagccgaggacaccgccgtgtactattgtgcctctggcgtgtacagcttcgactacagaggccagggcaccctggtcacagtctcttctggtaccggcggaggcggatctggcggcggaggtagcggtggcggaggatctgaattccagatcgtgctgacacagagccctgccatcatgtccgcttctcccggcgagaaagtgaccatgacatgtagcgccagcagcagcgtgtccttcatgcactggtatcagcagaagtccggcacaagccccaagcggtggatctacgataccagcacactggcctctggcgtgccagccagatttggcggatctggcagcggcacatcttacagcctgaccatcagcagcatggaagccgaagatgccgccacctactactgccagcagtggtccagcaatcccctgacatttggagccggcaccaagctggaactgaagagactcgaggacctgaagaacgtgttcccacctgaggtggccgtgttcgagcctagcgaggccgagatcagccacacccagaaagccaccctcgtgtgcctggctaccggcttctaccccgaccatgtggaactgtcttggtgggtcaacggcaaagaggtgcacagcggcgtgtgtaccgacccccagccactgaaagaacagcccgccctgaacgacagccggtactgcctgagcagcagactgagagtgtccgccaccttctggcagaacccccggaaccacttcagatgccaggtgcagttctacggcctgagcgagaacgacgagtggacccaggacagagccaagcccgtgacccagatcgtgtctgccgaagcctggggcagagccgattgcgacgtgaagctggtggaaaagagcttcgagacagacaccaacctgaacttccagaacctgagcgtgatcggcttcagaatcctgctgctgaaagtggccggctttaacctgctgatgaccctgcggctgtggtccagcagggccaagcgatctggatctggagcaacaaacttctcactactcaaacaagcaggtgacgtggaggagaatcccgggcctactagtatggactggatttggcgcatccttttccttgtcggcgctgctaccggcgcgcattccgggccccagctccagctgcaagagtctggacctggcctggtcaagcctagcgagacactgagcctgacctgtaccgtgtccggcgatagcatcagcagcggcgattactactggggctggatcagacagcctcctggcaaaggactggaatggatcggccacatctactacagcggcgtgacctactacaaccccagcctgaagtccagagtgaccatcagcgtggacaccagccggaaccagttctccctgaagctgtctagcgtgacagccgccgataccgccgtgtactactgcaccagagaggacagcagcaactggcggagtagaggccagggaacactggtcacagttagctctggatccggcggaggcggaagtggaggcggaggatctggcggcggaggctctttcgaacaagttcagctgcaacagagcggccctgagctggttaagcctggcgcttctgtgcggatctcttgcaaggccagcggctacaccttcaccagctactacatccactgggtcaagcagcggcctggacagggactcgaatggatcggctggatctaccccggcaacctgaacaccaagtacaacgagaagttcaagggcaaagccacactgaccgccgacaagagcagcagcacagcctacatgcagctgagcagcctgacaagcgaggacagcgccgtgtacttctgcgccagatacgactggtacttcgacgtgtggggagccggaaccaccgtgacagtttcttctacgcgtatccagaaccctgatcctgccgtgtaccagctgcgggatagcaagagcagcgacaagagcgtgtgtctgttcaccgacttcgacagccagaccaacgtgtcccagagcaaggactccgacgtgtacatcaccgataagtgcgtgctggacatgcggagcatggacttcaagagcaactccgccgtggcctggtccaacaagtccgatttcgcctgcgccaacgccttcaacaacagcattatccccgaggacacattcttcccaagccccgagagcagctgcggctttaccagcgagagctaccagcagggcgtgctgagcgccaccatcctgtacgagatcctgctgggcaaggccaccctgtacgccgtgctggtgtctgccctggtgctgatggctatggtcaagcggaaggacagccgggga

SEQ ID NO: 38937 - DNA, 2676 bp, synthetic construct
  source 1..2676: mol_type = other DNA
atggccttaccagtgaccgccttgctcctgccgctggccttgctgctccacgccgccaggccggaagtgcagctggttgaatctggcggaggactggttcagcctggcggatctctgagactgtcttgtgccgccagcggcttcagcttcagcgacttttggatgagctgggtccgacaggcccctggcaaaggacttgaatgggtcgccacaatcagccaggccggcagcgagaaggactacgtggactctgtgaagggcagattcaccatcagccgggacaacgccaagaagtccctgtacctccagatgaacagcctgagagccgaggacaccgccgtgtactattgtgcctctggcgtgtacagcttcgactacagaggccagggcaccctggtcacagtctcttctggtaccggcggaggcggatctggcggcggaggtagcggtggcggaggatctgaattccagatcgtgctgacacagagccctgccatcatgtccgcttctcccggcgagaaagtgaccatgacatgtagcgccagcagcagcgtgtccttcatgcactggtatcagcagaagtccggcacaagccccaagcggtggatctacgataccagcacactggcctctggcgtgccagccagatttggcggatctggcagcggcacatcttacagcctgaccatcagcagcatggaagccgaagatgccgccacctactactgccagcagtggtccagcaatcccctgacatttggagccggcaccaagctggaactgaagagactcgagatccagaaccctgatcctgccgtgtaccagctgcgggatagcaagagcagcgacaagagcgtgtgtctgttcaccgacttcgacagccagaccaacgtgtcccagagcaaggactccgacgtgtacatcaccgataagtgcgtgctggacatgcggagcatggacttcaagagcaactccgccgtggcctggtccaacaagtccgatttcgcctgcgccaacgccttcaacaacagcattatccccgaggacacattcttcccaagccccgagagcagctgcggctttaccagcgagagctaccagcagggcgtgctgagcgccaccatcctgtacgagatcctgctgggcaaggccaccctgtacgccgtgctggtgtctgccctggtgctgatggctatggtcaagcggaaggacagccggggacgcgccaagagaagcggatctggcgtgaagcagaccctgaatttcgacctgctgaagctggctggcgacgtggaatccaacccaggccctactagtatggactggatttggcgcatccttttccttgtcggcgctgctaccggcgcgcattccgggccccagctccagctgcaagagtctggacctggcctggtcaagcctagcgagacactgagcctgacctgtaccgtgtccggcgatagcatcagcagcggcgattactactggggctggatcagacagcctcctggcaaaggactggaatggatcggccacatctactacagcggcgtgacctactacaaccccagcctgaagtccagagtgaccatcagcgtggacaccagccggaaccagttctccctgaagctgtctagcgtgacagccgccgataccgccgtgtactactgcaccagagaggacagcagcaactggcggagtagaggccagggaacactggtcacagttagctctggatccggcggaggcggaagtggaggcggaggatctggcggcggaggctctttcgaacaagttcagctgcaacagagcggccctgagctggttaagcctggcgcttctgtgcggatctcttgcaaggccagcggctacaccttcaccagctactacatccactgggtcaagcagcggcctggacagggactcgaatggatcggctggatctaccccggcaacctgaacaccaagtacaacgagaagttcaagggcaaagccacactgaccgccgacaagagcagcagcacagcctacatgcagctgagcagcctgacaagcgaggacagcgccgtgtacttctgcgccagatacgactggtacttcgacgtgtggggagccggaaccaccgtgacagtttcttctacgcgtgaggacctgaagaacgtgttcccacctgaggtggccgtgttcgagcctagcgaggccgagatcagccacacccagaaagccaccctcgtgtgcctggctaccggcttctaccccgaccatgtggaactgtcttggtgggtcaacggcaaagaggtgcacagcggcgtgtgtaccgacccccagccactgaaagaacagcccgccctgaacgacagccggtactgcctgagcagcagactgagagtgtccgccaccttctggcagaacccccggaaccacttcagatgccaggtgcagttctacggcctgagcgagaacgacgagtggacccaggacagagccaagcccgtgacccagatcgtgtctgccgaagcctggggcagagccgattgcgacgtgaagctggtggaaaagagcttcgagacagacaccaacctgaacttccagaacctgagcgtgatcggcttcagaatcctgctgctgaaagtggccggctttaacctgctgatgaccctgcggctgtggtccagc

SEQ ID NO: 38938 - DNA, 2058 bp, synthetic construct
  source 1..2058: mol_type = other DNA
atggccttaccagtgaccgccttgctcctgccgctggccttgctgctccacgccgccaggccgcagatcgtgctgacacagagccctgccatcatgtccgcttctcccggcgagaaagtgaccatgacatgtagcgccagcagcagcgtgtccttcatgcactggtatcagcagaagtccggcacaagccccaagcggtggatctacgataccagcacactggcctctggcgtgccagccagatttggcggatctggcagcggcacatcttacagcctgaccatcagcagcatggaagccgaagatgccgccacctactactgccagcagtggtccagcaatcccctgacatttggagccggcaccaagctggaactgaagagactcgaggacctgaagaacgtgttcccacctgaggtggccgtgttcgagcctagcgaggccgagatcagccacacccagaaagccaccctcgtgtgcctggctaccggcttctaccccgaccatgtggaactgtcttggtgggtcaacggcaaagaggtgcacagcggcgtgtgtaccgacccccagccactgaaagaacagcccgccctgaacgacagccggtactgcctgagcagcagactgagagtgtccgccaccttctggcagaacccccggaaccacttcagatgccaggtgcagttctacggcctgagcgagaacgacgagtggacccaggacagagccaagcccgtgacccagatcgtgtctgccgaagcctggggcagagccgattgcgacgtgaagctggtggaaaagagcttcgagacagacaccaacctgaacttccagaacctgagcgtgatcggcttcagaatcctgctgctgaaagtggccggctttaacctgctgatgaccctgcggctgtggtccagcagggccaagcgatctggatctggagcaacaaacttctcactactcaaacaagcaggtgacgtggaggagaatcccgggcctactagtatggactggatttggcgcatccttttccttgtcggcgctgctaccggcgcccattccgggcccatggaccccgacctggaaatcagagccgccttcctgcggcagagaaacacagccctgagaacagaggtggccgagctggaacaagaggtgcagcggctggaaaacgaggtgtcccagtacgagacaagatacggccctctcggaggcggaaaaggatccggcggcggaggatctggcggaggcggatctgggggcggaggctctttcgaacaagttcagctgcaacagagcggccctgagctggttaagcctggcgcttctgtgcggatctcttgcaaggccagcggctacaccttcaccagctactacatccactgggtcaagcagcggcctggacagggactcgaatggatcggctggatctaccccggcaacctgaacaccaagtacaacgagaagttcaagggcaaagccacactgaccgccgacaagagcagcagcacagcctacatgcagctgagcagcctgacaagcgaggacagcgccgtgtacttctgcgccagatacgactggtacttcgacgtgtggggagccggaaccaccgtgacagtttcttctacgcgtatccagaaccctgatcctgccgtgtaccagctgcgggatagcaagagcagcgacaagagcgtgtgtctgttcaccgacttcgacagccagaccaacgtgtcccagagcaaggactccgacgtgtacatcaccgataagtgcgtgctggacatgcggagcatggacttcaagagcaactccgccgtggcctggtccaacaagtccgatttcgcctgcgccaacgccttcaacaacagcattatccccgaggacacattcttcccaagccccgagagcagctgcggctttaccagcgagagctaccagcagggcgtgctgagcgccaccatcctgtacgagatcctgctgggcaaggccaccctgtacgccgtgctggtgtctgccctggtgctgatggctatggtcaagcggaaggacagccgggga

SEQ ID NO: 38939 - DNA, 2070 bp, synthetic construct
  source 1..2070: mol_type = other DNA
atggccttaccagtgaccgccttgctcctgccgctggccttgctgctccacgccgccaggccgcagatcgtgctgacacagagccctgccatcatgtccgcttctcccggcgagaaagtgaccatgacatgtagcgccagcagcagcgtgtccttcatgcactggtatcagcagaagtccggcacaagccccaagcggtggatctacgataccagcacactggcctctggcgtgccagccagatttggcggatctggcagcggcacatcttacagcctgaccatcagcagcatggaagccgaagatgccgccacctactactgccagcagtggtccagcaatcccctgacatttggagccggcaccaagctggaactgaagagactcgagatccagaaccctgatcctgccgtgtaccagctgcgggatagcaagagcagcgacaagagcgtgtgtctgttcaccgacttcgacagccagaccaacgtgtcccagagcaaggactccgacgtgtacatcaccgataagtgcgtgctggacatgcggagcatggacttcaagagcaactccgccgtggcctggtccaacaagtccgatttcgcctgcgccaacgccttcaacaacagcattatccccgaggacacattcttcccaagccccgagagcagctgcggctttaccagcgagagctaccagcagggcgtgctgagcgccaccatcctgtacgagatcctgctgggcaaggccaccctgtacgccgtgctggtgtctgccctggtgctgatggctatggtcaagcggaaggacagccggggacgcgccaagagaagcggatctggcgtgaagcagaccctgaatttcgacctgctgaagctggctggcgacgtggaatccaacccaggccctactagtatggactggatttggcgcatccttttccttgtcggcgctgctaccggcgcccattccgggcccatggaccccgacctggaaatcagagccgccttcctgcggcagagaaacacagccctgagaacagaggtggccgagctggaacaagaggtgcagcggctggaaaacgaggtgtcccagtacgagacaagatacggccctctcggaggcggaaaaggatccggcggcggaggatctggcggaggcggatctgggggcggaggctctttcgaacaagttcagctgcaacagagcggccctgagctggttaagcctggcgcttctgtgcggatctcttgcaaggccagcggctacaccttcaccagctactacatccactgggtcaagcagcggcctggacagggactcgaatggatcggctggatctaccccggcaacctgaacaccaagtacaacgagaagttcaagggcaaagccacactgaccgccgacaagagcagcagcacagcctacatgcagctgagcagcctgacaagcgaggacagcgccgtgtacttctgcgccagatacgactggtacttcgacgtgtggggagccggaaccaccgtgacagtttcttctacgcgtgaggacctgaagaacgtgttcccacctgaggtggccgtgttcgagcctagcgaggccgagatcagccacacccagaaagccaccctcgtgtgcctggctaccggcttctaccccgaccatgtggaactgtcttggtgggtcaacggcaaagaggtgcacagcggcgtgtgtaccgacccccagccactgaaagaacagcccgccctgaacgacagccggtactgcctgagcagcagactgagagtgtccgccaccttctggcagaacccccggaaccacttcagatgccaggtgcagttctacggcctgagcgagaacgacgagtggacccaggacagagccaagcccgtgacccagatcgtgtctgccgaagcctggggcagagccgattgcgacgtgaagctggtggaaaagagcttcgagacagacaccaacctgaacttccagaacctgagcgtgatcggcttcagaatcctgctgctgaaagtggccggctttaacctgctgatgaccctgcggctgtggtccagc

SEQ ID NO: 38940 - DNA, 1989 bp, synthetic construct
  source 1..1989: mol_type = other DNA
atggccttaccagtgaccgccttgctcctgccgctggccttgctgctccacgccgccaggccgcagatcgtgctgacacagagccctgccatcatgtccgcttctcccggcgagaaagtgaccatgacatgtagcgccagcagcagcgtgtccttcatgcactggtatcagcagaagtccggcacaagccccaagcggtggatctacgataccagcacactggcctctggcgtgccagccagatttggcggatctggcagcggcacatcttacagcctgaccatcagcagcatggaagccgaagatgccgccacctactactgccagcagtggtccagcaatcccctgacatttggagccggcaccaagctggaactgaagagactcgaggacctgaagaacgtgttcccacctgaggtggccgtgttcgagcctagcgaggccgagatcagccacacccagaaagccaccctcgtgtgcctggctaccggcttctaccccgaccatgtggaactgtcttggtgggtcaacggcaaagaggtgcacagcggcgtgtgtaccgacccccagccactgaaagaacagcccgccctgaacgacagccggtactgcctgagcagcagactgagagtgtccgccaccttctggcagaacccccggaaccacttcagatgccaggtgcagttctacggcctgagcgagaacgacgagtggacccaggacagagccaagcccgtgacccagatcgtgtctgccgaagcctggggcagagccgattgcgacgtgaagctggtggaaaagagcttcgagacagacaccaacctgaacttccagaacctgagcgtgatcggcttcagaatcctgctgctgaaagtggccggctttaacctgctgatgaccctgcggctgtggtccagcagggccaagcgatctggatctggagcaacaaacttctcactactcaaacaagcaggtgacgtggaggagaatcccgggcctactagtatggactggatttggcgcatccttttccttgtcggcgctgctaccggcgcccattccgggcccgaagttgctgccctcgagaaggaggtagcagctttggaaaaagaagtcgcagcccttgagaaagaagttgcggctctggagaagggatccggcggcggaggatctggcggaggcggatctgggggcggaggctctttcgaacaagttcagctgcaacagagcggccctgagctggttaagcctggcgcttctgtgcggatctcttgcaaggccagcggctacaccttcaccagctactacatccactgggtcaagcagcggcctggacagggactcgaatggatcggctggatctaccccggcaacctgaacaccaagtacaacgagaagttcaagggcaaagccacactgaccgccgacaagagcagcagcacagcctacatgcagctgagcagcctgacaagcgaggacagcgccgtgtacttctgcgccagatacgactggtacttcgacgtgtggggagccggaaccaccgtgacagtttcttctacgcgtatccagaaccctgatcctgccgtgtaccagctgcgggatagcaagagcagcgacaagagcgtgtgtctgttcaccgacttcgacagccagaccaacgtgtcccagagcaaggactccgacgtgtacatcaccgataagtgcgtgctggacatgcggagcatggacttcaagagcaactccgccgtggcctggtccaacaagtccgatttcgcctgcgccaacgccttcaacaacagcattatccccgaggacacattcttcccaagccccgagagcagctgcggctttaccagcgagagctaccagcagggcgtgctgagcgccaccatcctgtacgagatcctgctgggcaaggccaccctgtacgccgtgctggtgtctgccctggtgctgatggctatggtcaagcggaaggacagccgggga

SEQ ID NO: 38941 - DNA, 2001 bp, synthetic construct
  source 1..2001: mol_type = other DNA
atggccttaccagtgaccgccttgctcctgccgctggccttgctgctccacgccgccaggccgcagatcgtgctgacacagagccctgccatcatgtccgcttctcccggcgagaaagtgaccatgacatgtagcgccagcagcagcgtgtccttcatgcactggtatcagcagaagtccggcacaagccccaagcggtggatctacgataccagcacactggcctctggcgtgccagccagatttggcggatctggcagcggcacatcttacagcctgaccatcagcagcatggaagccgaagatgccgccacctactactgccagcagtggtccagcaatcccctgacatttggagccggcaccaagctggaactgaagagactcgagatccagaaccctgatcctgccgtgtaccagctgcgggatagcaagagcagcgacaagagcgtgtgtctgttcaccgacttcgacagccagaccaacgtgtcccagagcaaggactccgacgtgtacatcaccgataagtgcgtgctggacatgcggagcatggacttcaagagcaactccgccgtggcctggtccaacaagtccgatttcgcctgcgccaacgccttcaacaacagcattatccccgaggacacattcttcccaagccccgagagcagctgcggctttaccagcgagagctaccagcagggcgtgctgagcgccaccatcctgtacgagatcctgctgggcaaggccaccctgtacgccgtgctggtgtctgccctggtgctgatggctatggtcaagcggaaggacagccggggacgcgccaagagaagcggatctggcgtgaagcagaccctgaatttcgacctgctgaagctggctggcgacgtggaatccaacccaggccctactagtatggactggatttggcgcatccttttccttgtcggcgctgctaccggcgcccattccgggcccgaagttgctgccctcgagaaggaggtagcagctttggaaaaagaagtcgcagcccttgagaaagaagttgcggctctggagaagggatccggcggcggaggatctggcggaggcggatctgggggcggaggctctttcgaacaagttcagctgcaacagagcggccctgagctggttaagcctggcgcttctgtgcggatctcttgcaaggccagcggctacaccttcaccagctactacatccactgggtcaagcagcggcctggacagggactcgaatggatcggctggatctaccccggcaacctgaacaccaagtacaacgagaagttcaagggcaaagccacactgaccgccgacaagagcagcagcacagcctacatgcagctgagcagcctgacaagcgaggacagcgccgtgtacttctgcgccagatacgactggtacttcgacgtgtggggagccggaaccaccgtgacagtttcttctacgcgtgaggacctgaagaacgtgttcccacctgaggtggccgtgttcgagcctagcgaggccgagatcagccacacccagaaagccaccctcgtgtgcctggctaccggcttctaccccgaccatgtggaactgtcttggtgggtcaacggcaaagaggtgcacagcggcgtgtgtaccgacccccagccactgaaagaacagcccgccctgaacgacagccggtactgcctgagcagcagactgagagtgtccgccaccttctggcagaacccccggaaccacttcagatgccaggtgcagttctacggcctgagcgagaacgacgagtggacccaggacagagccaagcccgtgacccagatcgtgtctgccgaagcctggggcagagccgattgcgacgtgaagctggtggaaaagagcttcgagacagacaccaacctgaacttccagaacctgagcgtgatcggcttcagaatcctgctgctgaaagtggccggctttaacctgctgatgaccctgcggctgtggtccagc

SEQ ID NO: 38942 - DNA, 2259 bp, synthetic construct
  source 1..2259: mol_type = other DNA
atggccttaccagtgaccgccttgctcctgccgctggccttgctgctccacgccgccaggccgcagatcgtgctgacacagagccctgccatcatgtccgcttctcccggcgagaaagtgaccatgacatgtagcgccagcagcagcgtgtccttcatgcactggtatcagcagaagtccggcacaagccccaagcggtggatctacgataccagcacactggcctctggcgtgccagccagatttggcggatctggcagcggcacatcttacagcctgaccatcagcagcatggaagccgaagatgccgccacctactactgccagcagtggtccagcaatcccctgacatttggagccggcaccaagctggaactgaagagactcgaggacctgaagaacgtgttcccacctgaggtggccgtgttcgagcctagcgaggccgagatcagccacacccagaaagccaccctcgtgtgcctggctaccggcttctaccccgaccatgtggaactgtcttggtgggtcaacggcaaagaggtgcacagcggcgtgtgtaccgacccccagccactgaaagaacagcccgccctgaacgacagccggtactgcctgagcagcagactgagagtgtccgccaccttctggcagaacccccggaaccacttcagatgccaggtgcagttctacggcctgagcgagaacgacgagtggacccaggacagagccaagcccgtgacccagatcgtgtctgccgaagcctggggcagagccgattgcgacgtgaagctggtggaaaagagcttcgagacagacaccaacctgaacttccagaacctgagcgtgatcggcttcagaatcctgctgctgaaagtggccggctttaacctgctgatgaccctgcggctgtggtccagcagggccaagcgatctggatctggagcaacaaacttctcactactcaaacaagcaggtgacgtggaggagaatcccgggcctactagtatggactggatttggcgcatccttttccttgtcggcgctgctaccggcgcccattccgggccccaggttcagctgcaagagtctggcggaggacttgctcaagctggcggaagcctgagactgtcttgtgccgcctctggcagaaccttcagcatgggctggtttagacaggcccctggcaaagagagagagttcgtcgccgccatcacatacagcggcggcagcccttactacgcctcttctgtcagaggccggttcaccatcagccgggacaacgccaagaacaccgtgtacctccagatgaacagcctgaagccagaggacaccgccgtgtactactgtgccgccaatccaacctacggcagcgactggaatgccgagaattggggccagggcacccaagtgacagtgtctagtggatccggcggcggaggatctggcggaggcggatctgggggcggaggctctttcgaacaagttcagctgcaacagagcggccctgagctggttaagcctggcgcttctgtgcggatctcttgcaaggccagcggctacaccttcaccagctactacatccactgggtcaagcagcggcctggacagggactcgaatggatcggctggatctaccccggcaacctgaacaccaagtacaacgagaagttcaagggcaaagccacactgaccgccgacaagagcagcagcacagcctacatgcagctgagcagcctgacaagcgaggacagcgccgtgtacttctgcgccagatacgactggtacttcgacgtgtggggagccggaaccaccgtgacagtttcttctacgcgtatccagaaccctgatcctgccgtgtaccagctgcgggatagcaagagcagcgacaagagcgtgtgtctgttcaccgacttcgacagccagaccaacgtgtcccagagcaaggactccgacgtgtacatcaccgataagtgcgtgctggacatgcggagcatggacttcaagagcaactccgccgtggcctggtccaacaagtccgatttcgcctgcgccaacgccttcaacaacagcattatccccgaggacacattcttcccaagccccgagagcagctgcggctttaccagcgagagctaccagcagggcgtgctgagcgccaccatcctgtacgagatcctgctgggcaaggccaccctgtacgccgtgctggtgtctgccctggtgctgatggctatggtcaagcggaaggacagccgggga

SEQ ID NO: 38943 - DNA, 2271 bp, synthetic construct
  source 1..2271: mol_type = other DNA
atggccttaccagtgaccgccttgctcctgccgctggccttgctgctccacgccgccaggccgcagatcgtgctgacacagagccctgccatcatgtccgcttctcccggcgagaaagtgaccatgacatgtagcgccagcagcagcgtgtccttcatgcactggtatcagcagaagtccggcacaagccccaagcggtggatctacgataccagcacactggcctctggcgtgccagccagatttggcggatctggcagcggcacatcttacagcctgaccatcagcagcatggaagccgaagatgccgccacctactactgccagcagtggtccagcaatcccctgacatttggagccggcaccaagctggaactgaagagactcgagatccagaaccctgatcctgccgtgtaccagctgcgggatagcaagagcagcgacaagagcgtgtgtctgttcaccgacttcgacagccagaccaacgtgtcccagagcaaggactccgacgtgtacatcaccgataagtgcgtgctggacatgcggagcatggacttcaagagcaactccgccgtggcctggtccaacaagtccgatttcgcctgcgccaacgccttcaacaacagcattatccccgaggacacattcttcccaagccccgagagcagctgcggctttaccagcgagagctaccagcagggcgtgctgagcgccaccatcctgtacgagatcctgctgggcaaggccaccctgtacgccgtgctggtgtctgccctggtgctgatggctatggtcaagcggaaggacagccggggacgcgccaagagaagcggatctggcgtgaagcagaccctgaatttcgacctgctgaagctggctggcgacgtggaatccaacccaggccctactagtatggactggatttggcgcatccttttccttgtcggcgctgctaccggcgcccattccgggccccaggttcagctgcaagagtctggcggaggacttgctcaagctggcggaagcctgagactgtcttgtgccgcctctggcagaaccttcagcatgggctggtttagacaggcccctggcaaagagagagagttcgtcgccgccatcacatacagcggcggcagcccttactacgcctcttctgtcagaggccggttcaccatcagccgggacaacgccaagaacaccgtgtacctccagatgaacagcctgaagccagaggacaccgccgtgtactactgtgccgccaatccaacctacggcagcgactggaatgccgagaattggggccagggcacccaagtgacagtgtctagtggatccggcggcggaggatctggcggaggcggatctgggggcggaggctctttcgaacaagttcagctgcaacagagcggccctgagctggttaagcctggcgcttctgtgcggatctcttgcaaggccagcggctacaccttcaccagctactacatccactgggtcaagcagcggcctggacagggactcgaatggatcggctggatctaccccggcaacctgaacaccaagtacaacgagaagttcaagggcaaagccacactgaccgccgacaagagcagcagcacagcctacatgcagctgagcagcctgacaagcgaggacagcgccgtgtacttctgcgccagatacgactggtacttcgacgtgtggggagccggaaccaccgtgacagtttcttctacgcgtgaggacctgaagaacgtgttcccacctgaggtggccgtgttcgagcctagcgaggccgagatcagccacacccagaaagccaccctcgtgtgcctggctaccggcttctaccccgaccatgtggaactgtcttggtgggtcaacggcaaagaggtgcacagcggcgtgtgtaccgacccccagccactgaaagaacagcccgccctgaacgacagccggtactgcctgagcagcagactgagagtgtccgccaccttctggcagaacccccggaaccacttcagatgccaggtgcagttctacggcctgagcgagaacgacgagtggacccaggacagagccaagcccgtgacccagatcgtgtctgccgaagcctggggcagagccgattgcgacgtgaagctggtggaaaagagcttcgagacagacaccaacctgaacttccagaacctgagcgtgatcggcttcagaatcctgctgctgaaagtggccggctttaacctgctgatgaccctgcggctgtggtccagc

SEQ ID NO: 38944 - DNA, 2277 bp, synthetic construct
  source 1..2277: mol_type = other DNA
atggccttaccagtgaccgccttgctcctgccgctggccttgctgctccacgccgccaggccggaagtgcaactggtggaatctggaggctctctggtgcagccagggggaagcctgagactgtcttgtgccgcttccggcttcaccttcgacgactacgccatgagctgggtgcgccaggtgccaggcaaaggcctggaatgggtgtccagcatcaactggagcggcacccacaccgattacgccgactccgtgaaaggcagattcacaatcagcagaaacaacgccaacaataccctgtacctgcagatgaactccctgaagtctgaggatacagcagtgtattattgcgccaagaactggcgggacgccggcaccacttggtttgagaaaagcggctctgccggacagggaacccaagtgacagtgtcctccggtaccggcggaggcggatctggcggcggaggtagcggtggcggaggatctgaattccagatcgtgctgacacagagccctgccatcatgtccgcttctcccggcgagaaagtgaccatgacatgtagcgccagcagcagcgtgtccttcatgcactggtatcagcagaagtccggcacaagccccaagcggtggatctacgataccagcacactggcctctggcgtgccagccagatttggcggatctggcagcggcacatcttacagcctgaccatcagcagcatggaagccgaagatgccgccacctactactgccagcagtggtccagcaatcccctgacatttggagccggcaccaagctggaactgaagagactcgaggacctgaagaacgtgttcccacctgaggtggccgtgttcgagcctagcgaggccgagatcagccacacccagaaagccaccctcgtgtgcctggctaccggcttctaccccgaccatgtggaactgtcttggtgggtcaacggcaaagaggtgcacagcggcgtgtgtaccgacccccagccactgaaagaacagcccgccctgaacgacagccggtactgcctgagcagcagactgagagtgtccgccaccttctggcagaacccccggaaccacttcagatgccaggtgcagttctacggcctgagcgagaacgacgagtggacccaggacagagccaagcccgtgacccagatcgtgtctgccgaagcctggggcagagccgattgcgacgtgaagctggtggaaaagagcttcgagacagacaccaacctgaacttccagaacctgagcgtgatcggcttcagaatcctgctgctgaaagtggccggctttaacctgctgatgaccctgcggctgtggtccagcagggccaagcgatctggatctggagcaacaaacttctcactactcaaacaagcaggtgacgtggaggagaatcccgggcctactagtatggactggatttggcgcatccttttccttgtcggcgctgctaccggcgcgcattccttcgaacaagttcagctgcaacagagcggccctgagctggttaagcctggcgcttctgtgcggatctcttgcaaggccagcggctacaccttcaccagctactacatccactgggtcaagcagcggcctggacagggactcgaatggatcggctggatctaccccggcaacctgaacaccaagtacaacgagaagttcaagggcaaagccacactgaccgccgacaagagcagcagcacagcctacatgcagctgagcagcctgacaagcgaggacagcgccgtgtacttctgcgccagatacgactggtacttcgacgtgtggggagccggaaccaccgtgacagtttcttctacgcgtatccagaaccctgatcctgccgtgtaccagctgcgggatagcaagagcagcgacaagagcgtgtgtctgttcaccgacttcgacagccagaccaacgtgtcccagagcaaggactccgacgtgtacatcaccgataagtgcgtgctggacatgcggagcatggacttcaagagcaactccgccgtggcctggtccaacaagtccgatttcgcctgcgccaacgccttcaacaacagcattatccccgaggacacattcttcccaagccccgagagcagctgcggctttaccagcgagagctaccagcagggcgtgctgagcgccaccatcctgtacgagatcctgctgggcaaggccaccctgtacgccgtgctggtgtctgccctggtgctgatggctatggtcaagcggaaggacagccgggga

SEQ ID NO: 38945 - DNA, 2289 bp, synthetic construct
  source 1..2289: mol_type = other DNA
atggccttaccagtgaccgccttgctcctgccgctggccttgctgctccacgccgccaggccggaagtgcaactggtggaatctggaggctctctggtgcagccagggggaagcctgagactgtcttgtgccgcttccggcttcaccttcgacgactacgccatgagctgggtgcgccaggtgccaggcaaaggcctggaatgggtgtccagcatcaactggagcggcacccacaccgattacgccgactccgtgaaaggcagattcacaatcagcagaaacaacgccaacaataccctgtacctgcagatgaactccctgaagtctgaggatacagcagtgtattattgcgccaagaactggcgggacgccggcaccacttggtttgagaaaagcggctctgccggacagggaacccaagtgacagtgtcctccggtaccggcggaggcggatctggcggcggaggtagcggtggcggaggatctgaattccagatcgtgctgacacagagccctgccatcatgtccgcttctcccggcgagaaagtgaccatgacatgtagcgccagcagcagcgtgtccttcatgcactggtatcagcagaagtccggcacaagccccaagcggtggatctacgataccagcacactggcctctggcgtgccagccagatttggcggatctggcagcggcacatcttacagcctgaccatcagcagcatggaagccgaagatgccgccacctactactgccagcagtggtccagcaatcccctgacatttggagccggcaccaagctggaactgaagagactcgagatccagaaccctgatcctgccgtgtaccagctgcgggatagcaagagcagcgacaagagcgtgtgtctgttcaccgacttcgacagccagaccaacgtgtcccagagcaaggactccgacgtgtacatcaccgataagtgcgtgctggacatgcggagcatggacttcaagagcaactccgccgtggcctggtccaacaagtccgatttcgcctgcgccaacgccttcaacaacagcattatccccgaggacacattcttcccaagccccgagagcagctgcggctttaccagcgagagctaccagcagggcgtgctgagcgccaccatcctgtacgagatcctgctgggcaaggccaccctgtacgccgtgctggtgtctgccctggtgctgatggctatggtcaagcggaaggacagccggggacgcgccaagagaagcggatctggcgtgaagcagaccctgaatttcgacctgctgaagctggctggcgacgtggaatccaacccaggccctactagtatggactggatttggcgcatccttttccttgtcggcgctgctaccggcgcgcattccttcgaacaagttcagctgcaacagagcggccctgagctggttaagcctggcgcttctgtgcggatctcttgcaaggccagcggctacaccttcaccagctactacatccactgggtcaagcagcggcctggacagggactcgaatggatcggctggatctaccccggcaacctgaacaccaagtacaacgagaagttcaagggcaaagccacactgaccgccgacaagagcagcagcacagcctacatgcagctgagcagcctgacaagcgaggacagcgccgtgtacttctgcgccagatacgactggtacttcgacgtgtggggagccggaaccaccgtgacagtttcttctacgcgtgaggacctgaagaacgtgttcccacctgaggtggccgtgttcgagcctagcgaggccgagatcagccacacccagaaagccaccctcgtgtgcctggctaccggcttctaccccgaccatgtggaactgtcttggtgggtcaacggcaaagaggtgcacagcggcgtgtgtaccgacccccagccactgaaagaacagcccgccctgaacgacagccggtactgcctgagcagcagactgagagtgtccgccaccttctggcagaacccccggaaccacttcagatgccaggtgcagttctacggcctgagcgagaacgacgagtggacccaggacagagccaagcccgtgacccagatcgtgtctgccgaagcctggggcagagccgattgcgacgtgaagctggtggaaaagagcttcgagacagacaccaacctgaacttccagaacctgagcgtgatcggcttcagaatcctgctgctgaaagtggccggctttaacctgctgatgaccctgcggctgtggtccagc

SEQ ID NO: 38946 - DNA, 2271 bp, synthetic construct
  source 1..2271: mol_type = other DNA
atggccttaccagtgaccgccttgctcctgccgctggccttgctgctccacgccgccaggccggaagttcagctgcttgagtctggcggaggactggttcaacctggcggaagcctgagactgtcttgtgccgccagcggcttcatcttcagcagctacgccatgagctgggtccgacaggctcctggaaagggccaagaatgggtttccggcgttagcggcacaggcgtgaacacctactacgccgatagcgtgaagggcagattcaccatcagccgggacaacagcaagaacaccctgtacctccagatgaacagcctgagagccgaggacaccgccgtgtactattgtgcctctggcaaaggctgggacagcggctcttggtacgaggactatagaggccagggcaccctggtcacagtttcttcaggtaccggcggaggcggatctggcggcggaggtagcggtggcggaggatctgaattccagatcgtgctgacacagagccctgccatcatgtccgcttctcccggcgagaaagtgaccatgacatgtagcgccagcagcagcgtgtccttcatgcactggtatcagcagaagtccggcacaagccccaagcggtggatctacgataccagcacactggcctctggcgtgccagccagatttggcggatctggcagcggcacatcttacagcctgaccatcagcagcatggaagccgaagatgccgccacctactactgccagcagtggtccagcaatcccctgacatttggagccggcaccaagctggaactgaagagactcgaggacctgaagaacgtgttcccacctgaggtggccgtgttcgagcctagcgaggccgagatcagccacacccagaaagccaccctcgtgtgcctggctaccggcttctaccccgaccatgtggaactgtcttggtgggtcaacggcaaagaggtgcacagcggcgtgtgtaccgacccccagccactgaaagaacagcccgccctgaacgacagccggtactgcctgagcagcagactgagagtgtccgccaccttctggcagaacccccggaaccacttcagatgccaggtgcagttctacggcctgagcgagaacgacgagtggacccaggacagagccaagcccgtgacccagatcgtgtctgccgaagcctggggcagagccgattgcgacgtgaagctggtggaaaagagcttcgagacagacaccaacctgaacttccagaacctgagcgtgatcggcttcagaatcctgctgctgaaagtggccggctttaacctgctgatgaccctgcggctgtggtccagcagggccaagcgatctggatctggagcaacaaacttctcactactcaaacaagcaggtgacgtggaggagaatcccgggcctactagtatggactggatttggcgcatccttttccttgtcggcgctgctaccggcgcgcattccttcgaacaagttcagctgcaacagagcggccctgagctggttaagcctggcgcttctgtgcggatctcttgcaaggccagcggctacaccttcaccagctactacatccactgggtcaagcagcggcctggacagggactcgaatggatcggctggatctaccccggcaacctgaacaccaagtacaacgagaagttcaagggcaaagccacactgaccgccgacaagagcagcagcacagcctacatgcagctgagcagcctgacaagcgaggacagcgccgtgtacttctgcgccagatacgactggtacttcgacgtgtggggagccggaaccaccgtgacagtttcttctacgcgtatccagaaccctgatcctgccgtgtaccagctgcgggatagcaagagcagcgacaagagcgtgtgtctgttcaccgacttcgacagccagaccaacgtgtcccagagcaaggactccgacgtgtacatcaccgataagtgcgtgctggacatgcggagcatggacttcaagagcaactccgccgtggcctggtccaacaagtccgatttcgcctgcgccaacgccttcaacaacagcattatccccgaggacacattcttcccaagccccgagagcagctgcggctttaccagcgagagctaccagcagggcgtgctgagcgccaccatcctgtacgagatcctgctgggcaaggccaccctgtacgccgtgctggtgtctgccctggtgctgatggctatggtcaagcggaaggacagccgggga

SEQ ID NO: 38947 - DNA, 2283 bp, synthetic construct
  source 1..2283: mol_type = other DNA
atggccttaccagtgaccgccttgctcctgccgctggccttgctgctccacgccgccaggccggaagttcagctgcttgagtctggcggaggactggttcaacctggcggaagcctgagactgtcttgtgccgccagcggcttcatcttcagcagctacgccatgagctgggtccgacaggctcctggaaagggccaagaatgggtttccggcgttagcggcacaggcgtgaacacctactacgccgatagcgtgaagggcagattcaccatcagccgggacaacagcaagaacaccctgtacctccagatgaacagcctgagagccgaggacaccgccgtgtactattgtgcctctggcaaaggctgggacagcggctcttggtacgaggactatagaggccagggcaccctggtcacagtttcttcaggtaccggcggaggcggatctggcggcggaggtagcggtggcggaggatctgaattccagatcgtgctgacacagagccctgccatcatgtccgcttctcccggcgagaaagtgaccatgacatgtagcgccagcagcagcgtgtccttcatgcactggtatcagcagaagtccggcacaagccccaagcggtggatctacgataccagcacactggcctctggcgtgccagccagatttggcggatctggcagcggcacatcttacagcctgaccatcagcagcatggaagccgaagatgccgccacctactactgccagcagtggtccagcaatcccctgacatttggagccggcaccaagctggaactgaagagactcgagatccagaaccctgatcctgccgtgtaccagctgcgggatagcaagagcagcgacaagagcgtgtgtctgttcaccgacttcgacagccagaccaacgtgtcccagagcaaggactccgacgtgtacatcaccgataagtgcgtgctggacatgcggagcatggacttcaagagcaactccgccgtggcctggtccaacaagtccgatttcgcctgcgccaacgccttcaacaacagcattatccccgaggacacattcttcccaagccccgagagcagctgcggctttaccagcgagagctaccagcagggcgtgctgagcgccaccatcctgtacgagatcctgctgggcaaggccaccctgtacgccgtgctggtgtctgccctggtgctgatggctatggtcaagcggaaggacagccggggacgcgccaagagaagcggatctggcgtgaagcagaccctgaatttcgacctgctgaagctggctggcgacgtggaatccaacccaggccctactagtatggactggatttggcgcatccttttccttgtcggcgctgctaccggcgcgcattccttcgaacaagttcagctgcaacagagcggccctgagctggttaagcctggcgcttctgtgcggatctcttgcaaggccagcggctacaccttcaccagctactacatccactgggtcaagcagcggcctggacagggactcgaatggatcggctggatctaccccggcaacctgaacaccaagtacaacgagaagttcaagggcaaagccacactgaccgccgacaagagcagcagcacagcctacatgcagctgagcagcctgacaagcgaggacagcgccgtgtacttctgcgccagatacgactggtacttcgacgtgtggggagccggaaccaccgtgacagtttcttctacgcgtgaggacctgaagaacgtgttcccacctgaggtggccgtgttcgagcctagcgaggccgagatcagccacacccagaaagccaccctcgtgtgcctggctaccggcttctaccccgaccatgtggaactgtcttggtgggtcaacggcaaagaggtgcacagcggcgtgtgtaccgacccccagccactgaaagaacagcccgccctgaacgacagccggtactgcctgagcagcagactgagagtgtccgccaccttctggcagaacccccggaaccacttcagatgccaggtgcagttctacggcctgagcgagaacgacgagtggacccaggacagagccaagcccgtgacccagatcgtgtctgccgaagcctggggcagagccgattgcgacgtgaagctggtggaaaagagcttcgagacagacaccaacctgaacttccagaacctgagcgtgatcggcttcagaatcctgctgctgaaagtggccggctttaacctgctgatgaccctgcggctgtggtccagc

SEQ ID NO: 38948 - DNA, 2175 bp, synthetic construct
  source 1..2175: mol_type = other DNA
atggccttaccagtgaccgccttgctcctgccgctggccttgctgctccacgccgccaggccgatgctgcccgctcctaagaatctggtggtgtccagaatcaccgaggacagcgccagactgtcttggacagctcctgatgccgccttcgacagcttccccatccggtacatcgagacactgatctggggcgaagccatctggctggatgtgcctggaagcgagagaagctacgacctgaccggactgaagcctggcacagagtatgccgtggtcatcaccggcgtgaaaggcggcagattctctagccctctggtggcctctttcaccaccggtaccggcggaggcggatctggcggcggaggtagcggtggcggaggatctgaattccagatcgtgctgacacagagccctgccatcatgtccgcttctcccggcgagaaagtgaccatgacatgtagcgccagcagcagcgtgtccttcatgcactggtatcagcagaagtccggcacaagccccaagcggtggatctacgataccagcacactggcctctggcgtgccagccagatttggcggatctggcagcggcacatcttacagcctgaccatcagcagcatggaagccgaagatgccgccacctactactgccagcagtggtccagcaatcccctgacatttggagccggcaccaagctggaactgaagagactcgaggacctgaagaacgtgttcccacctgaggtggccgtgttcgagcctagcgaggccgagatcagccacacccagaaagccaccctcgtgtgcctggctaccggcttctaccccgaccatgtggaactgtcttggtgggtcaacggcaaagaggtgcacagcggcgtgtgtaccgacccccagccactgaaagaacagcccgccctgaacgacagccggtactgcctgagcagcagactgagagtgtccgccaccttctggcagaacccccggaaccacttcagatgccaggtgcagttctacggcctgagcgagaacgacgagtggacccaggacagagccaagcccgtgacccagatcgtgtctgccgaagcctggggcagagccgattgcgacgtgaagctggtggaaaagagcttcgagacagacaccaacctgaacttccagaacctgagcgtgatcggcttcagaatcctgctgctgaaagtggccggctttaacctgctgatgaccctgcggctgtggtccagcagggccaagcgatctggatctggagcaacaaacttctcactactcaaacaagcaggtgacgtggaggagaatcccgggcctactagtatggactggatttggcgcatccttttccttgtcggcgctgctaccggcgcgcattccttcgaacaagttcagctgcaacagagcggccctgagctggttaagcctggcgcttctgtgcggatctcttgcaaggccagcggctacaccttcaccagctactacatccactgggtcaagcagcggcctggacagggactcgaatggatcggctggatctaccccggcaacctgaacaccaagtacaacgagaagttcaagggcaaagccacactgaccgccgacaagagcagcagcacagcctacatgcagctgagcagcctgacaagcgaggacagcgccgtgtacttctgcgccagatacgactggtacttcgacgtgtggggagccggaaccaccgtgacagtttcttctacgcgtatccagaaccctgatcctgccgtgtaccagctgcgggatagcaagagcagcgacaagagcgtgtgtctgttcaccgacttcgacagccagaccaacgtgtcccagagcaaggactccgacgtgtacatcaccgataagtgcgtgctggacatgcggagcatggacttcaagagcaactccgccgtggcctggtccaacaagtccgatttcgcctgcgccaacgccttcaacaacagcattatccccgaggacacattcttcccaagccccgagagcagctgcggctttaccagcgagagctaccagcagggcgtgctgagcgccaccatcctgtacgagatcctgctgggcaaggccaccctgtacgccgtgctggtgtctgccctggtgctgatggctatggtcaagcggaaggacagccgggga

SEQ ID NO: 38949 - DNA, 2187 bp, synthetic construct
  source 1..2187: mol_type = other DNA
atggccttaccagtgaccgccttgctcctgccgctggccttgctgctccacgccgccaggccgatgctgcccgctcctaagaatctggtggtgtccagaatcaccgaggacagcgccagactgtcttggacagctcctgatgccgccttcgacagcttccccatccggtacatcgagacactgatctggggcgaagccatctggctggatgtgcctggaagcgagagaagctacgacctgaccggactgaagcctggcacagagtatgccgtggtcatcaccggcgtgaaaggcggcagattctctagccctctggtggcctctttcaccaccggtaccggcggaggcggatctggcggcggaggtagcggtggcggaggatctgaattccagatcgtgctgacacagagccctgccatcatgtccgcttctcccggcgagaaagtgaccatgacatgtagcgccagcagcagcgtgtccttcatgcactggtatcagcagaagtccggcacaagccccaagcggtggatctacgataccagcacactggcctctggcgtgccagccagatttggcggatctggcagcggcacatcttacagcctgaccatcagcagcatggaagccgaagatgccgccacctactactgccagcagtggtccagcaatcccctgacatttggagccggcaccaagctggaactgaagagactcgagatccagaaccctgatcctgccgtgtaccagctgcgggatagcaagagcagcgacaagagcgtgtgtctgttcaccgacttcgacagccagaccaacgtgtcccagagcaaggactccgacgtgtacatcaccgataagtgcgtgctggacatgcggagcatggacttcaagagcaactccgccgtggcctggtccaacaagtccgatttcgcctgcgccaacgccttcaacaacagcattatccccgaggacacattcttcccaagccccgagagcagctgcggctttaccagcgagagctaccagcagggcgtgctgagcgccaccatcctgtacgagatcctgctgggcaaggccaccctgtacgccgtgctggtgtctgccctggtgctgatggctatggtcaagcggaaggacagccggggacgcgccaagagaagcggatctggcgtgaagcagaccctgaatttcgacctgctgaagctggctggcgacgtggaatccaacccaggccctactagtatggactggatttggcgcatccttttccttgtcggcgctgctaccggcgcgcattccttcgaacaagttcagctgcaacagagcggccctgagctggttaagcctggcgcttctgtgcggatctcttgcaaggccagcggctacaccttcaccagctactacatccactgggtcaagcagcggcctggacagggactcgaatggatcggctggatctaccccggcaacctgaacaccaagtacaacgagaagttcaagggcaaagccacactgaccgccgacaagagcagcagcacagcctacatgcagctgagcagcctgacaagcgaggacagcgccgtgtacttctgcgccagatacgactggtacttcgacgtgtggggagccggaaccaccgtgacagtttcttctacgcgtgaggacctgaagaacgtgttcccacctgaggtggccgtgttcgagcctagcgaggccgagatcagccacacccagaaagccaccctcgtgtgcctggctaccggcttctaccccgaccatgtggaactgtcttggtgggtcaacggcaaagaggtgcacagcggcgtgtgtaccgacccccagccactgaaagaacagcccgccctgaacgacagccggtactgcctgagcagcagactgagagtgtccgccaccttctggcagaacccccggaaccacttcagatgccaggtgcagttctacggcctgagcgagaacgacgagtggacccaggacagagccaagcccgtgacccagatcgtgtctgccgaagcctggggcagagccgattgcgacgtgaagctggtggaaaagagcttcgagacagacaccaacctgaacttccagaacctgagcgtgatcggcttcagaatcctgctgctgaaagtggccggctttaacctgctgatgaccctgcggctgtggtccagc

SEQ ID NO: 38950 - DNA, 2262 bp, synthetic construct
  source 1..2262: mol_type = other DNA
atggccttaccagtgaccgccttgctcctgccgctggccttgctgctccacgccgccaggccggaggtgcagctggttgaatctggcggaggactggttcagcctggcggatctctgagactgtcttgtgccgccagcggcttcaacatcaaggatacctgtatcggctgggttcgcagagcccctggcaaagaggaagaactggtcgccaaaatctgcaagtacagcggccacaccagatacgccgacagcgtgaagggcagattcaccatcagcgccgacaccagcaagaacaccgcctacctccagatgaacagcctgagagccgaggacaccgccgtgtactattgtgccgctgtgtccgtcagagatgggcactacaattactggggccagggcaccaccgtgaccgtttcttcaggtaccggcggaggcggatctggcggcggaggtagcggtggcggaggatctgaattccagatcgtgctgacacagagccctgccatcatgtccgcttctcccggcgagaaagtgaccatgacatgtagcgccagcagcagcgtgtccttcatgcactggtatcagcagaagtccggcacaagccccaagcggtggatctacgataccagcacactggcctctggcgtgccagccagatttggcggatctggcagcggcacatcttacagcctgaccatcagcagcatggaagccgaagatgccgccacctactactgccagcagtggtccagcaatcccctgacatttggagccggcaccaagctggaactgaagagactcgaggacctgaagaacgtgttcccacctgaggtggccgtgttcgagcctagcgaggccgagatcagccacacccagaaagccaccctcgtgtgcctggctaccggcttctaccccgaccatgtggaactgtcttggtgggtcaacggcaaagaggtgcacagcggcgtgtgtaccgacccccagccactgaaagaacagcccgccctgaacgacagccggtactgcctgagcagcagactgagagtgtccgccaccttctggcagaacccccggaaccacttcagatgccaggtgcagttctacggcctgagcgagaacgacgagtggacccaggacagagccaagcccgtgacccagatcgtgtctgccgaagcctggggcagagccgattgcgacgtgaagctggtggaaaagagcttcgagacagacaccaacctgaacttccagaacctgagcgtgatcggcttcagaatcctgctgctgaaagtggccggctttaacctgctgatgaccctgcggctgtggtccagcagggccaagcgatctggatctggagcaacaaacttctcactactcaaacaagcaggtgacgtggaggagaatcccgggcctactagtatggactggatttggcgcatccttttccttgtcggcgctgctaccggcgcgcattccttcgaacaagttcagctgcaacagagcggccctgagctggttaagcctggcgcttctgtgcggatctcttgcaaggccagcggctacaccttcaccagctactacatccactgggtcaagcagcggcctggacagggactcgaatggatcggctggatctaccccggcaacctgaacaccaagtacaacgagaagttcaagggcaaagccacactgaccgccgacaagagcagcagcacagcctacatgcagctgagcagcctgacaagcgaggacagcgccgtgtacttctgcgccagatacgactggtacttcgacgtgtggggagccggaaccaccgtgacagtttcttctacgcgtatccagaaccctgatcctgccgtgtaccagctgcgggatagcaagagcagcgacaagagcgtgtgtctgttcaccgacttcgacagccagaccaacgtgtcccagagcaaggactccgacgtgtacatcaccgataagtgcgtgctggacatgcggagcatggacttcaagagcaactccgccgtggcctggtccaacaagtccgatttcgcctgcgccaacgccttcaacaacagcattatccccgaggacacattcttcccaagccccgagagcagctgcggctttaccagcgagagctaccagcagggcgtgctgagcgccaccatcctgtacgagatcctgctgggcaaggccaccctgtacgccgtgctggtgtctgccctggtgctgatggctatggtcaagcggaaggacagccgggga

SEQ ID NO: 38951 - DNA, 2274 bp, synthetic construct
  source 1..2274: mol_type = other DNA
atggccttaccagtgaccgccttgctcctgccgctggccttgctgctccacgccgccaggccggaggtgcagctggttgaatctggcggaggactggttcagcctggcggatctctgagactgtcttgtgccgccagcggcttcaacatcaaggatacctgtatcggctgggttcgcagagcccctggcaaagaggaagaactggtcgccaaaatctgcaagtacagcggccacaccagatacgccgacagcgtgaagggcagattcaccatcagcgccgacaccagcaagaacaccgcctacctccagatgaacagcctgagagccgaggacaccgccgtgtactattgtgccgctgtgtccgtcagagatgggcactacaattactggggccagggcaccaccgtgaccgtttcttcaggtaccggcggaggcggatctggcggcggaggtagcggtggcggaggatctgaattccagatcgtgctgacacagagccctgccatcatgtccgcttctcccggcgagaaagtgaccatgacatgtagcgccagcagcagcgtgtccttcatgcactggtatcagcagaagtccggcacaagccccaagcggtggatctacgataccagcacactggcctctggcgtgccagccagatttggcggatctggcagcggcacatcttacagcctgaccatcagcagcatggaagccgaagatgccgccacctactactgccagcagtggtccagcaatcccctgacatttggagccggcaccaagctggaactgaagagactcgagatccagaaccctgatcctgccgtgtaccagctgcgggatagcaagagcagcgacaagagcgtgtgtctgttcaccgacttcgacagccagaccaacgtgtcccagagcaaggactccgacgtgtacatcaccgataagtgcgtgctggacatgcggagcatggacttcaagagcaactccgccgtggcctggtccaacaagtccgatttcgcctgcgccaacgccttcaacaacagcattatccccgaggacacattcttcccaagccccgagagcagctgcggctttaccagcgagagctaccagcagggcgtgctgagcgccaccatcctgtacgagatcctgctgggcaaggccaccctgtacgccgtgctggtgtctgccctggtgctgatggctatggtcaagcggaaggacagccggggacgcgccaagagaagcggatctggcgtgaagcagaccctgaatttcgacctgctgaagctggctggcgacgtggaatccaacccaggccctactagtatggactggatttggcgcatccttttccttgtcggcgctgctaccggcgcgcattccttcgaacaagttcagctgcaacagagcggccctgagctggttaagcctggcgcttctgtgcggatctcttgcaaggccagcggctacaccttcaccagctactacatccactgggtcaagcagcggcctggacagggactcgaatggatcggctggatctaccccggcaacctgaacaccaagtacaacgagaagttcaagggcaaagccacactgaccgccgacaagagcagcagcacagcctacatgcagctgagcagcctgacaagcgaggacagcgccgtgtacttctgcgccagatacgactggtacttcgacgtgtggggagccggaaccaccgtgacagtttcttctacgcgtgaggacctgaagaacgtgttcccacctgaggtggccgtgttcgagcctagcgaggccgagatcagccacacccagaaagccaccctcgtgtgcctggctaccggcttctaccccgaccatgtggaactgtcttggtgggtcaacggcaaagaggtgcacagcggcgtgtgtaccgacccccagccactgaaagaacagcccgccctgaacgacagccggtactgcctgagcagcagactgagagtgtccgccaccttctggcagaacccccggaaccacttcagatgccaggtgcagttctacggcctgagcgagaacgacgagtggacccaggacagagccaagcccgtgacccagatcgtgtctgccgaagcctggggcagagccgattgcgacgtgaagctggtggaaaagagcttcgagacagacaccaacctgaacttccagaacctgagcgtgatcggcttcagaatcctgctgctgaaagtggccggctttaacctgctgatgaccctgcggctgtggtccagc

SEQ ID NO: 38952 - DNA, 3378 bp, synthetic construct
  source 1..3378: mol_type = other DNA
atggccttaccagtgaccgccttgctcctgccgctggccttgctgctccacgccgccaggccggaagtgcagctggttgaatctggcggaggactggttcaggctggcggatctctgagactgtcttgtgccgccagcggcagaacctttagcatgggctggtttagacaggcccctggcaaagagagagagttcgtcgccgccatcacatactctggcggcagcccttactacgccgactctgtgaagggcagattcaccatcagccgggacaacgccaagaacaccgtgtacctccagatgaacagcctgaagcctgaggacaccgccgtgtactactgcgccgccaatccaacatacggcagcgactggaacgccgagaattggggccagggaacccaagtgacagtgtctagcggtaccggcggaggcggatctggcggcggaggtagcggtggcggaggatctgaattccagatcgtgctgacacagagccctgccatcatgtccgcttctcccggcgagaaagtgaccatgacatgtagcgccagcagcagcgtgtccttcatgcactggtatcagcagaagtccggcacaagccccaagcggtggatctacgataccagcacactggcctctggcgtgccagccagatttggcggatctggcagcggcacatcttacagcctgaccatcagcagcatggaagccgaagatgccgccacctactactgccagcagtggtccagcaatcccctgacatttggagccggcaccaagctggaactgaagagactcgaggacctgaagaacgtgttcccacctgaggtggccgtgttcgagcctagcgaggccgagatcagccacacccagaaagccaccctcgtgtgcctggctaccggcttctaccccgaccatgtggaactgtcttggtgggtcaacggcaaagaggtgcacagcggcgtgtgtaccgacccccagccactgaaagaacagcccgccctgaacgacagccggtactgcctgagcagcagactgagagtgtccgccaccttctggcagaacccccggaaccacttcagatgccaggtgcagttctacggcctgagcgagaacgacgagtggacccaggacagagccaagcccgtgacccagatcgtgtctgccgaagcctggggcagagccgattgcgacgtgaagctggtggaaaagagcttcgagacagacaccaacctgaacttccagaacctgagcgtgatcggcttcagaatcctgctgctgaaagtggccggctttaacctgctgatgaccctgcggctgtggtccagcagggccaagcgatctggatctggagcaacaaacttctcactactcaaacaagcaggtgacgtggaggagaatcccgggcctactagtgccaccatggactggatttggcgcatccttttccttgtcggcgctgctaccggcgcccattccgggcccgaagtgcaactggttgaatccggtggcggcctggtgcaagcaggcggatctctcagacttagctgtgccgcctccggcagaaccttcacaatgggatggtttaggcaggctccagggaaagagagagagttcgtcgccgccatctctctgtctcccacactggcctactacgccgactctgtgaaaggccggttcaccatctccagagataatgccaagaacaccgtggtgctgcaaatgaactctctgaaacccgaggatacagccctgtactattgtgccgctgaccggaagtccgtgatgagcatcagacccgattactggggacagggcacacaagtcacagtgtcctctggatccggcggcggaggatctggcggaggcggatctgggggcggaggctctttcgaacaagttcagctgcaacagagcggccctgagctggttaagcctggcgcttctgtgcggatctcttgcaaggccagcggctacaccttcaccagctactacatccactgggtcaagcagcggcctggacagggactcgaatggatcggctggatctaccccggcaacctgaacaccaagtacaacgagaagttcaagggcaaagccacactgaccgccgacaagagcagcagcacagcctacatgcagctgagcagcctgacaagcgaggacagcgccgtgtacttctgcgccagatacgactggtacttcgacgtgtggggagccggaaccaccgtgacagtttcttctacgcgtatccagaaccctgatcctgccgtgtaccagctgcgggatagcaagagcagcgacaagagcgtgtgtctgttcaccgacttcgacagccagaccaacgtgtcccagagcaaggactccgacgtgtacatcaccgataagtgcgtgctggacatgcggagcatggacttcaagagcaactccgccgtggcctggtccaacaagtccgatttcgcctgcgccaacgccttcaacaacagcattatccccgaggacacattcttcccaagccccgagagcagctgcggctttaccagcgagagctaccagcagggcgtgctgagcgccaccatcctgtacgagatcctgctgggcaaggccaccctgtacgccgtgctggtgtctgccctggtgctgatggctatggtcaagcggaaggacagccggggacgcgccaagagaagcggatctggcgtgaagcagaccctgaatttcgacctgctgaagctggctggcgacgtggaatccaacccaggcccttctagaggccatatgaccgagtacaagcccacggtgcgcctcgccacccgcgacgacgtccccagggccgtacgcaccctcgccgccgcgttcgccgactaccccgccacgcgccacaccgtcgatccggaccgccacatcgagcgggtcaccgagctgcaagaactcttcctcacgcgcgtcgggctcgacatcggcaaggtgtgggtcgcggacgacggcgccgcggtggcggtctggaccacgccggagagcgtcgaagcgggggcggtgttcgccgagatcggcccgcgcatggccgagttgagcggttcccggctggccgcgcagcaacagatggaaggcctcctggcgccgcaccggcccaaggagcccgcgtggttcctggccaccgtcggcgtctcgcccgaccaccagggcaagggtctgggcagcgccgtcgtgctccccggagtggaggcggccgagcgcgccggggtgcccgccttcctggagacctccgcgccccgcaacctccccttctacgagcggctcggcttcaccgtcaccgccgacgtcgaggtgcccgaaggaccgcgcacctggtgcatgacccgcaagcccggtgcctga

SEQ ID NO: 38953 - DNA, 2292 bp, synthetic construct
  source 1..2292: mol_type = other DNA
atggccttaccagtgaccgccttgctcctgccgctggccttgctgctccacgccgccaggccggaagtgcagctggttgaatctggcggaggactggttcagcctggcggatctctgagactgtcttgtgccgcctctggcttcgccagcgactactatatcatcggctggttcagacaggcccctggcaaagagagagagggcgtcagctgtatcagcagcagatacgccaacaccaactacgccgacagcgtgaagggcagattcaccatcagccgggacaacgccaagaacaccgtgtacctccagatgaacagcctgaagcctgaggacaccgccgtgtactactgtgccgccgacaccagaagatacacctgtcctgacattgccaccatgcaccggaacttcgattcttggggccagggcacactggtcaccgtttcttctggtaccggcggaggcggatctggcggcggaggtagcggtggcggaggatctgaattccagatcgtgctgacacagagccctgccatcatgtccgcttctcccggcgagaaagtgaccatgacatgtagcgccagcagcagcgtgtccttcatgcactggtatcagcagaagtccggcacaagccccaagcggtggatctacgataccagcacactggcctctggcgtgccagccagatttggcggatctggcagcggcacatcttacagcctgaccatcagcagcatggaagccgaagatgccgccacctactactgccagcagtggtccagcaatcccctgacatttggagccggcaccaagctggaactgaagagactcgaggacctgaagaacgtgttcccacctgaggtggccgtgttcgagcctagcgaggccgagatcagccacacccagaaagccaccctcgtgtgcctggctaccggcttctaccccgaccatgtggaactgtcttggtgggtcaacggcaaagaggtgcacagcggcgtgtgtaccgacccccagccactgaaagaacagcccgccctgaacgacagccggtactgcctgagcagcagactgagagtgtccgccaccttctggcagaacccccggaaccacttcagatgccaggtgcagttctacggcctgagcgagaacgacgagtggacccaggacagagccaagcccgtgacccagatcgtgtctgccgaagcctggggcagagccgattgcgacgtgaagctggtggaaaagagcttcgagacagacaccaacctgaacttccagaacctgagcgtgatcggcttcagaatcctgctgctgaaagtggccggctttaacctgctgatgaccctgcggctgtggtccagcagggccaagcgatctggatctggagcaacaaacttctcactactcaaacaagcaggtgacgtggaggagaatcccgggcctactagtatggactggatttggcgcatccttttccttgtcggcgctgctaccggcgcgcattccttcgaacaagttcagctgcaacagagcggccctgagctggttaagcctggcgcttctgtgcggatctcttgcaaggccagcggctacaccttcaccagctactacatccactgggtcaagcagcggcctggacagggactcgaatggatcggctggatctaccccggcaacctgaacaccaagtacaacgagaagttcaagggcaaagccacactgaccgccgacaagagcagcagcacagcctacatgcagctgagcagcctgacaagcgaggacagcgccgtgtacttctgcgccagatacgactggtacttcgacgtgtggggagccggaaccaccgtgacagtttcttctacgcgtatccagaaccctgatcctgccgtgtaccagctgcgggatagcaagagcagcgacaagagcgtgtgtctgttcaccgacttcgacagccagaccaacgtgtcccagagcaaggactccgacgtgtacatcaccgataagtgcgtgctggacatgcggagcatggacttcaagagcaactccgccgtggcctggtccaacaagtccgatttcgcctgcgccaacgccttcaacaacagcattatccccgaggacacattcttcccaagccccgagagcagctgcggctttaccagcgagagctaccagcagggcgtgctgagcgccaccatcctgtacgagatcctgctgggcaaggccaccctgtacgccgtgctggtgtctgccctggtgctgatggctatggtcaagcggaaggacagccggggataa

SEQ ID NO: 38954 - DNA, 2292 bp, synthetic construct
  source 1..2292: mol_type = other DNA
atggccttaccagtgaccgccttgctcctgccgctggccttgctgctccacgccgccaggccggaagtgcagctggttgaatctggcggaggactggttcagcctggcggatctctgagactgagctgtgaagccagcggcttcgccagcgacgattacatcatcggctggttcagacaggcccctggcaaagagagagagggcgtcagctgcatcagctctaagtacgccaacaccgtgtacaccgacagcgtgaagggcagattcagactgagcagaggcaccgccaagaataccgtgtacctccagatgagcgccctgaagcctgaggataccgccgtgtactactgcgctatggacagccgcagagtgacatgccctgagatcagcaccatgcaccggaacttcgattcttggggccagggcacactggtcacagtgtcatctggtaccggcggaggcggatctggcggcggaggtagcggtggcggaggatctgaattccagatcgtgctgacacagagccctgccatcatgtccgcttctcccggcgagaaagtgaccatgacatgtagcgccagcagcagcgtgtccttcatgcactggtatcagcagaagtccggcacaagccccaagcggtggatctacgataccagcacactggcctctggcgtgccagccagatttggcggatctggcagcggcacatcttacagcctgaccatcagcagcatggaagccgaagatgccgccacctactactgccagcagtggtccagcaatcccctgacatttggagccggcaccaagctggaactgaagagactcgaggacctgaagaacgtgttcccacctgaggtggccgtgttcgagcctagcgaggccgagatcagccacacccagaaagccaccctcgtgtgcctggctaccggcttctaccccgaccatgtggaactgtcttggtgggtcaacggcaaagaggtgcacagcggcgtgtgtaccgacccccagccactgaaagaacagcccgccctgaacgacagccggtactgcctgagcagcagactgagagtgtccgccaccttctggcagaacccccggaaccacttcagatgccaggtgcagttctacggcctgagcgagaacgacgagtggacccaggacagagccaagcccgtgacccagatcgtgtctgccgaagcctggggcagagccgattgcgacgtgaagctggtggaaaagagcttcgagacagacaccaacctgaacttccagaacctgagcgtgatcggcttcagaatcctgctgctgaaagtggccggctttaacctgctgatgaccctgcggctgtggtccagcagggccaagcgatctggatctggagcaacaaacttctcactactcaaacaagcaggtgacgtggaggagaatcccgggcctactagtatggactggatttggcgcatccttttccttgtcggcgctgctaccggcgcgcattccttcgaacaagttcagctgcaacagagcggccctgagctggttaagcctggcgcttctgtgcggatctcttgcaaggccagcggctacaccttcaccagctactacatccactgggtcaagcagcggcctggacagggactcgaatggatcggctggatctaccccggcaacctgaacaccaagtacaacgagaagttcaagggcaaagccacactgaccgccgacaagagcagcagcacagcctacatgcagctgagcagcctgacaagcgaggacagcgccgtgtacttctgcgccagatacgactggtacttcgacgtgtggggagccggaaccaccgtgacagtttcttctacgcgtatccagaaccctgatcctgccgtgtaccagctgcgggatagcaagagcagcgacaagagcgtgtgtctgttcaccgacttcgacagccagaccaacgtgtcccagagcaaggactccgacgtgtacatcaccgataagtgcgtgctggacatgcggagcatggacttcaagagcaactccgccgtggcctggtccaacaagtccgatttcgcctgcgccaacgccttcaacaacagcattatccccgaggacacattcttcccaagccccgagagcagctgcggctttaccagcgagagctaccagcagggcgtgctgagcgccaccatcctgtacgagatcctgctgggcaaggccaccctgtacgccgtgctggtgtctgccctggtgctgatggctatggtcaagcggaaggacagccggggataa

SEQ ID NO: 38955 - DNA, 2289 bp, synthetic construct
  source 1..2289: mol_type = other DNA
atggccttaccagtgaccgccttgctcctgccgctggccttgctgctccacgccgccaggccggaagtgcagctggttgaatctggcggaggactggttcagcctggcggatctctgagactgtcttgtgccgcctctggcttcgccagcgactactatatcatcggctggttcagacaggcccctggcaaagagagagagggcgtcagctgtatcagcagcagatacgccaacaccaactacgccgacagcgtgaagggcagattcaccatcagccgggacaacgccaagaacaccgtgtacctccagatgaacagcctgaagcctgaggacaccgccgtgtactactgtgccgccgacaccagaagatacacctgtcctgacattgccaccatgcaccggaacttcgattcttggggccagggcacactggtcaccgtttcttctggtaccggcggaggcggatctggcggcggaggtagcggtggcggaggatctgaattccagatcgtgctgacacagagccctgccatcatgtccgcttctcccggcgagaaagtgaccatgacatgtagcgccagcagcagcgtgtccttcatgcactggtatcagcagaagtccggcacaagccccaagcggtggatctacgataccagcacactggcctctggcgtgccagccagatttggcggatctggcagcggcacatcttacagcctgaccatcagcagcatggaagccgaagatgccgccacctactactgccagcagtggtccagcaatcccctgacatttggagccggcaccaagctggaactgaagagactcgagatccagaaccctgatcctgccgtgtaccagctgcgggatagcaagagcagcgacaagagcgtgtgtctgttcaccgacttcgacagccagaccaacgtgtcccagagcaaggactccgacgtgtacatcaccgataagtgcgtgctggacatgcggagcatggacttcaagagcaactccgccgtggcctggtccaacaagtccgatttcgcctgcgccaacgccttcaacaacagcattatccccgaggacacattcttcccaagccccgagagcagctgcggctttaccagcgagagctaccagcagggcgtgctgagcgccaccatcctgtacgagatcctgctgggcaaggccaccctgtacgccgtgctggtgtctgccctggtgctgatggctatggtcaagcggaaggacagccggggaagggccaagcgatctggatctggagcaacaaacttctcactactcaaacaagcaggtgacgtggaggagaatcccgggcctactagtatggactggatttggcgcatccttttccttgtcggcgctgctaccggcgcgcattccttcgaacaagttcagctgcaacagagcggccctgagctggttaagcctggcgcttctgtgcggatctcttgcaaggccagcggctacaccttcaccagctactacatccactgggtcaagcagcggcctggacagggactcgaatggatcggctggatctaccccggcaacctgaacaccaagtacaacgagaagttcaagggcaaagccacactgaccgccgacaagagcagcagcacagcctacatgcagctgagcagcctgacaagcgaggacagcgccgtgtacttctgcgccagatacgactggtacttcgacgtgtggggagccggaaccaccgtgacagtttcttctacgcgtgacctgaagaacgtgttcccacctgaggtggccgtgttcgagcctagcgaggccgagatcagccacacccagaaagccaccctcgtgtgcctggctaccggcttctaccccgaccatgtggaactgtcttggtgggtcaacggcaaagaggtgcacagcggcgtgtgtaccgacccccagccactgaaagaacagcccgccctgaacgacagccggtactgcctgagcagcagactgagagtgtccgccaccttctggcagaacccccggaaccacttcagatgccaggtgcagttctacggcctgagcgagaacgacgagtggacccaggacagagccaagcccgtgacccagatcgtgtctgccgaagcctggggcagagccgattgcgacgtgaagctggtggaaaagagcttcgagacagacaccaacctgaacttccagaacctgagcgtgatcggcttcagaatcctgctgctgaaagtggccggctttaacctgctgatgaccctgcggctgtggtccagc

SEQ ID NO: 38956 - DNA, 2289 bp, synthetic construct
  source 1..2289: mol_type = other DNA
atggccttaccagtgaccgccttgctcctgccgctggccttgctgctccacgccgccaggccggaagtgcagctggttgaatctggcggaggactggttcagcctggcggatctctgagactgagctgtgaagccagcggcttcgccagcgacgattacatcatcggctggttcagacaggcccctggcaaagagagagagggcgtcagctgcatcagctctaagtacgccaacaccgtgtacaccgacagcgtgaagggcagattcagactgagcagaggcaccgccaagaataccgtgtacctccagatgagcgccctgaagcctgaggataccgccgtgtactactgcgctatggacagccgcagagtgacatgccctgagatcagcaccatgcaccggaacttcgattcttggggccagggcacactggtcacagtgtcatctggtaccggcggaggcggatctggcggcggaggtagcggtggcggaggatctgaattccagatcgtgctgacacagagccctgccatcatgtccgcttctcccggcgagaaagtgaccatgacatgtagcgccagcagcagcgtgtccttcatgcactggtatcagcagaagtccggcacaagccccaagcggtggatctacgataccagcacactggcctctggcgtgccagccagatttggcggatctggcagcggcacatcttacagcctgaccatcagcagcatggaagccgaagatgccgccacctactactgccagcagtggtccagcaatcccctgacatttggagccggcaccaagctggaactgaagagactcgagatccagaaccctgatcctgccgtgtaccagctgcgggatagcaagagcagcgacaagagcgtgtgtctgttcaccgacttcgacagccagaccaacgtgtcccagagcaaggactccgacgtgtacatcaccgataagtgcgtgctggacatgcggagcatggacttcaagagcaactccgccgtggcctggtccaacaagtccgatttcgcctgcgccaacgccttcaacaacagcattatccccgaggacacattcttcccaagccccgagagcagctgcggctttaccagcgagagctaccagcagggcgtgctgagcgccaccatcctgtacgagatcctgctgggcaaggccaccctgtacgccgtgctggtgtctgccctggtgctgatggctatggtcaagcggaaggacagccggggaagggccaagcgatctggatctggagcaacaaacttctcactactcaaacaagcaggtgacgtggaggagaatcccgggcctactagtatggactggatttggcgcatccttttccttgtcggcgctgctaccggcgcgcattccttcgaacaagttcagctgcaacagagcggccctgagctggttaagcctggcgcttctgtgcggatctcttgcaaggccagcggctacaccttcaccagctactacatccactgggtcaagcagcggcctggacagggactcgaatggatcggctggatctaccccggcaacctgaacaccaagtacaacgagaagttcaagggcaaagccacactgaccgccgacaagagcagcagcacagcctacatgcagctgagcagcctgacaagcgaggacagcgccgtgtacttctgcgccagatacgactggtacttcgacgtgtggggagccggaaccaccgtgacagtttcttctacgcgtgacctgaagaacgtgttcccacctgaggtggccgtgttcgagcctagcgaggccgagatcagccacacccagaaagccaccctcgtgtgcctggctaccggcttctaccccgaccatgtggaactgtcttggtgggtcaacggcaaagaggtgcacagcggcgtgtgtaccgacccccagccactgaaagaacagcccgccctgaacgacagccggtactgcctgagcagcagactgagagtgtccgccaccttctggcagaacccccggaaccacttcagatgccaggtgcagttctacggcctgagcgagaacgacgagtggacccaggacagagccaagcccgtgacccagatcgtgtctgccgaagcctggggcagagccgattgcgacgtgaagctggtggaaaagagcttcgagacagacaccaacctgaacttccagaacctgagcgtgatcggcttcagaatcctgctgctgaaagtggccggctttaacctgctgatgaccctgcggctgtggtccagc

SEQ ID NO: 38957 - DNA, 2262 bp, synthetic construct
  source 1..2262: mol_type = other DNA
atggccttaccagtgaccgccttgctcctgccgctggccttgctgctccacgccgccaggccgcaagtcaaactggaagaaagcggtggcggcctggtgcaacctggcgaatctctgagactgagctgtagcgccagcggctccatcttcaaggtgttcagagtgttcgccatgagctggtacaggcaaggccctggcaagcagagagagctggtcgcctctatcagcagcggcgagacaaccacatacgccgaatctgtgaaaggccggttcaccatcagccgggataatgccaagaataccgcctatctccagatggactccctgaagcctgaagatacagctgtgtactactgcaacgccgaccataccttcaccggcgatttttggggccagggaacccaagtgaccgtgtctagtggtaccggcggaggcggatctggcggcggaggtagcggtggcggaggatctgaattccagatcgtgctgacacagagccctgccatcatgtccgcttctcccggcgagaaagtgaccatgacatgtagcgccagcagcagcgtgtccttcatgcactggtatcagcagaagtccggcacaagccccaagcggtggatctacgataccagcacactggcctctggcgtgccagccagatttggcggatctggcagcggcacatcttacagcctgaccatcagcagcatggaagccgaagatgccgccacctactactgccagcagtggtccagcaatcccctgacatttggagccggcaccaagctggaactgaagagactcgagatccagaaccctgatcctgccgtgtaccagctgcgggatagcaagagcagcgacaagagcgtgtgtctgttcaccgacttcgacagccagaccaacgtgtcccagagcaaggactccgacgtgtacatcaccgataagtgcgtgctggacatgcggagcatggacttcaagagcaactccgccgtggcctggtccaacaagtccgatttcgcctgcgccaacgccttcaacaacagcattatccccgaggacacattcttcccaagccccgagagcagctgcggctttaccagcgagagctaccagcagggcgtgctgagcgccaccatcctgtacgagatcctgctgggcaaggccaccctgtacgccgtgctggtgtctgccctggtgctgatggctatggtcaagcggaaggacagccggggaagggccaagcgatctggatctggagcaacaaacttctcactactcaaacaagcaggtgacgtggaggagaatcccgggcctactagtatggactggatttggcgcatccttttccttgtcggcgctgctaccggcgcgcattccttcgaacaagttcagctgcaacagagcggccctgagctggttaagcctggcgcttctgtgcggatctcttgcaaggccagcggctacaccttcaccagctactacatccactgggtcaagcagcggcctggacagggactcgaatggatcggctggatctaccccggcaacctgaacaccaagtacaacgagaagttcaagggcaaagccacactgaccgccgacaagagcagcagcacagcctacatgcagctgagcagcctgacaagcgaggacagcgccgtgtacttctgcgccagatacgactggtacttcgacgtgtggggagccggaaccaccgtgacagtttcttctacgcgtgacctgaagaacgtgttcccacctgaggtggccgtgttcgagcctagcgaggccgagatcagccacacccagaaagccaccctcgtgtgcctggctaccggcttctaccccgaccatgtggaactgtcttggtgggtcaacggcaaagaggtgcacagcggcgtgtgtaccgacccccagccactgaaagaacagcccgccctgaacgacagccggtactgcctgagcagcagactgagagtgtccgccaccttctggcagaacccccggaaccacttcagatgccaggtgcagttctacggcctgagcgagaacgacgagtggacccaggacagagccaagcccgtgacccagatcgtgtctgccgaagcctggggcagagccgattgcgacgtgaagctggtggaaaagagcttcgagacagacaccaacctgaacttccagaacctgagcgtgatcggcttcagaatcctgctgctgaaagtggccggctttaacctgctgatgaccctgcggctgtggtccagc

SEQ ID NO: 38958 - DNA, 2268 bp, synthetic construct
  source 1..2268: mol_type = other DNA
atggccttaccagtgaccgccttgctcctgccgctggccttgctgctccacgccgccaggccgcagatcgtgctgacacagagccctgccatcatgtccgcttctcccggcgagaaagtgaccatgacatgtagcgccagcagcagcgtgtccttcatgcactggtatcagcagaagtccggcacaagccccaagcggtggatctacgataccagcacactggcctctggcgtgccagccagatttggcggatctggcagcggcacatcttacagcctgaccatcagcagcatggaagccgaagatgccgccacctactactgccagcagtggtccagcaatcccctgacatttggagccggcaccaagctggaactgaagagactcgaggacctgaagaacgtgttcccacctgaggtggccgtgttcgagcctagcgaggccgagatcagccacacccagaaagccaccctcgtgtgcctggctaccggcttctaccccgaccatgtggaactgtcttggtgggtcaacggcaaagaggtgcacagcggcgtgtgtaccgacccccagccactgaaagaacagcccgccctgaacgacagccggtactgcctgagcagcagactgagagtgtccgccaccttctggcagaacccccggaaccacttcagatgccaggtgcagttctacggcctgagcgagaacgacgagtggacccaggacagagccaagcccgtgacccagatcgtgtctgccgaagcctggggcagagccgattgcgacgtgaagctggtggaaaagagcttcgagacagacaccaacctgaacttccagaacctgagcgtgatcggcttcagaatcctgctgctgaaagtggccggctttaacctgctgatgaccctgcggctgtggtccagcagggccaagcgatctggatctggagcaacaaacttctcactactcaaacaagcaggtgacgtggaggagaatcccgggcctactagtgccaccatggactggatttggcgcatccttttccttgtcggcgctgctaccggcgcccattccgggcccgaagtgcagctggttgaatctggcggaggactggttcaggctggcggatctctgagactgtcttgtgccgccagcggcagaacctttagcatgggctggtttagacaggcccctggcaaagagagagagttcgtcgccgccatcacatactctggcggcagcccttactacgccgactctgtgaagggcagattcaccatcagccgggacaacgccaagaacaccgtgtacctccagatgaacagcctgaagcctgaggacaccgccgtgtactactgcgccgccaatccaacatacggcagcgactggaacgccgagaattggggccagggaacccaagtgacagtgtctagcggatccggcggcggaggatctggcggaggcggatctgggggcggaggctctttcgaacaagttcagctgcaacagagcggccctgagctggttaagcctggcgcttctgtgcggatctcttgcaaggccagcggctacaccttcaccagctactacatccactgggtcaagcagcggcctggacagggactcgaatggatcggctggatctaccccggcaacctgaacaccaagtacaacgagaagttcaagggcaaagccacactgaccgccgacaagagcagcagcacagcctacatgcagctgagcagcctgacaagcgaggacagcgccgtgtacttctgcgccagatacgactggtacttcgacgtgtggggagccggaaccaccgtgacagtttcttctacgcgtatccagaaccctgatcctgccgtgtaccagctgcgggatagcaagagcagcgacaagagcgtgtgtctgttcaccgacttcgacagccagaccaacgtgtcccagagcaaggactccgacgtgtacatcaccgataagtgcgtgctggacatgcggagcatggacttcaagagcaactccgccgtggcctggtccaacaagtccgatttcgcctgcgccaacgccttcaacaacagcattatccccgaggacacattcttcccaagccccgagagcagctgcggctttaccagcgagagctaccagcagggcgtgctgagcgccaccatcctgtacgagatcctgctgggcaaggccaccctgtacgccgtgctggtgtctgccctggtgctgatggctatggtcaagcggaaggacagccggggataa

SEQ ID NO: 38959 - DNA, 2271 bp, synthetic construct
  source 1..2271: mol_type = other DNA
atggccttaccagtgaccgccttgctcctgccgctggccttgctgctccacgccgccaggccgcagatcgtgctgacacagagccctgccatcatgtccgcttctcccggcgagaaagtgaccatgacatgtagcgccagcagcagcgtgtccttcatgcactggtatcagcagaagtccggcacaagccccaagcggtggatctacgataccagcacactggcctctggcgtgccagccagatttggcggatctggcagcggcacatcttacagcctgaccatcagcagcatggaagccgaagatgccgccacctactactgccagcagtggtccagcaatcccctgacatttggagccggcaccaagctggaactgaagagactcgaggacctgaagaacgtgttcccacctgaggtggccgtgttcgagcctagcgaggccgagatcagccacacccagaaagccaccctcgtgtgcctggctaccggcttctaccccgaccatgtggaactgtcttggtgggtcaacggcaaagaggtgcacagcggcgtgtgtaccgacccccagccactgaaagaacagcccgccctgaacgacagccggtactgcctgagcagcagactgagagtgtccgccaccttctggcagaacccccggaaccacttcagatgccaggtgcagttctacggcctgagcgagaacgacgagtggacccaggacagagccaagcccgtgacccagatcgtgtctgccgaagcctggggcagagccgattgcgacgtgaagctggtggaaaagagcttcgagacagacaccaacctgaacttccagaacctgagcgtgatcggcttcagaatcctgctgctgaaagtggccggctttaacctgctgatgaccctgcggctgtggtccagcagggccaagcgatctggatctggagcaacaaacttctcactactcaaacaagcaggtgacgtggaggagaatcccgggcctactagtgccaccatggactggatttggcgcatccttttccttgtcggcgctgctaccggcgcccattccgggcccgaagtgcaactggtggaatctgggggcggactggtgcagccaggcggaagtctgaggctgtcttgtgccgcctccggcagcatcttcggcttcaacgacatggcctggtatcggcaggctcccggaaaacagcgcgagctggtggctctgattagcagagtgggcgtgaccagcagcgccgactctgtgaagggcagattcacaatctccagagtgaacgccaaggatacagtgtacctccagatgaactctctgaaacctgaggatacagcagtgtactattgctacatggaccagcggctggacggcagcacactggcctactggggacagggaactcaagtgacagtgtctagcggatccggcggcggaggatctggcggaggcggatctgggggcggaggctctttcgaacaagttcagctgcaacagagcggccctgagctggttaagcctggcgcttctgtgcggatctcttgcaaggccagcggctacaccttcaccagctactacatccactgggtcaagcagcggcctggacagggactcgaatggatcggctggatctaccccggcaacctgaacaccaagtacaacgagaagttcaagggcaaagccacactgaccgccgacaagagcagcagcacagcctacatgcagctgagcagcctgacaagcgaggacagcgccgtgtacttctgcgccagatacgactggtacttcgacgtgtggggagccggaaccaccgtgacagtttcttctacgcgtatccagaaccctgatcctgccgtgtaccagctgcgggatagcaagagcagcgacaagagcgtgtgtctgttcaccgacttcgacagccagaccaacgtgtcccagagcaaggactccgacgtgtacatcaccgataagtgcgtgctggacatgcggagcatggacttcaagagcaactccgccgtggcctggtccaacaagtccgatttcgcctgcgccaacgccttcaacaacagcattatccccgaggacacattcttcccaagccccgagagcagctgcggctttaccagcgagagctaccagcagggcgtgctgagcgccaccatcctgtacgagatcctgctgggcaaggccaccctgtacgccgtgctggtgtctgccctggtgctgatggctatggtcaagcggaaggacagccggggataa

SEQ ID NO: 38960 - DNA, 2259 bp, synthetic construct
  source 1..2259: mol_type = other DNA
atggccttaccagtgaccgccttgctcctgccgctggccttgctgctccacgccgccaggccgcagatcgtgctgacacagagccctgccatcatgtccgcttctcccggcgagaaagtgaccatgacatgtagcgccagcagcagcgtgtccttcatgcactggtatcagcagaagtccggcacaagccccaagcggtggatctacgataccagcacactggcctctggcgtgccagccagatttggcggatctggcagcggcacatcttacagcctgaccatcagcagcatggaagccgaagatgccgccacctactactgccagcagtggtccagcaatcccctgacatttggagccggcaccaagctggaactgaagagactcgaggacctgaagaacgtgttcccacctgaggtggccgtgttcgagcctagcgaggccgagatcagccacacccagaaagccaccctcgtgtgcctggctaccggcttctaccccgaccatgtggaactgtcttggtgggtcaacggcaaagaggtgcacagcggcgtgtgtaccgacccccagccactgaaagaacagcccgccctgaacgacagccggtactgcctgagcagcagactgagagtgtccgccaccttctggcagaacccccggaaccacttcagatgccaggtgcagttctacggcctgagcgagaacgacgagtggacccaggacagagccaagcccgtgacccagatcgtgtctgccgaagcctggggcagagccgattgcgacgtgaagctggtggaaaagagcttcgagacagacaccaacctgaacttccagaacctgagcgtgatcggcttcagaatcctgctgctgaaagtggccggctttaacctgctgatgaccctgcggctgtggtccagcagggccaagcgatctggatctggagcaacaaacttctcactactcaaacaagcaggtgacgtggaggagaatcccgggcctactagtgccaccatggactggatttggcgcatccttttccttgtcggcgctgctaccggcgcccattccgggcccgaggtgcagctggttgaatctggcggaggactggttcaggctggcggatctctgagactgtcttgtgccgccagcggctctgtgttcagcggcaatgtgatgggctggtacagacaggcccctggcaaagaaagagagtgggttgccgccattgccagcggcggcagcatctactacagagactctgtgaagggcagattcaccatcagccgggacaacgccaagaacaccgtgtacctccagatgaacagcctgaagcctgaggacaccgccgtgtactactgcaactctcaccctcctacactgccctattggggcctgggaacccaagtgacagtgtcctctggatccggcggcggaggatctggcggaggcggatctgggggcggaggctctttcgaacaagttcagctgcaacagagcggccctgagctggttaagcctggcgcttctgtgcggatctcttgcaaggccagcggctacaccttcaccagctactacatccactgggtcaagcagcggcctggacagggactcgaatggatcggctggatctaccccggcaacctgaacaccaagtacaacgagaagttcaagggcaaagccacactgaccgccgacaagagcagcagcacagcctacatgcagctgagcagcctgacaagcgaggacagcgccgtgtacttctgcgccagatacgactggtacttcgacgtgtggggagccggaaccaccgtgacagtttcttctacgcgtatccagaaccctgatcctgccgtgtaccagctgcgggatagcaagagcagcgacaagagcgtgtgtctgttcaccgacttcgacagccagaccaacgtgtcccagagcaaggactccgacgtgtacatcaccgataagtgcgtgctggacatgcggagcatggacttcaagagcaactccgccgtggcctggtccaacaagtccgatttcgcctgcgccaacgccttcaacaacagcattatccccgaggacacattcttcccaagccccgagagcagctgcggctttaccagcgagagctaccagcagggcgtgctgagcgccaccatcctgtacgagatcctgctgggcaaggccaccctgtacgccgtgctggtgtctgccctggtgctgatggctatggtcaagcggaaggacagccggggataa

SEQ ID NO: 38961 - DNA, 2253 bp, synthetic construct
  source 1..2253: mol_type = other DNA
atggccttaccagtgaccgccttgctcctgccgctggccttgctgctccacgccgccaggccgcagatcgtgctgacacagagccctgccatcatgtccgcttctcccggcgagaaagtgaccatgacatgtagcgccagcagcagcgtgtccttcatgcactggtatcagcagaagtccggcacaagccccaagcggtggatctacgataccagcacactggcctctggcgtgccagccagatttggcggatctggcagcggcacatcttacagcctgaccatcagcagcatggaagccgaagatgccgccacctactactgccagcagtggtccagcaatcccctgacatttggagccggcaccaagctggaactgaagagactcgaggacctgaagaacgtgttcccacctgaggtggccgtgttcgagcctagcgaggccgagatcagccacacccagaaagccaccctcgtgtgcctggctaccggcttctaccccgaccatgtggaactgtcttggtgggtcaacggcaaagaggtgcacagcggcgtgtgtaccgacccccagccactgaaagaacagcccgccctgaacgacagccggtactgcctgagcagcagactgagagtgtccgccaccttctggcagaacccccggaaccacttcagatgccaggtgcagttctacggcctgagcgagaacgacgagtggacccaggacagagccaagcccgtgacccagatcgtgtctgccgaagcctggggcagagccgattgcgacgtgaagctggtggaaaagagcttcgagacagacaccaacctgaacttccagaacctgagcgtgatcggcttcagaatcctgctgctgaaagtggccggctttaacctgctgatgaccctgcggctgtggtccagcagggccaagcgatctggatctggagcaacaaacttctcactactcaaacaagcaggtgacgtggaggagaatcccgggcctactagtgccaccatggactggatttggcgcatccttttccttgtcggcgctgctaccggcgcccattccgggcccgaagttcagctgctggaatctggcggaggactcgttcaacctggcggctctctgagactgagctgtgccgcttctggcttcagcttctctagctacgccctgagctgggttcgacaagctcccggaaagggccttgaatgggtgtccagcatcggcgagaatgacggcaccacagactatgccgatgccgtgaaaggccggtttaccatcagcagagacaattccaagaacacgctctatctgcaaatgaactccctgcgcgtggaagatacagccgtgtattattgcgtgaaggacggcatccactggggacagggaaccctggttacagtgtctagcggatccggcggcggaggatctggcggaggcggatctgggggcggaggctctttcgaacaagttcagctgcaacagagcggccctgagctggttaagcctggcgcttctgtgcggatctcttgcaaggccagcggctacaccttcaccagctactacatccactgggtcaagcagcggcctggacagggactcgaatggatcggctggatctaccccggcaacctgaacaccaagtacaacgagaagttcaagggcaaagccacactgaccgccgacaagagcagcagcacagcctacatgcagctgagcagcctgacaagcgaggacagcgccgtgtacttctgcgccagatacgactggtacttcgacgtgtggggagccggaaccaccgtgacagtttcttctacgcgtatccagaaccctgatcctgccgtgtaccagctgcgggatagcaagagcagcgacaagagcgtgtgtctgttcaccgacttcgacagccagaccaacgtgtcccagagcaaggactccgacgtgtacatcaccgataagtgcgtgctggacatgcggagcatggacttcaagagcaactccgccgtggcctggtccaacaagtccgatttcgcctgcgccaacgccttcaacaacagcattatccccgaggacacattcttcccaagccccgagagcagctgcggctttaccagcgagagctaccagcagggcgtgctgagcgccaccatcctgtacgagatcctgctgggcaaggccaccctgtacgccgtgctggtgtctgccctggtgctgatggctatggtcaagcggaaggacagccggggataa

SEQ ID NO: 38962 - DNA, 3360 bp, synthetic construct
  source 1..3360: mol_type = other DNA
atgggacccagactgctgttttgggctctgctgtgtctgctcggcacaggacctgttgaagctggcgtgacacagagccccacacacctgattaagaccagaggccagcaggccacactgagatgcagccctatcagcggccacaccagcgtgtactggtatcagcaggctctcggactgggcctccagttcctgctttggtacgacgagggcgaagagagaaaccggggcaacttccctcctcggttttccggcagacagttccccaactacagcagcgagctgaacgtgaacgccctggaactggaagatagcgccctgtacctgtgtgcctcttctcttggtggacctcgcggactggctggactgagaggggatgagcagtttttcggccctggcaccagactgaccgtgctggaaggtaccggcggaggcggatctggcggcggagaattccagatcgtgctgacacagagccctgccatcatgtccgcttctcccggcgagaaagtgaccatgacatgtagcgccagcagcagcgtgtccttcatgcactggtatcagcagaagtccggcacaagccccaagcggtggatctacgataccagcacactggcctctggcgtgccagccagatttggcggatctggcagcggcacatcttacagcctgaccatcagcagcatggaagccgaagatgccgccacctactactgccagcagtggtccagcaatcccctgacatttggagccggcaccaagctggaactgaagagactcgaggacctgaagaacgtgttcccacctgaggtggccgtgttcgagcctagcgaggccgagatcagccacacccagaaagccaccctcgtgtgcctggctaccggcttctaccccgaccatgtggaactgtcttggtgggtcaacggcaaagaggtgcacagcggcgtgtgtaccgacccccagccactgaaagaacagcccgccctgaacgacagccggtactgcctgagcagcagactgagagtgtccgccaccttctggcagaacccccggaaccacttcagatgccaggtgcagttctacggcctgagcgagaacgacgagtggacccaggacagagccaagcccgtgacccagatcgtgtctgccgaagcctggggcagagccgattgcgacgtgaagctggtggaaaagagcttcgagacagacaccaacctgaacttccagaacctgagcgtgatcggcttcagaatcctgctgctgaaagtggccggctttaacctgctgatgaccctgcggctgtggtccagcagggccaagcgatctggatctggagcaacaaacttctcactactcaaacaagcaggtgacgtggaggagaatcccgggcctactagtgccaccatggactggatttggcgcatccttttccttgtcggcgctgctaccggcgcccattccgggcccgaagtgcagctggttgaatctggcggaggactggttcaggctggcggatctctgagactgtcttgtgccgccagcggcagaacctttagcatgggctggtttagacaggcccctggcaaagagagagagttcgtcgccgccatcacatactctggcggcagcccttactacgccgactctgtgaagggcagattcaccatcagccgggacaacgccaagaacaccgtgtacctccagatgaacagcctgaagcctgaggacaccgccgtgtactactgcgccgccaatccaacatacggcagcgactggaacgccgagaattggggccagggaacccaagtgacagtgtctagcggatccggcggcggaggatctggcggaggcggatctgggggcggaggctctttcgaacaagttcagctgcaacagagcggccctgagctggttaagcctggcgcttctgtgcggatctcttgcaaggccagcggctacaccttcaccagctactacatccactgggtcaagcagcggcctggacagggactcgaatggatcggctggatctaccccggcaacctgaacaccaagtacaacgagaagttcaagggcaaagccacactgaccgccgacaagagcagcagcacagcctacatgcagctgagcagcctgacaagcgaggacagcgccgtgtacttctgcgccagatacgactggtacttcgacgtgtggggagccggaaccaccgtgacagtttcttctacgcgtatccagaaccctgatcctgccgtgtaccagctgcgggatagcaagagcagcgacaagagcgtgtgtctgttcaccgacttcgacagccagaccaacgtgtcccagagcaaggactccgacgtgtacatcaccgataagtgcgtgctggacatgcggagcatggacttcaagagcaactccgccgtggcctggtccaacaagtccgatttcgcctgcgccaacgccttcaacaacagcattatccccgaggacacattcttcccaagccccgagagcagctgcggctttaccagcgagagctaccagcagggcgtgctgagcgccaccatcctgtacgagatcctgctgggcaaggccaccctgtacgccgtgctggtgtctgccctggtgctgatggctatggtcaagcggaaggacagccggggacgcgccaagagaagcggatctggcgtgaagcagaccctgaatttcgacctgctgaagctggctggcgacgtggaatccaacccaggcccttctagaggccatatgaccgagtacaagcccacggtgcgcctcgccacccgcgacgacgtccccagggccgtacgcaccctcgccgccgcgttcgccgactaccccgccacgcgccacaccgtcgatccggaccgccacatcgagcgggtcaccgagctgcaagaactcttcctcacgcgcgtcgggctcgacatcggcaaggtgtgggtcgcggacgacggcgccgcggtggcggtctggaccacgccggagagcgtcgaagcgggggcggtgttcgccgagatcggcccgcgcatggccgagttgagcggttcccggctggccgcgcagcaacagatggaaggcctcctggcgccgcaccggcccaaggagcccgcgtggttcctggccaccgtcggcgtctcgcccgaccaccagggcaagggtctgggcagcgccgtcgtgctccccggagtggaggcggccgagcgcgccggggtgcccgccttcctggagacctccgcgccccgcaacctccccttctacgagcggctcggcttcaccgtcaccgccgacgtcgaggtgcccgaaggaccgcgcacctggtgcatgacccgcaagcccggtgcctga

SEQ ID NO: 38963 - DNA, 3357 bp, synthetic construct
  source 1..3357: mol_type = other DNA
atgggacccagactgctgttttgggctctgctgtgtctgctcggcacaggacctgttgaagctggcgtgacacagagccccacacacctgattaagaccagaggccagcaggccacactgagatgcagccctatcagcggccacaccagcgtgtactggtatcagcaggctctcggactgggcctccagttcctgctttggtacgacgagggcgaagagagaaaccggggcaacttccctcctcggttttccggcagacagttccccaactacagcagcgagctgaacgtgaacgccctggaactggaagatagcgccctgtacctgtgtgccagctctctcggcggagatgaactgggagccgatggcaacgagcagttctttggccctggcaccagactgaccgtgctggaaggtaccggcggaggcggatctggcggcggaagcgaattccagatcgtgctgacacagagccctgccatcatgtccgcttctcccggcgagaaagtgaccatgacatgtagcgccagcagcagcgtgtccttcatgcactggtatcagcagaagtccggcacaagccccaagcggtggatctacgataccagcacactggcctctggcgtgccagccagatttggcggatctggcagcggcacatcttacagcctgaccatcagcagcatggaagccgaagatgccgccacctactactgccagcagtggtccagcaatcccctgacatttggagccggcaccaagctggaactgaagagactcgaggacctgaagaacgtgttcccacctgaggtggccgtgttcgagcctagcgaggccgagatcagccacacccagaaagccaccctcgtgtgcctggctaccggcttctaccccgaccatgtggaactgtcttggtgggtcaacggcaaagaggtgcacagcggcgtgtgtaccgacccccagccactgaaagaacagcccgccctgaacgacagccggtactgcctgagcagcagactgagagtgtccgccaccttctggcagaacccccggaaccacttcagatgccaggtgcagttctacggcctgagcgagaacgacgagtggacccaggacagagccaagcccgtgacccagatcgtgtctgccgaagcctggggcagagccgattgcgacgtgaagctggtggaaaagagcttcgagacagacaccaacctgaacttccagaacctgagcgtgatcggcttcagaatcctgctgctgaaagtggccggctttaacctgctgatgaccctgcggctgtggtccagcagggccaagcgatctggatctggagcaacaaacttctcactactcaaacaagcaggtgacgtggaggagaatcccgggcctactagtgccaccatggactggatttggcgcatccttttccttgtcggcgctgctaccggcgcccattccgggcccgaagtgcagctggttgaatctggcggaggactggttcaggctggcggatctctgagactgtcttgtgccgccagcggcagaacctttagcatgggctggtttagacaggcccctggcaaagagagagagttcgtcgccgccatcacatactctggcggcagcccttactacgccgactctgtgaagggcagattcaccatcagccgggacaacgccaagaacaccgtgtacctccagatgaacagcctgaagcctgaggacaccgccgtgtactactgcgccgccaatccaacatacggcagcgactggaacgccgagaattggggccagggaacccaagtgacagtgtctagcggatccggcggcggaggatctggcggaggcggatctgggggcggaggctctttcgaacaagttcagctgcaacagagcggccctgagctggttaagcctggcgcttctgtgcggatctcttgcaaggccagcggctacaccttcaccagctactacatccactgggtcaagcagcggcctggacagggactcgaatggatcggctggatctaccccggcaacctgaacaccaagtacaacgagaagttcaagggcaaagccacactgaccgccgacaagagcagcagcacagcctacatgcagctgagcagcctgacaagcgaggacagcgccgtgtacttctgcgccagatacgactggtacttcgacgtgtggggagccggaaccaccgtgacagtttcttctacgcgtatccagaaccctgatcctgccgtgtaccagctgcgggatagcaagagcagcgacaagagcgtgtgtctgttcaccgacttcgacagccagaccaacgtgtcccagagcaaggactccgacgtgtacatcaccgataagtgcgtgctggacatgcggagcatggacttcaagagcaactccgccgtggcctggtccaacaagtccgatttcgcctgcgccaacgccttcaacaacagcattatccccgaggacacattcttcccaagccccgagagcagctgcggctttaccagcgagagctaccagcagggcgtgctgagcgccaccatcctgtacgagatcctgctgggcaaggccaccctgtacgccgtgctggtgtctgccctggtgctgatggctatggtcaagcggaaggacagccggggacgcgccaagagaagcggatctggcgtgaagcagaccctgaatttcgacctgctgaagctggctggcgacgtggaatccaacccaggcccttctagaggccatatgaccgagtacaagcccacggtgcgcctcgccacccgcgacgacgtccccagggccgtacgcaccctcgccgccgcgttcgccgactaccccgccacgcgccacaccgtcgatccggaccgccacatcgagcgggtcaccgagctgcaagaactcttcctcacgcgcgtcgggctcgacatcggcaaggtgtgggtcgcggacgacggcgccgcggtggcggtctggaccacgccggagagcgtcgaagcgggggcggtgttcgccgagatcggcccgcgcatggccgagttgagcggttcccggctggccgcgcagcaacagatggaaggcctcctggcgccgcaccggcccaaggagcccgcgtggttcctggccaccgtcggcgtctcgcccgaccaccagggcaagggtctgggcagcgccgtcgtgctccccggagtggaggcggccgagcgcgccggggtgcccgccttcctggagacctccgcgccccgcaacctccccttctacgagcggctcggcttcaccgtcaccgccgacgtcgaggtgcccgaaggaccgcgcacctggtgcatgacccgcaagcccggtgcctga

SEQ ID NO: 38964 - DNA, 2832 bp, synthetic construct
  source 1..2832: mol_type = other DNA
atggccttaccagtgaccgccttgctcctgccgctggccttgctgctccacgccgccaggccgcagatcgtgctgacacagagccctgccatcatgtccgcttctcccggcgagaaagtgaccatgacatgtagcgccagcagcagcgtgtccttcatgcactggtatcagcagaagtccggcacaagccccaagcggtggatctacgataccagcacactggcctctggcgtgccagccagatttggcggatctggcagcggcacatcttacagcctgaccatcagcagcatggaagccgaagatgccgccacctactactgccagcagtggtccagcaatcccctgacatttggagccggcaccaagctggaactgaagagactcgaggacctgaagaacgtgttcccacctgaggtggccgtgttcgagcctagcgaggccgagatcagccacacccagaaagccaccctcgtgtgcctggctaccggcttctaccccgaccatgtggaactgtcttggtgggtcaacggcaaagaggtgcacagcggcgtgtgtaccgacccccagccactgaaagaacagcccgccctgaacgacagccggtactgcctgagcagcagactgagagtgtccgccaccttctggcagaacccccggaaccacttcagatgccaggtgcagttctacggcctgagcgagaacgacgagtggacccaggacagagccaagcccgtgacccagatcgtgtctgccgaagcctggggcagagccgattgcgacgtgaagctggtggaaaagagcttcgagacagacaccaacctgaacttccagaacctgagcgtgatcggcttcagaatcctgctgctgaaagtggccggctttaacctgctgatgaccctgcggctgtggtccagcagggccaagcgatctggatctggagcaacaaacttctcactactcaaacaagcaggtgacgtggaggagaatcccgggcctactagtgccaccatggactggatttggcgcatccttttccttgtcggcgctgctaccggcgcccattccgggcccatgggaagctggcttgagttctaccacagactcaacgccattgacagcaggctgtgggcacttggcggaagcgaagctgaactcgccgcttttgaaaaagaaattgccgctttcgagtccgagcttcaggcttacaaaggcaaagggaatcctgaggtcgagagcctgagagatcacgctgcccacattagagagtggttgcaggcataccggcacaatggatccggcggcggaggatctggcggaggcggatctgggggcggaggctctttcgaacaagttcagctgcaacagagcggccctgagctggttaagcctggcgcttctgtgcggatctcttgcaaggccagcggctacaccttcaccagctactacatccactgggtcaagcagcggcctggacagggactcgaatggatcggctggatctaccccggcaacctgaacaccaagtacaacgagaagttcaagggcaaagccacactgaccgccgacaagagcagcagcacagcctacatgcagctgagcagcctgacaagcgaggacagcgccgtgtacttctgcgccagatacgactggtacttcgacgtgtggggagccggaaccaccgtgacagtttcttctacgcgtatccagaaccctgatcctgccgtgtaccagctgcgggatagcaagagcagcgacaagagcgtgtgtctgttcaccgacttcgacagccagaccaacgtgtcccagagcaaggactccgacgtgtacatcaccgataagtgcgtgctggacatgcggagcatggacttcaagagcaactccgccgtggcctggtccaacaagtccgatttcgcctgcgccaacgccttcaacaacagcattatccccgaggacacattcttcccaagccccgagagcagctgcggctttaccagcgagagctaccagcagggcgtgctgagcgccaccatcctgtacgagatcctgctgggcaaggccaccctgtacgccgtgctggtgtctgccctggtgctgatggctatggtcaagcggaaggacagccggggacgcgccaagagaagcggatctggcgtgaagcagaccctgaatttcgacctgctgaagctggctggcgacgtggaatccaacccaggcccttctagaggccatatgaccgagtacaagcccacggtgcgcctcgccacccgcgacgacgtccccagggccgtacgcaccctcgccgccgcgttcgccgactaccccgccacgcgccacaccgtcgatccggaccgccacatcgagcgggtcaccgagctgcaagaactcttcctcacgcgcgtcgggctcgacatcggcaaggtgtgggtcgcggacgacggcgccgcggtggcggtctggaccacgccggagagcgtcgaagcgggggcggtgttcgccgagatcggcccgcgcatggccgagttgagcggttcccggctggccgcgcagcaacagatggaaggcctcctggcgccgcaccggcccaaggagcccgcgtggttcctggccaccgtcggcgtctcgcccgaccaccagggcaagggtctgggcagcgccgtcgtgctccccggagtggaggcggccgagcgcgccggggtgcccgccttcctggagacctccgcgccccgcaacctccccttctacgagcggctcggcttcaccgtcaccgccgacgtcgaggtgcccgaaggaccgcgcacctggtgcatgacccgcaagcccggtgcctga

SEQ ID NO: 38965 - DNA, 2832 bp, synthetic construct
  source 1..2832: mol_type = other DNA
atggccttaccagtgaccgccttgctcctgccgctggccttgctgctccacgccgccaggccggcatgcatgggcagttggttcgagttctacgaccggctgaatgccatcgacgccagactgtgggctctcggaggatctgaagctgagctggccgccttcgagaaagagatcgccgcctttgagagcgagctgcaagcctacaaaggcaagggcaaccccgaggtggaaaacctgagagtgcacgccgctgccatcagagaatggctccaggcttacagacacaacggtaccggcggaggcggatctggcggcggaggtagcggtggcggaggatctgaattccagatcgtgctgacacagagccctgccatcatgtccgcttctcccggcgagaaagtgaccatgacatgtagcgccagcagcagcgtgtccttcatgcactggtatcagcagaagtccggcacaagccccaagcggtggatctacgataccagcacactggcctctggcgtgccagccagatttggcggatctggcagcggcacatcttacagcctgaccatcagcagcatggaagccgaagatgccgccacctactactgccagcagtggtccagcaatcccctgacatttggagccggcaccaagctggaactgaagagactcgaggacctgaagaacgtgttcccacctgaggtggccgtgttcgagcctagcgaggccgagatcagccacacccagaaagccaccctcgtgtgcctggctaccggcttctaccccgaccatgtggaactgtcttggtgggtcaacggcaaagaggtgcacagcggcgtgtgtaccgacccccagccactgaaagaacagcccgccctgaacgacagccggtactgcctgagcagcagactgagagtgtccgccaccttctggcagaacccccggaaccacttcagatgccaggtgcagttctacggcctgagcgagaacgacgagtggacccaggacagagccaagcccgtgacccagatcgtgtctgccgaagcctggggcagagccgattgcgacgtgaagctggtggaaaagagcttcgagacagacaccaacctgaacttccagaacctgagcgtgatcggcttcagaatcctgctgctgaaagtggccggctttaacctgctgatgaccctgcggctgtggtccagcagggccaagcgatctggatctggagcaacaaacttctcactactcaaacaagcaggtgacgtggaggagaatcccgggcctactagtatggactggatttggcgcatccttttccttgtcggcgctgctaccggcgcgcattccttcgaacaagttcagctgcaacagagcggccctgagctggttaagcctggcgcttctgtgcggatctcttgcaaggccagcggctacaccttcaccagctactacatccactgggtcaagcagcggcctggacagggactcgaatggatcggctggatctaccccggcaacctgaacaccaagtacaacgagaagttcaagggcaaagccacactgaccgccgacaagagcagcagcacagcctacatgcagctgagcagcctgacaagcgaggacagcgccgtgtacttctgcgccagatacgactggtacttcgacgtgtggggagccggaaccaccgtgacagtttcttctacgcgtatccagaaccctgatcctgccgtgtaccagctgcgggatagcaagagcagcgacaagagcgtgtgtctgttcaccgacttcgacagccagaccaacgtgtcccagagcaaggactccgacgtgtacatcaccgataagtgcgtgctggacatgcggagcatggacttcaagagcaactccgccgtggcctggtccaacaagtccgatttcgcctgcgccaacgccttcaacaacagcattatccccgaggacacattcttcccaagccccgagagcagctgcggctttaccagcgagagctaccagcagggcgtgctgagcgccaccatcctgtacgagatcctgctgggcaaggccaccctgtacgccgtgctggtgtctgccctggtgctgatggctatggtcaagcggaaggacagccggggacgcgccaagagaagcggatctggcgtgaagcagaccctgaatttcgacctgctgaagctggctggcgacgtggaatccaacccaggcccttctagaggccatatgaccgagtacaagcccacggtgcgcctcgccacccgcgacgacgtccccagggccgtacgcaccctcgccgccgcgttcgccgactaccccgccacgcgccacaccgtcgatccggaccgccacatcgagcgggtcaccgagctgcaagaactcttcctcacgcgcgtcgggctcgacatcggcaaggtgtgggtcgcggacgacggcgccgcggtggcggtctggaccacgccggagagcgtcgaagcgggggcggtgttcgccgagatcggcccgcgcatggccgagttgagcggttcccggctggccgcgcagcaacagatggaaggcctcctggcgccgcaccggcccaaggagcccgcgtggttcctggccaccgtcggcgtctcgcccgaccaccagggcaagggtctgggcagcgccgtcgtgctccccggagtggaggcggccgagcgcgccggggtgcccgccttcctggagacctccgcgccccgcaacctccccttctacgagcggctcggcttcaccgtcaccgccgacgtcgaggtgcccgaaggaccgcgcacctggtgcatgacccgcaagcccggtgcctga

SEQ ID NO: 38966 - DNA, 3183 bp, synthetic construct
  source 1..3183: mol_type = other DNA
atggccttaccagtgaccgccttgctcctgccgctggccttgctgctccacgccgccaggccggcatgcatggaccccgacctggaaatcagagccgccttcctgcggcagagaaacacagccctgagaacagaggtggccgagctggaacaagaggtgcagcggctggaaaacgaggtgtcccagtacgagacaagatacggccctctcggaggcggaaaaggtaccggcggaggcggatctggcggcggaggtagcggtggcggaggatctgaattccagatcgtgctgacacagagccctgccatcatgtccgcttctcccggcgagaaagtgaccatgacatgtagcgccagcagcagcgtgtccttcatgcactggtatcagcagaagtccggcacaagccccaagcggtggatctacgataccagcacactggcctctggcgtgccagccagatttggcggatctggcagcggcacatcttacagcctgaccatcagcagcatggaagccgaagatgccgccacctactactgccagcagtggtccagcaatcccctgacatttggagccggcaccaagctggaactgaagagactcgaggacctgaagaacgtgttcccacctgaggtggccgtgttcgagcctagcgaggccgagatcagccacacccagaaagccaccctcgtgtgcctggctaccggcttctaccccgaccatgtggaactgtcttggtgggtcaacggcaaagaggtgcacagcggcgtgtgtaccgacccccagccactgaaagaacagcccgccctgaacgacagccggtactgcctgagcagcagactgagagtgtccgccaccttctggcagaacccccggaaccacttcagatgccaggtgcagttctacggcctgagcgagaacgacgagtggacccaggacagagccaagcccgtgacccagatcgtgtctgccgaagcctggggcagagccgattgcgacgtgaagctggtggaaaagagcttcgagacagacaccaacctgaacttccagaacctgagcgtgatcggcttcagaatcctgctgctgaaagtggccggctttaacctgctgatgaccctgcggctgtggtccagcagggccaagcgatctggatctggagcaacaaacttctcactactcaaacaagcaggtgacgtggaggagaatcccgggcctactagtgccaccatggactggatttggcgcatccttttccttgtcggcgctgctaccggcgcccattccgggcccgaagtgcagctggttgaatctggcggaggactggttcaggctggcggatctctgagactgtcttgtgccgccagcggcagaacctttagcatgggctggtttagacaggcccctggcaaagagagagagttcgtcgccgccatcacatactctggcggcagcccttactacgccgactctgtgaagggcagattcaccatcagccgggacaacgccaagaacaccgtgtacctccagatgaacagcctgaagcctgaggacaccgccgtgtactactgcgccgccaatccaacatacggcagcgactggaacgccgagaattggggccagggaacccaagtgacagtgtctagcggatccggcggcggaggatctggcggaggcggatctgggggcggaggctctttcgaacaagttcagctgcaacagagcggccctgagctggttaagcctggcgcttctgtgcggatctcttgcaaggccagcggctacaccttcaccagctactacatccactgggtcaagcagcggcctggacagggactcgaatggatcggctggatctaccccggcaacctgaacaccaagtacaacgagaagttcaagggcaaagccacactgaccgccgacaagagcagcagcacagcctacatgcagctgagcagcctgacaagcgaggacagcgccgtgtacttctgcgccagatacgactggtacttcgacgtgtggggagccggaaccaccgtgacagtttcttctacgcgtatccagaaccctgatcctgccgtgtaccagctgcgggatagcaagagcagcgacaagagcgtgtgtctgttcaccgacttcgacagccagaccaacgtgtcccagagcaaggactccgacgtgtacatcaccgataagtgcgtgctggacatgcggagcatggacttcaagagcaactccgccgtggcctggtccaacaagtccgatttcgcctgcgccaacgccttcaacaacagcattatccccgaggacacattcttcccaagccccgagagcagctgcggctttaccagcgagagctaccagcagggcgtgctgagcgccaccatcctgtacgagatcctgctgggcaaggccaccctgtacgccgtgctggtgtctgccctggtgctgatggctatggtcaagcggaaggacagccggggacgcgccaagagaagcggatctggcgtgaagcagaccctgaatttcgacctgctgaagctggctggcgacgtggaatccaacccaggcccttctagaggccatatgaccgagtacaagcccacggtgcgcctcgccacccgcgacgacgtccccagggccgtacgcaccctcgccgccgcgttcgccgactaccccgccacgcgccacaccgtcgatccggaccgccacatcgagcgggtcaccgagctgcaagaactcttcctcacgcgcgtcgggctcgacatcggcaaggtgtgggtcgcggacgacggcgccgcggtggcggtctggaccacgccggagagcgtcgaagcgggggcggtgttcgccgagatcggcccgcgcatggccgagttgagcggttcccggctggccgcgcagcaacagatggaaggcctcctggcgccgcaccggcccaaggagcccgcgtggttcctggccaccgtcggcgtctcgcccgaccaccagggcaagggtctgggcagcgccgtcgtgctccccggagtggaggcggccgagcgcgccggggtgcccgccttcctggagacctccgcgccccgcaacctccccttctacgagcggctcggcttcaccgtcaccgccgacgtcgaggtgcccgaaggaccgcgcacctggtgcatgacccgcaagcccggtgcctga

SEQ ID NO: 38967 - DNA, 2832 bp, synthetic construct
  source 1..2832: mol_type = other DNA
atggccttaccagtgaccgccttgctcctgccgctggccttgctgctccacgccgccaggccgcagatcgtgctgacacagagccctgccatcatgtccgcttctcccggcgagaaagtgaccatgacatgtagcgccagcagcagcgtgtccttcatgcactggtatcagcagaagtccggcacaagccccaagcggtggatctacgataccagcacactggcctctggcgtgccagccagatttggcggatctggcagcggcacatcttacagcctgaccatcagcagcatggaagccgaagatgccgccacctactactgccagcagtggtccagcaatcccctgacatttggagccggcaccaagctggaactgaagagactcgaggacctgaagaacgtgttcccacctgaggtggccgtgttcgagcctagcgaggccgagatcagccacacccagaaagccaccctcgtgtgcctggctaccggcttctaccccgaccatgtggaactgtcttggtgggtcaacggcaaagaggtgcacagcggcgtgtgtaccgacccccagccactgaaagaacagcccgccctgaacgacagccggtactgcctgagcagcagactgagagtgtccgccaccttctggcagaacccccggaaccacttcagatgccaggtgcagttctacggcctgagcgagaacgacgagtggacccaggacagagccaagcccgtgacccagatcgtgtctgccgaagcctggggcagagccgattgcgacgtgaagctggtggaaaagagcttcgagacagacaccaacctgaacttccagaacctgagcgtgatcggcttcagaatcctgctgctgaaagtggccggctttaacctgctgatgaccctgcggctgtggtccagcagggccaagcgatctggatctggagcaacaaacttctcactactcaaacaagcaggtgacgtggaggagaatcccgggcctactagtgccaccatggactggatttggcgcatccttttccttgtcggcgctgctaccggcgcccattccgggcccatgggatcttggagcgagttttacgatcggctgcacgccattcaccaccggctgtatgctctcggaggaagcgaagctgagctggccgcttttgaaaaagaaattgccgctttcgagtccgagcttcaggcttacaaaggcaaagggaatcctgaggtcgaggccctgagagataccgccgccttcatcagaacccggttgcaggcataccggcacaacggatccggcggcggaggatctggcggaggcggatctgggggcggaggctctttcgaacaagttcagctgcaacagagcggccctgagctggttaagcctggcgcttctgtgcggatctcttgcaaggccagcggctacaccttcaccagctactacatccactgggtcaagcagcggcctggacagggactcgaatggatcggctggatctaccccggcaacctgaacaccaagtacaacgagaagttcaagggcaaagccacactgaccgccgacaagagcagcagcacagcctacatgcagctgagcagcctgacaagcgaggacagcgccgtgtacttctgcgccagatacgactggtacttcgacgtgtggggagccggaaccaccgtgacagtttcttctacgcgtatccagaaccctgatcctgccgtgtaccagctgcgggatagcaagagcagcgacaagagcgtgtgtctgttcaccgacttcgacagccagaccaacgtgtcccagagcaaggactccgacgtgtacatcaccgataagtgcgtgctggacatgcggagcatggacttcaagagcaactccgccgtggcctggtccaacaagtccgatttcgcctgcgccaacgccttcaacaacagcattatccccgaggacacattcttcccaagccccgagagcagctgcggctttaccagcgagagctaccagcagggcgtgctgagcgccaccatcctgtacgagatcctgctgggcaaggccaccctgtacgccgtgctggtgtctgccctggtgctgatggctatggtcaagcggaaggacagccggggacgcgccaagagaagcggatctggcgtgaagcagaccctgaatttcgacctgctgaagctggctggcgacgtggaatccaacccaggcccttctagaggccatatgaccgagtacaagcccacggtgcgcctcgccacccgcgacgacgtccccagggccgtacgcaccctcgccgccgcgttcgccgactaccccgccacgcgccacaccgtcgatccggaccgccacatcgagcgggtcaccgagctgcaagaactcttcctcacgcgcgtcgggctcgacatcggcaaggtgtgggtcgcggacgacggcgccgcggtggcggtctggaccacgccggagagcgtcgaagcgggggcggtgttcgccgagatcggcccgcgcatggccgagttgagcggttcccggctggccgcgcagcaacagatggaaggcctcctggcgccgcaccggcccaaggagcccgcgtggttcctggccaccgtcggcgtctcgcccgaccaccagggcaagggtctgggcagcgccgtcgtgctccccggagtggaggcggccgagcgcgccggggtgcccgccttcctggagacctccgcgccccgcaacctccccttctacgagcggctcggcttcaccgtcaccgccgacgtcgaggtgcccgaaggaccgcgcacctggtgcatgacccgcaagcccggtgcctga

SEQ ID NO: 38968 - DNA, 3462 bp, synthetic construct
  source 1..3462: mol_type = other DNA
atggccttaccagtgaccgccttgctcctgccgctggccttgctgctccacgccgccaggccgcagatcgtgctgacacagagccctgccatcatgtccgcttctcccggcgagaaagtgaccatgacatgtagcgccagcagcagcgtgtccttcatgcactggtatcagcagaagtccggcacaagccccaagcggtggatctacgataccagcacactggcctctggcgtgccagccagatttggcggatctggcagcggcacatcttacagcctgaccatcagcagcatggaagccgaagatgccgccacctactactgccagcagtggtccagcaatcccctgacatttggagccggcaccaagctggaactgaagagactcgaggacctgaagaacgtgttcccacctgaggtggccgtgttcgagcctagcgaggccgagatcagccacacccagaaagccaccctcgtgtgcctggctaccggcttctaccccgaccatgtggaactgtcttggtgggtcaacggcaaagaggtgcacagcggcgtgtgtaccgacccccagccactgaaagaacagcccgccctgaacgacagccggtactgcctgagcagcagactgagagtgtccgccaccttctggcagaacccccggaaccacttcagatgccaggtgcagttctacggcctgagcgagaacgacgagtggacccaggacagagccaagcccgtgacccagatcgtgtctgccgaagcctggggcagagccgattgcgacgtgaagctggtggaaaagagcttcgagacagacaccaacctgaacttccagaacctgagcgtgatcggcttcagaatcctgctgctgaaagtggccggctttaacctgctgatgaccctgcggctgtggtccagcagggccaagcgatctggatctggagcaacaaacttctcactactcaaacaagcaggtgacgtggaggagaatcccgggcctactagtaccatggactggatttggcgcatccttttccttgtcggcgctgctaccggcgcccattccctgttcaatcaagaggtgcagatccctctgaccgagagctactgtggcccctgtcctaagaactggatctgctacaagaacaactgctaccagttcttcgacgagagcaagaattggtacgagagccaggccagctgcatgagccagaatgccagcctgctgaaggtgtacagcaaagaggaccaggacctgctgaaactggtcaagagcgcccactggatgggccttgtgcacatccccaccaatggctcttggcagtgggaggacggcagcattctgagccctaacctgctgaccatcatcgagatgcagaagggcgactgcgccctgtacgccagcagctttaagggctacatcgagaattgcagcaccccgaacacctacatctgtatgcagagaaccgtttctggcggaggcggctctggaggaggcggaagtggcggcggaggcgacctctttaatcaagaagtccagattccactcaccgaatcctactgcggaccttgtccaaaaaattggatttgttataagaacaactgttatcaattctttgatgagtctaaaaattggtatgagtcccaggcttcctgcatgtctcagaacgcttctctgctgaaagtctactctaaagaagatcaggatctcctgaagctcgtcaagtctgcccattggatggggctcgtccacattcctaccaacggaagctggcaatgggaagatggctccatcctgtctccaaatctgctcacgattattgaaatgcagaaaggggattgtgctctctacgccagctccttcaagggatatattgagaactgtagcacgcccaatacttatatctgtatgcaacggaccgtgggatccggcggcggaggatctggcggaggcggatctgggggcggaggctctttcgaacaagttcagctgcaacagagcggccctgagctggttaagcctggcgcttctgtgcggatctcttgcaaggccagcggctacaccttcaccagctactacatccactgggtcaagcagcggcctggacagggactcgaatggatcggctggatctaccccggcaacctgaacaccaagtacaacgagaagttcaagggcaaagccacactgaccgccgacaagagcagcagcacagcctacatgcagctgagcagcctgacaagcgaggacagcgccgtgtacttctgcgccagatacgactggtacttcgacgtgtggggagccggaaccaccgtgacagtttcttctacgcgtatccagaaccctgatcctgccgtgtaccagctgcgggatagcaagagcagcgacaagagcgtgtgtctgttcaccgacttcgacagccagaccaacgtgtcccagagcaaggactccgacgtgtacatcaccgataagtgcgtgctggacatgcggagcatggacttcaagagcaactccgccgtggcctggtccaacaagtccgatttcgcctgcgccaacgccttcaacaacagcattatccccgaggacacattcttcccaagccccgagagcagctgcggctttaccagcgagagctaccagcagggcgtgctgagcgccaccatcctgtacgagatcctgctgggcaaggccaccctgtacgccgtgctggtgtctgccctggtgctgatggctatggtcaagcggaaggacagccggggacgcgccaagagaagcggatctggcgtgaagcagaccctgaatttcgacctgctgaagctggctggcgacgtggaatccaacccaggcccttctagaggccatatgaccgagtacaagcccacggtgcgcctcgccacccgcgacgacgtccccagggccgtacgcaccctcgccgccgcgttcgccgactaccccgccacgcgccacaccgtcgatccggaccgccacatcgagcgggtcaccgagctgcaagaactcttcctcacgcgcgtcgggctcgacatcggcaaggtgtgggtcgcggacgacggcgccgcggtggcggtctggaccacgccggagagcgtcgaagcgggggcggtgttcgccgagatcggcccgcgcatggccgagttgagcggttcccggctggccgcgcagcaacagatggaaggcctcctggcgccgcaccggcccaaggagcccgcgtggttcctggccaccgtcggcgtctcgcccgaccaccagggcaagggtctgggcagcgccgtcgtgctccccggagtggaggcggccgagcgcgccggggtgcccgccttcctggagacctccgcgccccgcaacctccccttctacgagcggctcggcttcaccgtcaccgccgacgtcgaggtgcccgaaggaccgcgcacctggtgcatgacccgcaagcccggtgcctga

SEQ ID NO: 38969 - DNA, 1848 bp, synthetic construct
  source 1..1848: mol_type = other DNA
atggccttaccagtgaccgccttgctcctgccgctggccttgctgctccacgccgccaggccgcagatcgtgctgacacagagccctgccatcatgtccgcttctcccggcgagaaagtgaccatgacatgtagcgccagcagcagcgtgtccttcatgcactggtatcagcagaagtccggcacaagccccaagcggtggatctacgataccagcacactggcctctggcgtgccagccagatttggcggatctggcagcggcacatcttacagcctgaccatcagcagcatggaagccgaagatgccgccacctactactgccagcagtggtccagcaatcccctgacatttggagccggcaccaagctggaactgaagagactcgaggacctgaagaacgtgttcccacctgaggtggccgtgttcgagcctagcgaggccgagatcagccacacccagaaagccaccctcgtgtgcctggctaccggcttctaccccgaccatgtggaactgtcttggtgggtcaacggcaaagaggtgcacagcggcgtgtgtaccgacccccagccactgaaagaacagcccgccctgaacgacagccggtactgcctgagcagcagactgagagtgtccgccaccttctggcagaacccccggaaccacttcagatgccaggtgcagttctacggcctgagcgagaacgacgagtggacccaggacagagccaagcccgtgacccagatcgtgtctgccgaagcctggggcagagccgattgcggctttaccagcgagagctaccagcagggcgtgctgagcgccaccaacctgagcgtgatcggcttcagaatcctgctgctgaaagtggccggctttaacctgctgatgaccctgcggctgtggtccagcagggccaagcgatctggatctggagcaacaaacttctcactactcaaacaagcaggtgacgtggaggagaatcccgggcctactagtatggactggatttggcgcatccttttccttgtcggcgctgctaccggcgcgcattccttcgaacaagttcagctgcaacagagcggccctgagctggttaagcctggcgcttctgtgcggatctcttgcaaggccagcggctacaccttcaccagctactacatccactgggtcaagcagcggcctggacagggactcgaatggatcggctggatctaccccggcaacctgaacaccaagtacaacgagaagttcaagggcaaagccacactgaccgccgacaagagcagcagcacagcctacatgcagctgagcagcctgacaagcgaggacagcgccgtgtacttctgcgccagatacgactggtacttcgacgtgtggggagccggaaccaccgtgacagtttcttctacgcgtatccagaaccctgatcctgccgtgtaccagctgcgggatagcaagagcagcgacaagagcgtgtgtctgttcaccgacttcgacagccagaccaacgtgtcccagagcaaggactccgacgtgtacatcaccgataagtgcgtgctggacatgcggagcatggacttcaagagcaactccgccgtggcctggtccaacaagtccgatttcgcctgcgccaacgccttcaacaacagcattatccccgaggacacattcttcccaagccccgagagcagctgcgacgtgaagctggtggaaaagagcttcgagacagacaccaacctgaacttccagatcctgtacgagatcctgctgggcaaggccaccctgtacgccgtgctggtgtctgccctggtgctgatggctatggtcaagcggaaggacagccgggga

SEQ ID NO: 38970 - DNA, 1860 bp, synthetic construct
  source 1..1860: mol_type = other DNA
atggccttaccagtgaccgccttgctcctgccgctggccttgctgctccacgccgccaggccgcagatcgtgctgacacagagccctgccatcatgtccgcttctcccggcgagaaagtgaccatgacatgtagcgccagcagcagcgtgtccttcatgcactggtatcagcagaagtccggcacaagccccaagcggtggatctacgataccagcacactggcctctggcgtgccagccagatttggcggatctggcagcggcacatcttacagcctgaccatcagcagcatggaagccgaagatgccgccacctactactgccagcagtggtccagcaatcccctgacatttggagccggcaccaagctggaactgaagagactcgagatccagaaccctgatcctgccgtgtaccagctgcgggatagcaagagcagcgacaagagcgtgtgtctgttcaccgacttcgacagccagaccaacgtgtcccagagcaaggactccgacgtgtacatcaccgataagtgcgtgctggacatgcggagcatggacttcaagagcaactccgccgtggcctggtccaacaagtccgatttcgcctgcgccaacgccttcaacaacagcattatccccgaggacacattcttcccaagccccgagagcagctgcgacgtgaagctggtggaaaagagcttcgagacagacaccaacctgaacttccagatcctgtacgagatcctgctgggcaaggccaccctgtacgccgtgctggtgtctgccctggtgctgatggctatggtcaagcggaaggacagccggggacgcgccaagagaagcggatctggcgtgaagcagaccctgaatttcgacctgctgaagctggctggcgacgtggaatccaacccaggccctactagtatggactggatttggcgcatccttttccttgtcggcgctgctaccggcgcgcattccttcgaacaagttcagctgcaacagagcggccctgagctggttaagcctggcgcttctgtgcggatctcttgcaaggccagcggctacaccttcaccagctactacatccactgggtcaagcagcggcctggacagggactcgaatggatcggctggatctaccccggcaacctgaacaccaagtacaacgagaagttcaagggcaaagccacactgaccgccgacaagagcagcagcacagcctacatgcagctgagcagcctgacaagcgaggacagcgccgtgtacttctgcgccagatacgactggtacttcgacgtgtggggagccggaaccaccgtgacagtttcttctacgcgtgaggacctgaagaacgtgttcccacctgaggtggccgtgttcgagcctagcgaggccgagatcagccacacccagaaagccaccctcgtgtgcctggctaccggcttctaccccgaccatgtggaactgtcttggtgggtcaacggcaaagaggtgcacagcggcgtgtgtaccgacccccagccactgaaagaacagcccgccctgaacgacagccggtactgcctgagcagcagactgagagtgtccgccaccttctggcagaacccccggaaccacttcagatgccaggtgcagttctacggcctgagcgagaacgacgagtggacccaggacagagccaagcccgtgacccagatcgtgtctgccgaagcctggggcagagccgattgcggctttaccagcgagagctaccagcagggcgtgctgagcgccaccaacctgagcgtgatcggcttcagaatcctgctgctgaaagtggccggctttaacctgctgatgaccctgcggctgtggtccagc

SEQ ID NO: 38971 - DNA, 2253 bp, synthetic construct
  source 1..2253: mol_type = other DNA
atggccttaccagtgaccgccttgctcctgccgctggccttgctgctccacgccgccaggccggaagtgcagctggttgaatctggcggaggactggttcagcctggcggatctctgagactgtcttgtgccgccagcggcttcagcttcagcgacttttggatgagctgggtccgacaggcccctggcaaaggacttgaatgggtcgccacaatcagccaggccggcagcgagaaggactacgtggactctgtgaagggcagattcaccatcagccgggacaacgccaagaagtccctgtacctccagatgaacagcctgagagccgaggacaccgccgtgtactattgtgcctctggcgtgtacagcttcgactacagaggccagggcaccctggtcacagtctcttctggtaccggcggaggcggatctggcggcggaggtagcggtggcggaggatctgaattccagatcgtgctgacacagagccctgccatcatgtccgcttctcccggcgagaaagtgaccatgacatgtagcgccagcagcagcgtgtccttcatgcactggtatcagcagaagtccggcacaagccccaagcggtggatctacgataccagcacactggcctctggcgtgccagccagatttggcggatctggcagcggcacatcttacagcctgaccatcagcagcatggaagccgaagatgccgccacctactactgccagcagtggtccagcaatcccctgacatttggagccggcaccaagctggaactgaagagactcgaggacctgaagaacgtgttcccacctgaggtggccgtgttcgagcctagcgaggccgagatcagccacacccagaaagccaccctcgtgtgcctggctaccggcttctaccccgaccatgtggaactgtcttggtgggtcaacggcaaagaggtgcacagcggcgtgtgtaccgacccccagccactgaaagaacagcccgccctgaacgacagccggtactgcctgagcagcagactgagagtgtccgccaccttctggcagaacccccggaaccacttcagatgccaggtgcagttctacggcctgagcgagaacgacgagtggacccaggacagagccaagcccgtgacccagatcgtgtctgccgaagcctggggcagagccgattgcggctttaccagcgagagctaccagcagggcgtgctgagcgccaccaacctgagcgtgatcggcttcagaatcctgctgctgaaagtggccggctttaacctgctgatgaccctgcggctgtggtccagcagggccaagcgatctggatctggagcaacaaacttctcactactcaaacaagcaggtgacgtggaggagaatcccgggcctactagtatggactggatttggcgcatccttttccttgtcggcgctgctaccggcgcgcattccttcgaacaagttcagctgcaacagagcggccctgagctggttaagcctggcgcttctgtgcggatctcttgcaaggccagcggctacaccttcaccagctactacatccactgggtcaagcagcggcctggacagggactcgaatggatcggctggatctaccccggcaacctgaacaccaagtacaacgagaagttcaagggcaaagccacactgaccgccgacaagagcagcagcacagcctacatgcagctgagcagcctgacaagcgaggacagcgccgtgtacttctgcgccagatacgactggtacttcgacgtgtggggagccggaaccaccgtgacagtttcttctacgcgtatccagaaccctgatcctgccgtgtaccagctgcgggatagcaagagcagcgacaagagcgtgtgtctgttcaccgacttcgacagccagaccaacgtgtcccagagcaaggactccgacgtgtacatcaccgataagtgcgtgctggacatgcggagcatggacttcaagagcaactccgccgtggcctggtccaacaagtccgatttcgcctgcgccaacgccttcaacaacagcattatccccgaggacacattcttcccaagccccgagagcagctgcgacgtgaagctggtggaaaagagcttcgagacagacaccaacctgaacttccagatcctgtacgagatcctgctgggcaaggccaccctgtacgccgtgctggtgtctgccctggtgctgatggctatggtcaagcggaaggacagccgggga

SEQ ID NO: 38972 - DNA, 2265 bp, synthetic construct
  source 1..2265: mol_type = other DNA
atggccttaccagtgaccgccttgctcctgccgctggccttgctgctccacgccgccaggccggaagtgcagctggttgaatctggcggaggactggttcagcctggcggatctctgagactgtcttgtgccgccagcggcttcagcttcagcgacttttggatgagctgggtccgacaggcccctggcaaaggacttgaatgggtcgccacaatcagccaggccggcagcgagaaggactacgtggactctgtgaagggcagattcaccatcagccgggacaacgccaagaagtccctgtacctccagatgaacagcctgagagccgaggacaccgccgtgtactattgtgcctctggcgtgtacagcttcgactacagaggccagggcaccctggtcacagtctcttctggtaccggcggaggcggatctggcggcggaggtagcggtggcggaggatctgaattccagatcgtgctgacacagagccctgccatcatgtccgcttctcccggcgagaaagtgaccatgacatgtagcgccagcagcagcgtgtccttcatgcactggtatcagcagaagtccggcacaagccccaagcggtggatctacgataccagcacactggcctctggcgtgccagccagatttggcggatctggcagcggcacatcttacagcctgaccatcagcagcatggaagccgaagatgccgccacctactactgccagcagtggtccagcaatcccctgacatttggagccggcaccaagctggaactgaagagactcgagatccagaaccctgatcctgccgtgtaccagctgcgggatagcaagagcagcgacaagagcgtgtgtctgttcaccgacttcgacagccagaccaacgtgtcccagagcaaggactccgacgtgtacatcaccgataagtgcgtgctggacatgcggagcatggacttcaagagcaactccgccgtggcctggtccaacaagtccgatttcgcctgcgccaacgccttcaacaacagcattatccccgaggacacattcttcccaagccccgagagcagctgcgacgtgaagctggtggaaaagagcttcgagacagacaccaacctgaacttccagatcctgtacgagatcctgctgggcaaggccaccctgtacgccgtgctggtgtctgccctggtgctgatggctatggtcaagcggaaggacagccggggacgcgccaagagaagcggatctggcgtgaagcagaccctgaatttcgacctgctgaagctggctggcgacgtggaatccaacccaggccctactagtatggactggatttggcgcatccttttccttgtcggcgctgctaccggcgcgcattccttcgaacaagttcagctgcaacagagcggccctgagctggttaagcctggcgcttctgtgcggatctcttgcaaggccagcggctacaccttcaccagctactacatccactgggtcaagcagcggcctggacagggactcgaatggatcggctggatctaccccggcaacctgaacaccaagtacaacgagaagttcaagggcaaagccacactgaccgccgacaagagcagcagcacagcctacatgcagctgagcagcctgacaagcgaggacagcgccgtgtacttctgcgccagatacgactggtacttcgacgtgtggggagccggaaccaccgtgacagtttcttctacgcgtgaggacctgaagaacgtgttcccacctgaggtggccgtgttcgagcctagcgaggccgagatcagccacacccagaaagccaccctcgtgtgcctggctaccggcttctaccccgaccatgtggaactgtcttggtgggtcaacggcaaagaggtgcacagcggcgtgtgtaccgacccccagccactgaaagaacagcccgccctgaacgacagccggtactgcctgagcagcagactgagagtgtccgccaccttctggcagaacccccggaaccacttcagatgccaggtgcagttctacggcctgagcgagaacgacgagtggacccaggacagagccaagcccgtgacccagatcgtgtctgccgaagcctggggcagagccgattgcggctttaccagcgagagctaccagcagggcgtgctgagcgccaccaacctgagcgtgatcggcttcagaatcctgctgctgaaagtggccggctttaacctgctgatgaccctgcggctgtggtccagc

SEQ ID NO: 38973 - DNA, 2664 bp, synthetic construct
  source 1..2664: mol_type = other DNA
atggccttaccagtgaccgccttgctcctgccgctggccttgctgctccacgccgccaggccggaagtgcagctggttgaatctggcggaggactggttcagcctggcggatctctgagactgtcttgtgccgccagcggcttcagcttcagcgacttttggatgagctgggtccgacaggcccctggcaaaggacttgaatgggtcgccacaatcagccaggccggcagcgagaaggactacgtggactctgtgaagggcagattcaccatcagccgggacaacgccaagaagtccctgtacctccagatgaacagcctgagagccgaggacaccgccgtgtactattgtgcctctggcgtgtacagcttcgactacagaggccagggcaccctggtcacagtctcttctggtaccggcggaggcggatctggcggcggaggtagcggtggcggaggatctgaattccagatcgtgctgacacagagccctgccatcatgtccgcttctcccggcgagaaagtgaccatgacatgtagcgccagcagcagcgtgtccttcatgcactggtatcagcagaagtccggcacaagccccaagcggtggatctacgataccagcacactggcctctggcgtgccagccagatttggcggatctggcagcggcacatcttacagcctgaccatcagcagcatggaagccgaagatgccgccacctactactgccagcagtggtccagcaatcccctgacatttggagccggcaccaagctggaactgaagagactcgaggacctgaagaacgtgttcccacctgaggtggccgtgttcgagcctagcgaggccgagatcagccacacccagaaagccaccctcgtgtgcctggctaccggcttctaccccgaccatgtggaactgtcttggtgggtcaacggcaaagaggtgcacagcggcgtgtgtaccgacccccagccactgaaagaacagcccgccctgaacgacagccggtactgcctgagcagcagactgagagtgtccgccaccttctggcagaacccccggaaccacttcagatgccaggtgcagttctacggcctgagcgagaacgacgagtggacccaggacagagccaagcccgtgacccagatcgtgtctgccgaagcctggggcagagccgattgcggctttaccagcgagagctaccagcagggcgtgctgagcgccaccaacctgagcgtgatcggcttcagaatcctgctgctgaaagtggccggctttaacctgctgatgaccctgcggctgtggtccagcagggccaagcgatctggatctggagcaacaaacttctcactactcaaacaagcaggtgacgtggaggagaatcccgggcctactagtatggactggatttggcgcatccttttccttgtcggcgctgctaccggcgcgcattccgggccccagctccagctgcaagagtctggacctggcctggtcaagcctagcgagacactgagcctgacctgtaccgtgtccggcgatagcatcagcagcggcgattactactggggctggatcagacagcctcctggcaaaggactggaatggatcggccacatctactacagcggcgtgacctactacaaccccagcctgaagtccagagtgaccatcagcgtggacaccagccggaaccagttctccctgaagctgtctagcgtgacagccgccgataccgccgtgtactactgcaccagagaggacagcagcaactggcggagtagaggccagggaacactggtcacagttagctctggatccggcggaggcggaagtggaggcggaggatctggcggcggaggctctttcgaacaagttcagctgcaacagagcggccctgagctggttaagcctggcgcttctgtgcggatctcttgcaaggccagcggctacaccttcaccagctactacatccactgggtcaagcagcggcctggacagggactcgaatggatcggctggatctaccccggcaacctgaacaccaagtacaacgagaagttcaagggcaaagccacactgaccgccgacaagagcagcagcacagcctacatgcagctgagcagcctgacaagcgaggacagcgccgtgtacttctgcgccagatacgactggtacttcgacgtgtggggagccggaaccaccgtgacagtttcttctacgcgtatccagaaccctgatcctgccgtgtaccagctgcgggatagcaagagcagcgacaagagcgtgtgtctgttcaccgacttcgacagccagaccaacgtgtcccagagcaaggactccgacgtgtacatcaccgataagtgcgtgctggacatgcggagcatggacttcaagagcaactccgccgtggcctggtccaacaagtccgatttcgcctgcgccaacgccttcaacaacagcattatccccgaggacacattcttcccaagccccgagagcagctgcgacgtgaagctggtggaaaagagcttcgagacagacaccaacctgaacttccagatcctgtacgagatcctgctgggcaaggccaccctgtacgccgtgctggtgtctgccctggtgctgatggctatggtcaagcggaaggacagccgggga

SEQ ID NO: 38974 - DNA, 2676 bp, synthetic construct
  source 1..2676: mol_type = other DNA
atggccttaccagtgaccgccttgctcctgccgctggccttgctgctccacgccgccaggccggaagtgcagctggttgaatctggcggaggactggttcagcctggcggatctctgagactgtcttgtgccgccagcggcttcagcttcagcgacttttggatgagctgggtccgacaggcccctggcaaaggacttgaatgggtcgccacaatcagccaggccggcagcgagaaggactacgtggactctgtgaagggcagattcaccatcagccgggacaacgccaagaagtccctgtacctccagatgaacagcctgagagccgaggacaccgccgtgtactattgtgcctctggcgtgtacagcttcgactacagaggccagggcaccctggtcacagtctcttctggtaccggcggaggcggatctggcggcggaggtagcggtggcggaggatctgaattccagatcgtgctgacacagagccctgccatcatgtccgcttctcccggcgagaaagtgaccatgacatgtagcgccagcagcagcgtgtccttcatgcactggtatcagcagaagtccggcacaagccccaagcggtggatctacgataccagcacactggcctctggcgtgccagccagatttggcggatctggcagcggcacatcttacagcctgaccatcagcagcatggaagccgaagatgccgccacctactactgccagcagtggtccagcaatcccctgacatttggagccggcaccaagctggaactgaagagactcgagatccagaaccctgatcctgccgtgtaccagctgcgggatagcaagagcagcgacaagagcgtgtgtctgttcaccgacttcgacagccagaccaacgtgtcccagagcaaggactccgacgtgtacatcaccgataagtgcgtgctggacatgcggagcatggacttcaagagcaactccgccgtggcctggtccaacaagtccgatttcgcctgcgccaacgccttcaacaacagcattatccccgaggacacattcttcccaagccccgagagcagctgcgacgtgaagctggtggaaaagagcttcgagacagacaccaacctgaacttccagatcctgtacgagatcctgctgggcaaggccaccctgtacgccgtgctggtgtctgccctggtgctgatggctatggtcaagcggaaggacagccggggacgcgccaagagaagcggatctggcgtgaagcagaccctgaatttcgacctgctgaagctggctggcgacgtggaatccaacccaggccctactagtatggactggatttggcgcatccttttccttgtcggcgctgctaccggcgcgcattccgggccccagctccagctgcaagagtctggacctggcctggtcaagcctagcgagacactgagcctgacctgtaccgtgtccggcgatagcatcagcagcggcgattactactggggctggatcagacagcctcctggcaaaggactggaatggatcggccacatctactacagcggcgtgacctactacaaccccagcctgaagtccagagtgaccatcagcgtggacaccagccggaaccagttctccctgaagctgtctagcgtgacagccgccgataccgccgtgtactactgcaccagagaggacagcagcaactggcggagtagaggccagggaacactggtcacagttagctctggatccggcggaggcggaagtggaggcggaggatctggcggcggaggctctttcgaacaagttcagctgcaacagagcggccctgagctggttaagcctggcgcttctgtgcggatctcttgcaaggccagcggctacaccttcaccagctactacatccactgggtcaagcagcggcctggacagggactcgaatggatcggctggatctaccccggcaacctgaacaccaagtacaacgagaagttcaagggcaaagccacactgaccgccgacaagagcagcagcacagcctacatgcagctgagcagcctgacaagcgaggacagcgccgtgtacttctgcgccagatacgactggtacttcgacgtgtggggagccggaaccaccgtgacagtttcttctacgcgtgaggacctgaagaacgtgttcccacctgaggtggccgtgttcgagcctagcgaggccgagatcagccacacccagaaagccaccctcgtgtgcctggctaccggcttctaccccgaccatgtggaactgtcttggtgggtcaacggcaaagaggtgcacagcggcgtgtgtaccgacccccagccactgaaagaacagcccgccctgaacgacagccggtactgcctgagcagcagactgagagtgtccgccaccttctggcagaacccccggaaccacttcagatgccaggtgcagttctacggcctgagcgagaacgacgagtggacccaggacagagccaagcccgtgacccagatcgtgtctgccgaagcctggggcagagccgattgcggctttaccagcgagagctaccagcagggcgtgctgagcgccaccaacctgagcgtgatcggcttcagaatcctgctgctgaaagtggccggctttaacctgctgatgaccctgcggctgtggtccagc

SEQ ID NO: 38975 - DNA, 2160 bp, synthetic construct
  source 1..2160: mol_type = other DNA
atggccttaccagtgaccgccttgctcctgccgctggccttgctgctccacgccgccaggccgcagatcgtgctgacacagagccctgccatcatgtccgcttctcccggcgagaaagtgaccatgacatgtagcgccagcagcagcgtgtccttcatgcactggtatcagcagaagtccggcacaagccccaagcggtggatctacgataccagcacactggcctctggcgtgccagccagatttggcggatctggcagcggcacatcttacagcctgaccatcagcagcatggaagccgaagatgccgccacctactactgccagcagtggtccagcaatcccctgacatttggagccggcaccaagctggaactgaagagactcgaggacctgaagaacgtgttcccacctgaggtggccgtgttcgagcctagcgaggccgagatcagccacacccagaaagccaccctcgtgtgcctggctaccggcttctaccccgaccatgtggaactgtcttggtgggtcaacggcaaagaggtgcacagcggcgtgtgtaccgacccccagccactgaaagaacagcccgccctgaacgacagccggtactgcctgagcagcagactgagagtgtccgccaccttctggcagaacccccggaaccacttcagatgccaggtgcagttctacggcctgagcgagaacgacgagtggacccaggacagagccaagcccgtgacccagatcgtgtctgccgaagcctggggcagagccgatgatgtgattaagatccactggcaggaaaagaagtccaacaccatcctgggcagccaggaaggcaacaccatgaagaccaacgacacctacatgaagttcagctggctgaccgtgcccgagaagtccctggacaaagaacacagatgcatcgtgcggcacgaaaacaacaagaacggcgtggaccaggaaatcatcttcccacccatcaagaccgatgtgattacaatggaccccaaggacaactgctccaaggacgccaacgataccctgctgctccagctgaccaacaccagcgcctactacatgtacttgttgctgctgctgaagtccgtggtgtacttcgccatcatcacatgctgcctgctgatggctatggtcaagcggaaggacagccggggaagggccaagcgatctggatctggagcaacaaacttctcactactcaaacaagcaggtgacgtggaggagaatcccgggcctactagtatggactggatttggcgcatccttttccttgtcggcgctgctaccggcgcgcattccttcgaacaagttcagctgcaacagagcggccctgagctggttaagcctggcgcttctgtgcggatctcttgcaaggccagcggctacaccttcaccagctactacatccactgggtcaagcagcggcctggacagggactcgaatggatcggctggatctaccccggcaacctgaacaccaagtacaacgagaagttcaagggcaaagccacactgaccgccgacaagagcagcagcacagcctacatgcagctgagcagcctgacaagcgaggacagcgccgtgtacttctgcgccagatacgactggtacttcgacgtgtggggagccggaaccaccgtgacagtttcttctacgcgtatccagaaccctgatcctgccgtgtaccagctgcgggatagcaagagcagcgacaagagcgtgtgtctgttcaccgacttcgacagccagaccaacgtgtcccagagcaaggactccgacgtgtacatcaccgataagtgcgtgctggacatgcggagcatggacttcaagagcaactccgccgtggcctggtccaacaagtccgatttcgcctgcgccaacgccttcaacaacagcattatccccgaggacacattcttcccaagccccgagagcagcgactccaccgaccacgtgaagcccaaagagacagagaacaccaagcagcccagcaagagctgccacaagcccaaggccatcgtgcacaccgagaaagtgaacatgatgagcctgaccgtgctgggcctgcggatgctgttcgccaaaaccgtggccgtgaacttcctgctgaccgccaagctgttcttcctcctcaccgcc

SEQ ID NO: 38976 - DNA, 2172 bp, synthetic construct
  source 1..2172: mol_type = other DNA
atggccttaccagtgaccgccttgctcctgccgctggccttgctgctccacgccgccaggccgcagatcgtgctgacacagagccctgccatcatgtccgcttctcccggcgagaaagtgaccatgacatgtagcgccagcagcagcgtgtccttcatgcactggtatcagcagaagtccggcacaagccccaagcggtggatctacgataccagcacactggcctctggcgtgccagccagatttggcggatctggcagcggcacatcttacagcctgaccatcagcagcatggaagccgaagatgccgccacctactactgccagcagtggtccagcaatcccctgacatttggagccggcaccaagctggaactgaagagactcgagatccagaaccctgatcctgccgtgtaccagctgcgggatagcaagagcagcgacaagagcgtgtgtctgttcaccgacttcgacagccagaccaacgtgtcccagagcaaggactccgacgtgtacatcaccgataagtgcgtgctggacatgcggagcatggacttcaagagcaactccgccgtggcctggtccaacaagtccgatttcgcctgcgccaacgccttcaacaacagcattatccccgaggacacattcttcccaagccccgagagcagcgactccaccgaccacgtgaagcccaaagagacagagaacaccaagcagcccagcaagagctgccacaagcccaaggccatcgtgcacaccgagaaagtgaacatgatgagcctgaccgtgctgggcctgcggatgctgttcgccaaaaccgtggccgtgaacttcctgctgaccgccaagctgttcttcctcctcaccgcccgcgccaagagaagcggatctggcgtgaagcagaccctgaatttcgacctgctgaagctggctggcgacgtggaatccaacccaggccctactagtatggactggatttggcgcatccttttccttgtcggcgctgctaccggcgcgcattccttcgaacaagttcagctgcaacagagcggccctgagctggttaagcctggcgcttctgtgcggatctcttgcaaggccagcggctacaccttcaccagctactacatccactgggtcaagcagcggcctggacagggactcgaatggatcggctggatctaccccggcaacctgaacaccaagtacaacgagaagttcaagggcaaagccacactgaccgccgacaagagcagcagcacagcctacatgcagctgagcagcctgacaagcgaggacagcgccgtgtacttctgcgccagatacgactggtacttcgacgtgtggggagccggaaccaccgtgacagtttcttctacgcgtgaggacctgaagaacgtgttcccacctgaggtggccgtgttcgagcctagcgaggccgagatcagccacacccagaaagccaccctcgtgtgcctggctaccggcttctaccccgaccatgtggaactgtcttggtgggtcaacggcaaagaggtgcacagcggcgtgtgtaccgacccccagccactgaaagaacagcccgccctgaacgacagccggtactgcctgagcagcagactgagagtgtccgccaccttctggcagaacccccggaaccacttcagatgccaggtgcagttctacggcctgagcgagaacgacgagtggacccaggacagagccaagcccgtgacccagatcgtgtctgccgaagcctggggcagagccgatgatgtgattaagatccactggcaggaaaagaagtccaacaccatcctgggcagccaggaaggcaacaccatgaagaccaacgacacctacatgaagttcagctggctgaccgtgcccgagaagtccctggacaaagaacacagatgcatcgtgcggcacgaaaacaacaagaacggcgtggaccaggaaatcatcttcccacccatcaagaccgatgtgattacaatggaccccaaggacaactgctccaaggacgccaacgataccctgctgctccagctgaccaacaccagcgcctactacatgtacttgttgctgctgctgaagtccgtggtgtacttcgccatcatcacatgctgcctgctgatggctatggtcaagcggaaggacagccgggga

SEQ ID NO: 38977 - DNA, 2565 bp, synthetic construct
  source 1..2565: mol_type = other DNA
atggccttaccagtgaccgccttgctcctgccgctggccttgctgctccacgccgccaggccggaagtgcagctggttgaatctggcggaggactggttcagcctggcggatctctgagactgtcttgtgccgccagcggcttcagcttcagcgacttttggatgagctgggtccgacaggcccctggcaaaggacttgaatgggtcgccacaatcagccaggccggcagcgagaaggactacgtggactctgtgaagggcagattcaccatcagccgggacaacgccaagaagtccctgtacctccagatgaacagcctgagagccgaggacaccgccgtgtactattgtgcctctggcgtgtacagcttcgactacagaggccagggcaccctggtcacagtctcttctggtaccggcggaggcggatctggcggcggaggtagcggtggcggaggatctgaattccagatcgtgctgacacagagccctgccatcatgtccgcttctcccggcgagaaagtgaccatgacatgtagcgccagcagcagcgtgtccttcatgcactggtatcagcagaagtccggcacaagccccaagcggtggatctacgataccagcacactggcctctggcgtgccagccagatttggcggatctggcagcggcacatcttacagcctgaccatcagcagcatggaagccgaagatgccgccacctactactgccagcagtggtccagcaatcccctgacatttggagccggcaccaagctggaactgaagagactcgaggacctgaagaacgtgttcccacctgaggtggccgtgttcgagcctagcgaggccgagatcagccacacccagaaagccaccctcgtgtgcctggctaccggcttctaccccgaccatgtggaactgtcttggtgggtcaacggcaaagaggtgcacagcggcgtgtgtaccgacccccagccactgaaagaacagcccgccctgaacgacagccggtactgcctgagcagcagactgagagtgtccgccaccttctggcagaacccccggaaccacttcagatgccaggtgcagttctacggcctgagcgagaacgacgagtggacccaggacagagccaagcccgtgacccagatcgtgtctgccgaagcctggggcagagccgatgatgtgattaagatccactggcaggaaaagaagtccaacaccatcctgggcagccaggaaggcaacaccatgaagaccaacgacacctacatgaagttcagctggctgaccgtgcccgagaagtccctggacaaagaacacagatgcatcgtgcggcacgaaaacaacaagaacggcgtggaccaggaaatcatcttcccacccatcaagaccgatgtgattacaatggaccccaaggacaactgctccaaggacgccaacgataccctgctgctccagctgaccaacaccagcgcctactacatgtacttgttgctgctgctgaagtccgtggtgtacttcgccatcatcacatgctgcctgctgatggctatggtcaagcggaaggacagccggggaagggccaagcgatctggatctggagcaacaaacttctcactactcaaacaagcaggtgacgtggaggagaatcccgggcctactagtatggactggatttggcgcatccttttccttgtcggcgctgctaccggcgcgcattccttcgaacaagttcagctgcaacagagcggccctgagctggttaagcctggcgcttctgtgcggatctcttgcaaggccagcggctacaccttcaccagctactacatccactgggtcaagcagcggcctggacagggactcgaatggatcggctggatctaccccggcaacctgaacaccaagtacaacgagaagttcaagggcaaagccacactgaccgccgacaagagcagcagcacagcctacatgcagctgagcagcctgacaagcgaggacagcgccgtgtacttctgcgccagatacgactggtacttcgacgtgtggggagccggaaccaccgtgacagtttcttctacgcgtatccagaaccctgatcctgccgtgtaccagctgcgggatagcaagagcagcgacaagagcgtgtgtctgttcaccgacttcgacagccagaccaacgtgtcccagagcaaggactccgacgtgtacatcaccgataagtgcgtgctggacatgcggagcatggacttcaagagcaactccgccgtggcctggtccaacaagtccgatttcgcctgcgccaacgccttcaacaacagcattatccccgaggacacattcttcccaagccccgagagcagcgactccaccgaccacgtgaagcccaaagagacagagaacaccaagcagcccagcaagagctgccacaagcccaaggccatcgtgcacaccgagaaagtgaacatgatgagcctgaccgtgctgggcctgcggatgctgttcgccaaaaccgtggccgtgaacttcctgctgaccgccaagctgttcttcctcctcaccgcc

SEQ ID NO: 38978 - DNA, 2577 bp, synthetic construct
  source 1..2577: mol_type = other DNA
atggccttaccagtgaccgccttgctcctgccgctggccttgctgctccacgccgccaggccggaagtgcagctggttgaatctggcggaggactggttcagcctggcggatctctgagactgtcttgtgccgccagcggcttcagcttcagcgacttttggatgagctgggtccgacaggcccctggcaaaggacttgaatgggtcgccacaatcagccaggccggcagcgagaaggactacgtggactctgtgaagggcagattcaccatcagccgggacaacgccaagaagtccctgtacctccagatgaacagcctgagagccgaggacaccgccgtgtactattgtgcctctggcgtgtacagcttcgactacagaggccagggcaccctggtcacagtctcttctggtaccggcggaggcggatctggcggcggaggtagcggtggcggaggatctgaattccagatcgtgctgacacagagccctgccatcatgtccgcttctcccggcgagaaagtgaccatgacatgtagcgccagcagcagcgtgtccttcatgcactggtatcagcagaagtccggcacaagccccaagcggtggatctacgataccagcacactggcctctggcgtgccagccagatttggcggatctggcagcggcacatcttacagcctgaccatcagcagcatggaagccgaagatgccgccacctactactgccagcagtggtccagcaatcccctgacatttggagccggcaccaagctggaactgaagagactcgagatccagaaccctgatcctgccgtgtaccagctgcgggatagcaagagcagcgacaagagcgtgtgtctgttcaccgacttcgacagccagaccaacgtgtcccagagcaaggactccgacgtgtacatcaccgataagtgcgtgctggacatgcggagcatggacttcaagagcaactccgccgtggcctggtccaacaagtccgatttcgcctgcgccaacgccttcaacaacagcattatccccgaggacacattcttcccaagccccgagagcagcgactccaccgaccacgtgaagcccaaagagacagagaacaccaagcagcccagcaagagctgccacaagcccaaggccatcgtgcacaccgagaaagtgaacatgatgagcctgaccgtgctgggcctgcggatgctgttcgccaaaaccgtggccgtgaacttcctgctgaccgccaagctgttcttcctcctcaccgcccgcgccaagagaagcggatctggcgtgaagcagaccctgaatttcgacctgctgaagctggctggcgacgtggaatccaacccaggccctactagtatggactggatttggcgcatccttttccttgtcggcgctgctaccggcgcgcattccttcgaacaagttcagctgcaacagagcggccctgagctggttaagcctggcgcttctgtgcggatctcttgcaaggccagcggctacaccttcaccagctactacatccactgggtcaagcagcggcctggacagggactcgaatggatcggctggatctaccccggcaacctgaacaccaagtacaacgagaagttcaagggcaaagccacactgaccgccgacaagagcagcagcacagcctacatgcagctgagcagcctgacaagcgaggacagcgccgtgtacttctgcgccagatacgactggtacttcgacgtgtggggagccggaaccaccgtgacagtttcttctacgcgtgaggacctgaagaacgtgttcccacctgaggtggccgtgttcgagcctagcgaggccgagatcagccacacccagaaagccaccctcgtgtgcctggctaccggcttctaccccgaccatgtggaactgtcttggtgggtcaacggcaaagaggtgcacagcggcgtgtgtaccgacccccagccactgaaagaacagcccgccctgaacgacagccggtactgcctgagcagcagactgagagtgtccgccaccttctggcagaacccccggaaccacttcagatgccaggtgcagttctacggcctgagcgagaacgacgagtggacccaggacagagccaagcccgtgacccagatcgtgtctgccgaagcctggggcagagccgatgatgtgattaagatccactggcaggaaaagaagtccaacaccatcctgggcagccaggaaggcaacaccatgaagaccaacgacacctacatgaagttcagctggctgaccgtgcccgagaagtccctggacaaagaacacagatgcatcgtgcggcacgaaaacaacaagaacggcgtggaccaggaaatcatcttcccacccatcaagaccgatgtgattacaatggaccccaaggacaactgctccaaggacgccaacgataccctgctgctccagctgaccaacaccagcgcctactacatgtacttgttgctgctgctgaagtccgtggtgtacttcgccatcatcacatgctgcctgctgatggctatggtcaagcggaaggacagccgggga

SEQ ID NO: 38979 - DNA, 2976 bp, synthetic construct
  source 1..2976: mol_type = other DNA
atggccttaccagtgaccgccttgctcctgccgctggccttgctgctccacgccgccaggccggaagtgcagctggttgaatctggcggaggactggttcagcctggcggatctctgagactgtcttgtgccgccagcggcttcagcttcagcgacttttggatgagctgggtccgacaggcccctggcaaaggacttgaatgggtcgccacaatcagccaggccggcagcgagaaggactacgtggactctgtgaagggcagattcaccatcagccgggacaacgccaagaagtccctgtacctccagatgaacagcctgagagccgaggacaccgccgtgtactattgtgcctctggcgtgtacagcttcgactacagaggccagggcaccctggtcacagtctcttctggtaccggcggaggcggatctggcggcggaggtagcggtggcggaggatctgaattccagatcgtgctgacacagagccctgccatcatgtccgcttctcccggcgagaaagtgaccatgacatgtagcgccagcagcagcgtgtccttcatgcactggtatcagcagaagtccggcacaagccccaagcggtggatctacgataccagcacactggcctctggcgtgccagccagatttggcggatctggcagcggcacatcttacagcctgaccatcagcagcatggaagccgaagatgccgccacctactactgccagcagtggtccagcaatcccctgacatttggagccggcaccaagctggaactgaagagactcgaggacctgaagaacgtgttcccacctgaggtggccgtgttcgagcctagcgaggccgagatcagccacacccagaaagccaccctcgtgtgcctggctaccggcttctaccccgaccatgtggaactgtcttggtgggtcaacggcaaagaggtgcacagcggcgtgtgtaccgacccccagccactgaaagaacagcccgccctgaacgacagccggtactgcctgagcagcagactgagagtgtccgccaccttctggcagaacccccggaaccacttcagatgccaggtgcagttctacggcctgagcgagaacgacgagtggacccaggacagagccaagcccgtgacccagatcgtgtctgccgaagcctggggcagagccgatgatgtgattaagatccactggcaggaaaagaagtccaacaccatcctgggcagccaggaaggcaacaccatgaagaccaacgacacctacatgaagttcagctggctgaccgtgcccgagaagtccctggacaaagaacacagatgcatcgtgcggcacgaaaacaacaagaacggcgtggaccaggaaatcatcttcccacccatcaagaccgatgtgattacaatggaccccaaggacaactgctccaaggacgccaacgataccctgctgctccagctgaccaacaccagcgcctactacatgtacttgttgctgctgctgaagtccgtggtgtacttcgccatcatcacatgctgcctgctgatggctatggtcaagcggaaggacagccggggaagggccaagcgatctggatctggagcaacaaacttctcactactcaaacaagcaggtgacgtggaggagaatcccgggcctactagtatggactggatttggcgcatccttttccttgtcggcgctgctaccggcgcgcattccgggccccagctccagctgcaagagtctggacctggcctggtcaagcctagcgagacactgagcctgacctgtaccgtgtccggcgatagcatcagcagcggcgattactactggggctggatcagacagcctcctggcaaaggactggaatggatcggccacatctactacagcggcgtgacctactacaaccccagcctgaagtccagagtgaccatcagcgtggacaccagccggaaccagttctccctgaagctgtctagcgtgacagccgccgataccgccgtgtactactgcaccagagaggacagcagcaactggcggagtagaggccagggaacactggtcacagttagctctggatccggcggaggcggaagtggaggcggaggatctggcggcggaggctctttcgaacaagttcagctgcaacagagcggccctgagctggttaagcctggcgcttctgtgcggatctcttgcaaggccagcggctacaccttcaccagctactacatccactgggtcaagcagcggcctggacagggactcgaatggatcggctggatctaccccggcaacctgaacaccaagtacaacgagaagttcaagggcaaagccacactgaccgccgacaagagcagcagcacagcctacatgcagctgagcagcctgacaagcgaggacagcgccgtgtacttctgcgccagatacgactggtacttcgacgtgtggggagccggaaccaccgtgacagtttcttctacgcgtatccagaaccctgatcctgccgtgtaccagctgcgggatagcaagagcagcgacaagagcgtgtgtctgttcaccgacttcgacagccagaccaacgtgtcccagagcaaggactccgacgtgtacatcaccgataagtgcgtgctggacatgcggagcatggacttcaagagcaactccgccgtggcctggtccaacaagtccgatttcgcctgcgccaacgccttcaacaacagcattatccccgaggacacattcttcccaagccccgagagcagcgactccaccgaccacgtgaagcccaaagagacagagaacaccaagcagcccagcaagagctgccacaagcccaaggccatcgtgcacaccgagaaagtgaacatgatgagcctgaccgtgctgggcctgcggatgctgttcgccaaaaccgtggccgtgaacttcctgctgaccgccaagctgttcttcctcctcaccgcc

SEQ ID NO: 38980 - DNA, 2988 bp, synthetic construct
  source 1..2988: mol_type = other DNA
atggccttaccagtgaccgccttgctcctgccgctggccttgctgctccacgccgccaggccggaagtgcagctggttgaatctggcggaggactggttcagcctggcggatctctgagactgtcttgtgccgccagcggcttcagcttcagcgacttttggatgagctgggtccgacaggcccctggcaaaggacttgaatgggtcgccacaatcagccaggccggcagcgagaaggactacgtggactctgtgaagggcagattcaccatcagccgggacaacgccaagaagtccctgtacctccagatgaacagcctgagagccgaggacaccgccgtgtactattgtgcctctggcgtgtacagcttcgactacagaggccagggcaccctggtcacagtctcttctggtaccggcggaggcggatctggcggcggaggtagcggtggcggaggatctgaattccagatcgtgctgacacagagccctgccatcatgtccgcttctcccggcgagaaagtgaccatgacatgtagcgccagcagcagcgtgtccttcatgcactggtatcagcagaagtccggcacaagccccaagcggtggatctacgataccagcacactggcctctggcgtgccagccagatttggcggatctggcagcggcacatcttacagcctgaccatcagcagcatggaagccgaagatgccgccacctactactgccagcagtggtccagcaatcccctgacatttggagccggcaccaagctggaactgaagagactcgagatccagaaccctgatcctgccgtgtaccagctgcgggatagcaagagcagcgacaagagcgtgtgtctgttcaccgacttcgacagccagaccaacgtgtcccagagcaaggactccgacgtgtacatcaccgataagtgcgtgctggacatgcggagcatggacttcaagagcaactccgccgtggcctggtccaacaagtccgatttcgcctgcgccaacgccttcaacaacagcattatccccgaggacacattcttcccaagccccgagagcagcgactccaccgaccacgtgaagcccaaagagacagagaacaccaagcagcccagcaagagctgccacaagcccaaggccatcgtgcacaccgagaaagtgaacatgatgagcctgaccgtgctgggcctgcggatgctgttcgccaaaaccgtggccgtgaacttcctgctgaccgccaagctgttcttcctcctcaccgcccgcgccaagagaagcggatctggcgtgaagcagaccctgaatttcgacctgctgaagctggctggcgacgtggaatccaacccaggccctactagtatggactggatttggcgcatccttttccttgtcggcgctgctaccggcgcgcattccgggccccagctccagctgcaagagtctggacctggcctggtcaagcctagcgagacactgagcctgacctgtaccgtgtccggcgatagcatcagcagcggcgattactactggggctggatcagacagcctcctggcaaaggactggaatggatcggccacatctactacagcggcgtgacctactacaaccccagcctgaagtccagagtgaccatcagcgtggacaccagccggaaccagttctccctgaagctgtctagcgtgacagccgccgataccgccgtgtactactgcaccagagaggacagcagcaactggcggagtagaggccagggaacactggtcacagttagctctggatccggcggaggcggaagtggaggcggaggatctggcggcggaggctctttcgaacaagttcagctgcaacagagcggccctgagctggttaagcctggcgcttctgtgcggatctcttgcaaggccagcggctacaccttcaccagctactacatccactgggtcaagcagcggcctggacagggactcgaatggatcggctggatctaccccggcaacctgaacaccaagtacaacgagaagttcaagggcaaagccacactgaccgccgacaagagcagcagcacagcctacatgcagctgagcagcctgacaagcgaggacagcgccgtgtacttctgcgccagatacgactggtacttcgacgtgtggggagccggaaccaccgtgacagtttcttctacgcgtgaggacctgaagaacgtgttcccacctgaggtggccgtgttcgagcctagcgaggccgagatcagccacacccagaaagccaccctcgtgtgcctggctaccggcttctaccccgaccatgtggaactgtcttggtgggtcaacggcaaagaggtgcacagcggcgtgtgtaccgacccccagccactgaaagaacagcccgccctgaacgacagccggtactgcctgagcagcagactgagagtgtccgccaccttctggcagaacccccggaaccacttcagatgccaggtgcagttctacggcctgagcgagaacgacgagtggacccaggacagagccaagcccgtgacccagatcgtgtctgccgaagcctggggcagagccgatgatgtgattaagatccactggcaggaaaagaagtccaacaccatcctgggcagccaggaaggcaacaccatgaagaccaacgacacctacatgaagttcagctggctgaccgtgcccgagaagtccctggacaaagaacacagatgcatcgtgcggcacgaaaacaacaagaacggcgtggaccaggaaatcatcttcccacccatcaagaccgatgtgattacaatggaccccaaggacaactgctccaaggacgccaacgataccctgctgctccagctgaccaacaccagcgcctactacatgtacttgttgctgctgctgaagtccgtggtgtacttcgccatcatcacatgctgcctgctgatggctatggtcaagcggaaggacagccgggga

SEQ ID NO: 38981 - DNA, 2154 bp, synthetic construct
  source 1..2154: mol_type = other DNA
atggccttaccagtgaccgccttgctcctgccgctggccttgctgctccacgccgccaggccgcagatcgtgctgacacagagccctgccatcatgtccgcttctcccggcgagaaagtgaccatgacatgtagcgccagcagcagcgtgtccttcatgcactggtatcagcagaagtccggcacaagccccaagcggtggatctacgataccagcacactggcctctggcgtgccagccagatttggcggatctggcagcggcacatcttacagcctgaccatcagcagcatggaagccgaagatgccgccacctactactgccagcagtggtccagcaatcccctgacatttggagccggcaccaagctggaactgaagagactcgaggacctgaagaacgtgttcccacctgaggtggccgtgttcgagcctagcgaggccgagatcagccacacccagaaagccaccctcgtgtgcctggctaccggcttctaccccgaccatgtggaactgtcttggtgggtcaacggcaaagaggtgcacagcggcgtgtgtaccgacccccagccactgaaagaacagcccgccctgaacgacagccggtactgcctgagcagcagactgagagtgtccgccaccttctggcagaacccccggaaccacttcagatgccaggtgcagttctacggcctgagcgagaacgacgagtggacccaggacagagccaagcccgtgacccagatcgtgtctgccgaagcctggggcagagccgatgatgtgattaagatccactggcaggaaaagaagtccaacaccatcctgggcagccaggaaggcaacaccatgaagaccaacgacacctacatgaagttcagctggctgaccgtgcccgagaagtccctggacaaagaacacagatgcatcgtgcggcacgaaaacaacaagaacggcgtggaccaggaaatcatcttcccacccatcaagaccgatgtgattacaatggaccccaaggacaactgctccaaggacgccaacgataccctgctgctccagctgaccaacaccagcgcctactacatgtacttgttgctgctgctgaagtccgtggtgtacttcgccatcatcacatgctgcctgctgcggagaaccgccttctgctgcaacggcgagaagtctagggccaagcgatctggatctggagcaacaaacttctcactactcaaacaagcaggtgacgtggaggagaatcccgggcctactagtatggactggatttggcgcatccttttccttgtcggcgctgctaccggcgcgcattccttcgaacaagttcagctgcaacagagcggccctgagctggttaagcctggcgcttctgtgcggatctcttgcaaggccagcggctacaccttcaccagctactacatccactgggtcaagcagcggcctggacagggactcgaatggatcggctggatctaccccggcaacctgaacaccaagtacaacgagaagttcaagggcaaagccacactgaccgccgacaagagcagcagcacagcctacatgcagctgagcagcctgacaagcgaggacagcgccgtgtacttctgcgccagatacgactggtacttcgacgtgtggggagccggaaccaccgtgacagtttcttctacgcgtatccagaaccctgatcctgccgtgtaccagctgcgggatagcaagagcagcgacaagagcgtgtgtctgttcaccgacttcgacagccagaccaacgtgtcccagagcaaggactccgacgtgtacatcaccgataagtgcgtgctggacatgcggagcatggacttcaagagcaactccgccgtggcctggtccaacaagtccgatttcgcctgcgccaacgccttcaacaacagcattatccccgaggacacattcttcccaagccccgagagcagcgactccaccgaccacgtgaagcccaaagagacagagaacaccaagcagcccagcaagagctgccacaagcccaaggccatcgtgcacaccgagaaagtgaacatgatgagcctgaccgtgctgggcctgcggatgctgttcgccaaaaccgtggccgtgaacttcctgctgaccgccaagctgttcttcctc

SEQ ID NO: 38982 - DNA, 2166 bp, synthetic construct
  source 1..2166: mol_type = other DNA
atggccttaccagtgaccgccttgctcctgccgctggccttgctgctccacgccgccaggccgcagatcgtgctgacacagagccctgccatcatgtccgcttctcccggcgagaaagtgaccatgacatgtagcgccagcagcagcgtgtccttcatgcactggtatcagcagaagtccggcacaagccccaagcggtggatctacgataccagcacactggcctctggcgtgccagccagatttggcggatctggcagcggcacatcttacagcctgaccatcagcagcatggaagccgaagatgccgccacctactactgccagcagtggtccagcaatcccctgacatttggagccggcaccaagctggaactgaagagactcgagatccagaaccctgatcctgccgtgtaccagctgcgggatagcaagagcagcgacaagagcgtgtgtctgttcaccgacttcgacagccagaccaacgtgtcccagagcaaggactccgacgtgtacatcaccgataagtgcgtgctggacatgcggagcatggacttcaagagcaactccgccgtggcctggtccaacaagtccgatttcgcctgcgccaacgccttcaacaacagcattatccccgaggacacattcttcccaagccccgagagcagcgactccaccgaccacgtgaagcccaaagagacagagaacaccaagcagcccagcaagagctgccacaagcccaaggccatcgtgcacaccgagaaagtgaacatgatgagcctgaccgtgctgggcctgcggatgctgttcgccaaaaccgtggccgtgaacttcctgctgaccgccaagctgttcttcctccgcgccaagagaagcggatctggcgtgaagcagaccctgaatttcgacctgctgaagctggctggcgacgtggaatccaacccaggccctactagtatggactggatttggcgcatccttttccttgtcggcgctgctaccggcgcgcattccttcgaacaagttcagctgcaacagagcggccctgagctggttaagcctggcgcttctgtgcggatctcttgcaaggccagcggctacaccttcaccagctactacatccactgggtcaagcagcggcctggacagggactcgaatggatcggctggatctaccccggcaacctgaacaccaagtacaacgagaagttcaagggcaaagccacactgaccgccgacaagagcagcagcacagcctacatgcagctgagcagcctgacaagcgaggacagcgccgtgtacttctgcgccagatacgactggtacttcgacgtgtggggagccggaaccaccgtgacagtttcttctacgcgtgaggacctgaagaacgtgttcccacctgaggtggccgtgttcgagcctagcgaggccgagatcagccacacccagaaagccaccctcgtgtgcctggctaccggcttctaccccgaccatgtggaactgtcttggtgggtcaacggcaaagaggtgcacagcggcgtgtgtaccgacccccagccactgaaagaacagcccgccctgaacgacagccggtactgcctgagcagcagactgagagtgtccgccaccttctggcagaacccccggaaccacttcagatgccaggtgcagttctacggcctgagcgagaacgacgagtggacccaggacagagccaagcccgtgacccagatcgtgtctgccgaagcctggggcagagccgatgatgtgattaagatccactggcaggaaaagaagtccaacaccatcctgggcagccaggaaggcaacaccatgaagaccaacgacacctacatgaagttcagctggctgaccgtgcccgagaagtccctggacaaagaacacagatgcatcgtgcggcacgaaaacaacaagaacggcgtggaccaggaaatcatcttcccacccatcaagaccgatgtgattacaatggaccccaaggacaactgctccaaggacgccaacgataccctgctgctccagctgaccaacaccagcgcctactacatgtacttgttgctgctgctgaagtccgtggtgtacttcgccatcatcacatgctgcctgctgcggagaaccgccttctgctgcaacggcgagaagtct

SEQ ID NO: 38983 - DNA, 2559 bp, synthetic construct
  source 1..2559: mol_type = other DNA
atggccttaccagtgaccgccttgctcctgccgctggccttgctgctccacgccgccaggccggaagtgcagctggttgaatctggcggaggactggttcagcctggcggatctctgagactgtcttgtgccgccagcggcttcagcttcagcgacttttggatgagctgggtccgacaggcccctggcaaaggacttgaatgggtcgccacaatcagccaggccggcagcgagaaggactacgtggactctgtgaagggcagattcaccatcagccgggacaacgccaagaagtccctgtacctccagatgaacagcctgagagccgaggacaccgccgtgtactattgtgcctctggcgtgtacagcttcgactacagaggccagggcaccctggtcacagtctcttctggtaccggcggaggcggatctggcggcggaggtagcggtggcggaggatctgaattccagatcgtgctgacacagagccctgccatcatgtccgcttctcccggcgagaaagtgaccatgacatgtagcgccagcagcagcgtgtccttcatgcactggtatcagcagaagtccggcacaagccccaagcggtggatctacgataccagcacactggcctctggcgtgccagccagatttggcggatctggcagcggcacatcttacagcctgaccatcagcagcatggaagccgaagatgccgccacctactactgccagcagtggtccagcaatcccctgacatttggagccggcaccaagctggaactgaagagactcgaggacctgaagaacgtgttcccacctgaggtggccgtgttcgagcctagcgaggccgagatcagccacacccagaaagccaccctcgtgtgcctggctaccggcttctaccccgaccatgtggaactgtcttggtgggtcaacggcaaagaggtgcacagcggcgtgtgtaccgacccccagccactgaaagaacagcccgccctgaacgacagccggtactgcctgagcagcagactgagagtgtccgccaccttctggcagaacccccggaaccacttcagatgccaggtgcagttctacggcctgagcgagaacgacgagtggacccaggacagagccaagcccgtgacccagatcgtgtctgccgaagcctggggcagagccgatgatgtgattaagatccactggcaggaaaagaagtccaacaccatcctgggcagccaggaaggcaacaccatgaagaccaacgacacctacatgaagttcagctggctgaccgtgcccgagaagtccctggacaaagaacacagatgcatcgtgcggcacgaaaacaacaagaacggcgtggaccaggaaatcatcttcccacccatcaagaccgatgtgattacaatggaccccaaggacaactgctccaaggacgccaacgataccctgctgctccagctgaccaacaccagcgcctactacatgtacttgttgctgctgctgaagtccgtggtgtacttcgccatcatcacatgctgcctgctgcggagaaccgccttctgctgcaacggcgagaagtctagggccaagcgatctggatctggagcaacaaacttctcactactcaaacaagcaggtgacgtggaggagaatcccgggcctactagtatggactggatttggcgcatccttttccttgtcggcgctgctaccggcgcgcattccttcgaacaagttcagctgcaacagagcggccctgagctggttaagcctggcgcttctgtgcggatctcttgcaaggccagcggctacaccttcaccagctactacatccactgggtcaagcagcggcctggacagggactcgaatggatcggctggatctaccccggcaacctgaacaccaagtacaacgagaagttcaagggcaaagccacactgaccgccgacaagagcagcagcacagcctacatgcagctgagcagcctgacaagcgaggacagcgccgtgtacttctgcgccagatacgactggtacttcgacgtgtggggagccggaaccaccgtgacagtttcttctacgcgtatccagaaccctgatcctgccgtgtaccagctgcgggatagcaagagcagcgacaagagcgtgtgtctgttcaccgacttcgacagccagaccaacgtgtcccagagcaaggactccgacgtgtacatcaccgataagtgcgtgctggacatgcggagcatggacttcaagagcaactccgccgtggcctggtccaacaagtccgatttcgcctgcgccaacgccttcaacaacagcattatccccgaggacacattcttcccaagccccgagagcagcgactccaccgaccacgtgaagcccaaagagacagagaacaccaagcagcccagcaagagctgccacaagcccaaggccatcgtgcacaccgagaaagtgaacatgatgagcctgaccgtgctgggcctgcggatgctgttcgccaaaaccgtggccgtgaacttcctgctgaccgccaagctgttcttcctc

SEQ ID NO: 38984 - DNA, 2970 bp, synthetic construct
  source 1..2970: mol_type = other DNA
atggccttaccagtgaccgccttgctcctgccgctggccttgctgctccacgccgccaggccggaagtgcagctggttgaatctggcggaggactggttcagcctggcggatctctgagactgtcttgtgccgccagcggcttcagcttcagcgacttttggatgagctgggtccgacaggcccctggcaaaggacttgaatgggtcgccacaatcagccaggccggcagcgagaaggactacgtggactctgtgaagggcagattcaccatcagccgggacaacgccaagaagtccctgtacctccagatgaacagcctgagagccgaggacaccgccgtgtactattgtgcctctggcgtgtacagcttcgactacagaggccagggcaccctggtcacagtctcttctggtaccggcggaggcggatctggcggcggaggtagcggtggcggaggatctgaattccagatcgtgctgacacagagccctgccatcatgtccgcttctcccggcgagaaagtgaccatgacatgtagcgccagcagcagcgtgtccttcatgcactggtatcagcagaagtccggcacaagccccaagcggtggatctacgataccagcacactggcctctggcgtgccagccagatttggcggatctggcagcggcacatcttacagcctgaccatcagcagcatggaagccgaagatgccgccacctactactgccagcagtggtccagcaatcccctgacatttggagccggcaccaagctggaactgaagagactcgaggacctgaagaacgtgttcccacctgaggtggccgtgttcgagcctagcgaggccgagatcagccacacccagaaagccaccctcgtgtgcctggctaccggcttctaccccgaccatgtggaactgtcttggtgggtcaacggcaaagaggtgcacagcggcgtgtgtaccgacccccagccactgaaagaacagcccgccctgaacgacagccggtactgcctgagcagcagactgagagtgtccgccaccttctggcagaacccccggaaccacttcagatgccaggtgcagttctacggcctgagcgagaacgacgagtggacccaggacagagccaagcccgtgacccagatcgtgtctgccgaagcctggggcagagccgatgatgtgattaagatccactggcaggaaaagaagtccaacaccatcctgggcagccaggaaggcaacaccatgaagaccaacgacacctacatgaagttcagctggctgaccgtgcccgagaagtccctggacaaagaacacagatgcatcgtgcggcacgaaaacaacaagaacggcgtggaccaggaaatcatcttcccacccatcaagaccgatgtgattacaatggaccccaaggacaactgctccaaggacgccaacgataccctgctgctccagctgaccaacaccagcgcctactacatgtacttgttgctgctgctgaagtccgtggtgtacttcgccatcatcacatgctgcctgctgcggagaaccgccttctgctgcaacggcgagaagtctagggccaagcgatctggatctggagcaacaaacttctcactactcaaacaagcaggtgacgtggaggagaatcccgggcctactagtatggactggatttggcgcatccttttccttgtcggcgctgctaccggcgcgcattccgggccccagctccagctgcaagagtctggacctggcctggtcaagcctagcgagacactgagcctgacctgtaccgtgtccggcgatagcatcagcagcggcgattactactggggctggatcagacagcctcctggcaaaggactggaatggatcggccacatctactacagcggcgtgacctactacaaccccagcctgaagtccagagtgaccatcagcgtggacaccagccggaaccagttctccctgaagctgtctagcgtgacagccgccgataccgccgtgtactactgcaccagagaggacagcagcaactggcggagtagaggccagggaacactggtcacagttagctctggatccggcggaggcggaagtggaggcggaggatctggcggcggaggctctttcgaacaagttcagctgcaacagagcggccctgagctggttaagcctggcgcttctgtgcggatctcttgcaaggccagcggctacaccttcaccagctactacatccactgggtcaagcagcggcctggacagggactcgaatggatcggctggatctaccccggcaacctgaacaccaagtacaacgagaagttcaagggcaaagccacactgaccgccgacaagagcagcagcacagcctacatgcagctgagcagcctgacaagcgaggacagcgccgtgtacttctgcgccagatacgactggtacttcgacgtgtggggagccggaaccaccgtgacagtttcttctacgcgtatccagaaccctgatcctgccgtgtaccagctgcgggatagcaagagcagcgacaagagcgtgtgtctgttcaccgacttcgacagccagaccaacgtgtcccagagcaaggactccgacgtgtacatcaccgataagtgcgtgctggacatgcggagcatggacttcaagagcaactccgccgtggcctggtccaacaagtccgatttcgcctgcgccaacgccttcaacaacagcattatccccgaggacacattcttcccaagccccgagagcagcgactccaccgaccacgtgaagcccaaagagacagagaacaccaagcagcccagcaagagctgccacaagcccaaggccatcgtgcacaccgagaaagtgaacatgatgagcctgaccgtgctgggcctgcggatgctgttcgccaaaaccgtggccgtgaacttcctgctgaccgccaagctgttcttcctc

SEQ ID NO: 38985 - DNA, 1848 bp, synthetic construct
  source 1..1848: mol_type = other DNA
atggccttaccagtgaccgccttgctcctgccgctggccttgctgctccacgccgccaggccgcagatcgtgctgacacagagccctgccatcatgtccgcttctcccggcgagaaagtgaccatgacatgtagcgccagcagcagcgtgtccttcatgcactggtatcagcagaagtccggcacaagccccaagcggtggatctacgataccagcacactggcctctggcgtgccagccagatttggcggatctggcagcggcacatcttacagcctgaccatcagcagcatggaagccgaagatgccgccacctactactgccagcagtggtccagcaatcccctgacatttggagccggcaccaagctggaactgaagagactcgaggacctgaagaacgtgttcccacctgaggtggccgtgttcgagcctagcgaggccgagatcagccacacccagaaagccaccctcgtgtgcctggctaccggcttctaccccgaccatgtggaactgtcttggtgggtcaacggcaaagaggtgcacagcggcgtgtctaccgacccccagccactgaaagaacagcccgccctgaacgacagccggtactgcctgagcagcagactgagagtgtccgccaccttctggcagaacccccggaaccacttcagatgccaggtgcagttctacggcctgagcgagaacgacgagtggacccaggacagagccaagcccgtgacccagatcgtgtctgccgaagcctggggcagagccgattgcgacgtgaagctggtggaaaagagcttcgagacagacaccaacctgaacttccagaacctgagcgtgatcggcttcagaatcctgctgctgaaagtggccggctttaacctgctgatgaccctgcggctgtggtccagcagggccaagcgatctggatctggagcaacaaacttctcactactcaaacaagcaggtgacgtggaggagaatcccgggcctactagtatggactggatttggcgcatccttttccttgtcggcgctgctaccggcgcgcattccttcgaacaagttcagctgcaacagagcggccctgagctggttaagcctggcgcttctgtgcggatctcttgcaaggccagcggctacaccttcaccagctactacatccactgggtcaagcagcggcctggacagggactcgaatggatcggctggatctaccccggcaacctgaacaccaagtacaacgagaagttcaagggcaaagccacactgaccgccgacaagagcagcagcacagcctacatgcagctgagcagcctgacaagcgaggacagcgccgtgtacttctgcgccagatacgactggtacttcgacgtgtggggagccggaaccaccgtgacagtttcttctacgcgtatccagaaccctgatcctgccgtgtaccagctgcgggatagcaagagcagcgacaagagcgtgtgtctgttcaccgacttcgacagccagaccaacgtgtcccagagcaaggactccgacgtgtacatcaccgataagaccgtgctggacatgcggagcatggacttcaagagcaactccgccgtggcctggtccaacaagtccgatttcgcctgcgccaacgccttcaacaacagcattatccccgaggacacattcttcccaagccccgagagcagctgcggctttaccagcgagagctaccagcagggcgtgctgagcgccaccatcctgtacgagatcctgctgggcaaggccaccctgtacgccgtgctggtgtctgccctggtgctgatggctatggtcaagcggaaggacagccgggga

SEQ ID NO: 38986 - DNA, 1848 bp, synthetic construct
  source 1..1848: mol_type = other DNA
atggccttaccagtgaccgccttgctcctgccgctggccttgctgctccacgccgccaggccgcagatcgtgctgacacagagccctgccatcatgtccgcttctcccggcgagaaagtgaccatgacatgtagcgccagcagcagcgtgtccttcatgcactggtatcagcagaagtccggcacaagccccaagcggtggatctacgataccagcacactggcctctggcgtgccagccagatttggcggatctggcagcggcacatcttacagcctgaccatcagcagcatggaagccgaagatgccgccacctactactgccagcagtggtccagcaatcccctgacatttggagccggcaccaagctggaactgaagagactcgaggacctgaagaacgtgttcccacctgaggtggccgtgttcgagcctagcgaggccgagatcagccacacccagaaagccaccctcgtgtgcctggctaccggcttctaccccgaccatgtggaactgtcttggtgggtcaacggcaaagaggtgcacagcggcgtgtctaccgacccccagccactgaaagaacagcccgccctgaacgacagccggtactgcctgagcagcagactgagagtgtccgccaccttctggcagaacccccggaaccacttcagatgccaggtgcagttctacggcctgagcgagaacgacgagtggacccaggacagagccaagcccgtgacccagatcgtgtctgccgaagcctggggcagagccgattgcggctttaccagcgagagctaccagcagggcgtgctgagcgccaccaacctgagcgtgatcggcttcagaatcctgctgctgaaagtggccggctttaacctgctgatgaccctgcggctgtggtccagcagggccaagcgatctggatctggagcaacaaacttctcactactcaaacaagcaggtgacgtggaggagaatcccgggcctactagtatggactggatttggcgcatccttttccttgtcggcgctgctaccggcgcgcattccttcgaacaagttcagctgcaacagagcggccctgagctggttaagcctggcgcttctgtgcggatctcttgcaaggccagcggctacaccttcaccagctactacatccactgggtcaagcagcggcctggacagggactcgaatggatcggctggatctaccccggcaacctgaacaccaagtacaacgagaagttcaagggcaaagccacactgaccgccgacaagagcagcagcacagcctacatgcagctgagcagcctgacaagcgaggacagcgccgtgtacttctgcgccagatacgactggtacttcgacgtgtggggagccggaaccaccgtgacagtttcttctacgcgtatccagaaccctgatcctgccgtgtaccagctgcgggatagcaagagcagcgacaagagcgtgtgtctgttcaccgacttcgacagccagaccaacgtgtcccagagcaaggactccgacgtgtacatcaccgataagaccgtgctggacatgcggagcatggacttcaagagcaactccgccgtggcctggtccaacaagtccgatttcgcctgcgccaacgccttcaacaacagcattatccccgaggacacattcttcccaagccccgagagcagctgcgacgtgaagctggtggaaaagagcttcgagacagacaccaacctgaacttccagatcctgtacgagatcctgctgggcaaggccaccctgtacgccgtgctggtgtctgccctggtgctgatggctatggtcaagcggaaggacagccgggga

SEQ ID NO: 38987 - DNA, 2160 bp, synthetic construct
  source 1..2160: mol_type = other DNA
atggccttaccagtgaccgccttgctcctgccgctggccttgctgctccacgccgccaggccgcagatcgtgctgacacagagccctgccatcatgtccgcttctcccggcgagaaagtgaccatgacatgtagcgccagcagcagcgtgtccttcatgcactggtatcagcagaagtccggcacaagccccaagcggtggatctacgataccagcacactggcctctggcgtgccagccagatttggcggatctggcagcggcacatcttacagcctgaccatcagcagcatggaagccgaagatgccgccacctactactgccagcagtggtccagcaatcccctgacatttggagccggcaccaagctggaactgaagagactcgaggacctgaagaacgtgttcccacctgaggtggccgtgttcgagcctagcgaggccgagatcagccacacccagaaagccaccctcgtgtgcctggctaccggcttctaccccgaccatgtggaactgtcttggtgggtcaacggcaaagaggtgcacagcggcgtgtctaccgacccccagccactgaaagaacagcccgccctgaacgacagccggtactgcctgagcagcagactgagagtgtccgccaccttctggcagaacccccggaaccacttcagatgccaggtgcagttctacggcctgagcgagaacgacgagtggacccaggacagagccaagcccgtgacccagatcgtgtctgccgaagcctggggcagagccgatgatgtgattaagatccactggcaggaaaagaagtccaacaccatcctgggcagccaggaaggcaacaccatgaagaccaacgacacctacatgaagttcagctggctgaccgtgcccgagaagtccctggacaaagaacacagatgcatcgtgcggcacgaaaacaacaagaacggcgtggaccaggaaatcatcttcccacccatcaagaccgatgtgattacaatggaccccaaggacaactgctccaaggacgccaacgataccctgctgctccagctgaccaacaccagcgcctactacatgtacttgttgctgctgctgaagtccgtggtgtacttcgccatcatcacatgctgcctgctgatggctatggtcaagcggaaggacagccggggaagggccaagcgatctggatctggagcaacaaacttctcactactcaaacaagcaggtgacgtggaggagaatcccgggcctactagtatggactggatttggcgcatccttttccttgtcggcgctgctaccggcgcgcattccttcgaacaagttcagctgcaacagagcggccctgagctggttaagcctggcgcttctgtgcggatctcttgcaaggccagcggctacaccttcaccagctactacatccactgggtcaagcagcggcctggacagggactcgaatggatcggctggatctaccccggcaacctgaacaccaagtacaacgagaagttcaagggcaaagccacactgaccgccgacaagagcagcagcacagcctacatgcagctgagcagcctgacaagcgaggacagcgccgtgtacttctgcgccagatacgactggtacttcgacgtgtggggagccggaaccaccgtgacagtttcttctacgcgtatccagaaccctgatcctgccgtgtaccagctgcgggatagcaagagcagcgacaagagcgtgtgtctgttcaccgacttcgacagccagaccaacgtgtcccagagcaaggactccgacgtgtacatcaccgataagaccgtgctggacatgcggagcatggacttcaagagcaactccgccgtggcctggtccaacaagtccgatttcgcctgcgccaacgccttcaacaacagcattatccccgaggacacattcttcccaagccccgagagcagcgactccaccgaccacgtgaagcccaaagagacagagaacaccaagcagcccagcaagagctgccacaagcccaaggccatcgtgcacaccgagaaagtgaacatgatgagcctgaccgtgctgggcctgcggatgctgttcgccaaaaccgtggccgtgaacttcctgctgaccgccaagctgttcttcctcctcaccgcc

SEQ ID NO: 38988 - DNA, 2154 bp, synthetic construct
  source 1..2154: mol_type = other DNA
atggccttaccagtgaccgccttgctcctgccgctggccttgctgctccacgccgccaggccgcagatcgtgctgacacagagccctgccatcatgtccgcttctcccggcgagaaagtgaccatgacatgtagcgccagcagcagcgtgtccttcatgcactggtatcagcagaagtccggcacaagccccaagcggtggatctacgataccagcacactggcctctggcgtgccagccagatttggcggatctggcagcggcacatcttacagcctgaccatcagcagcatggaagccgaagatgccgccacctactactgccagcagtggtccagcaatcccctgacatttggagccggcaccaagctggaactgaagagactcgaggacctgaagaacgtgttcccacctgaggtggccgtgttcgagcctagcgaggccgagatcagccacacccagaaagccaccctcgtgtgcctggctaccggcttctaccccgaccatgtggaactgtcttggtgggtcaacggcaaagaggtgcacagcggcgtgtctaccgacccccagccactgaaagaacagcccgccctgaacgacagccggtactgcctgagcagcagactgagagtgtccgccaccttctggcagaacccccggaaccacttcagatgccaggtgcagttctacggcctgagcgagaacgacgagtggacccaggacagagccaagcccgtgacccagatcgtgtctgccgaagcctggggcagagccgatgatgtgattaagatccactggcaggaaaagaagtccaacaccatcctgggcagccaggaaggcaacaccatgaagaccaacgacacctacatgaagttcagctggctgaccgtgcccgagaagtccctggacaaagaacacagatgcatcgtgcggcacgaaaacaacaagaacggcgtggaccaggaaatcatcttcccacccatcaagaccgatgtgattacaatggaccccaaggacaactgctccaaggacgccaacgataccctgctgctccagctgaccaacaccagcgcctactacatgtacttgttgctgctgctgaagtccgtggtgtacttcgccatcatcacatgctgcctgctgcggagaaccgccttctgctgcaacggcgagaagtctagggccaagcgatctggatctggagcaacaaacttctcactactcaaacaagcaggtgacgtggaggagaatcccgggcctactagtatggactggatttggcgcatccttttccttgtcggcgctgctaccggcgcgcattccttcgaacaagttcagctgcaacagagcggccctgagctggttaagcctggcgcttctgtgcggatctcttgcaaggccagcggctacaccttcaccagctactacatccactgggtcaagcagcggcctggacagggactcgaatggatcggctggatctaccccggcaacctgaacaccaagtacaacgagaagttcaagggcaaagccacactgaccgccgacaagagcagcagcacagcctacatgcagctgagcagcctgacaagcgaggacagcgccgtgtacttctgcgccagatacgactggtacttcgacgtgtggggagccggaaccaccgtgacagtttcttctacgcgtatccagaaccctgatcctgccgtgtaccagctgcgggatagcaagagcagcgacaagagcgtgtgtctgttcaccgacttcgacagccagaccaacgtgtcccagagcaaggactccgacgtgtacatcaccgataagaccgtgctggacatgcggagcatggacttcaagagcaactccgccgtggcctggtccaacaagtccgatttcgcctgcgccaacgccttcaacaacagcattatccccgaggacacattcttcccaagccccgagagcagcgactccaccgaccacgtgaagcccaaagagacagagaacaccaagcagcccagcaagagctgccacaagcccaaggccatcgtgcacaccgagaaagtgaacatgatgagcctgaccgtgctgggcctgcggatgctgttcgccaaaaccgtggccgtgaacttcctgctgaccgccaagctgttcttcctc

SEQ ID NO: 38989 - DNA, 2586 bp, synthetic construct
  source 1..2586: mol_type = other DNA
atggccttaccagtgaccgccttgctcctgccgctggccttgctgctccacgccgccaggccgctcgaggaggacctgaagaacgtgttcccacctgaggtggccgtgttcgagcctagcgaggccgagatcagccacacccagaaagccaccctcgtgtgcctggctaccggcttctaccccgaccatgtggaactgtcttggtgggtcaacggcaaagaggtgcacagcggcgtgtgtaccgacccccagccactgaaagaacagcccgccctgaacgacagccggtactgcctgagcagcagactgagagtgtccgccaccttctggcagaacccccggaaccacttcagatgccaggtgcagttctacggcctgagcgagaacgacgagtggacccaggacagagccaagcccgtgacccagatcgtgtctgccgaagcctggggcagagccgattgcggctttaccagcgagagctaccagcagggcgtgctgagcgccaccaacctgagcgtgatcggcttcagaatcctgctgctgaaagtggccggctttaacctgctgatgaccctgcggctgtggtccagcagggccaagcgatctggatctggagcaacaaacttctcactactcaaacaagcaggtgacgtggaggagaatcccgggcctactagcatggccttaccagtgaccgccttgctcctgccgctggccttgctgctccacgccgccaggccgcagatcgtgctgacacagagccctgccatcatgtccgcttctcccggcgagaaagtgaccatgacatgtagcgccagcagcagcgtgtccttcatgcactggtatcagcagaagtccggcacaagccccaagcggtggatctacgataccagcacactggcctctggcgtgccagccagatttggcggatctggcagcggcacatcttacagcctgaccatcagcagcatggaagccgaagatgccgccacctactactgccagcagtggtccagcaatcccctgacatttggagccggcaccaagctggaactgaagagaggcggaggcggaagtggaggcggaggatctggcggcggaggctctcaagttcagctgcaacagagcggccctgagctggttaagcctggcgcttctgtgcggatctcttgcaaggccagcggctacaccttcaccagctactacatccactgggtcaagcagcggcctggacagggactcgaatggatcggctggatctaccccggcaacctgaacaccaagtacaacgagaagttcaagggcaaagccacactgaccgccgacaagagcagcagcacagcctacatgcagctgagcagcctgacaagcgaggacagcgccgtgtacttctgcgccagatacgactggtacttcgacgtgtggggagccggaaccaccgtgacagtttcttctacgcgtatccagaaccctgatcctgccgtgtaccagctgcgggatagcaagagcagcgacaagagcgtgtgtctgttcaccgacttcgacagccagaccaacgtgtcccagagcaaggactccgacgtgtacatcaccgataagtgcgtgctggacatgcggagcatggacttcaagagcaactccgccgtggcctggtccaacaagtccgatttcgcctgcgccaacgccttcaacaacagcattatccccgaggacacattcttcccaagccccgagagcagctgcgacgtgaagctggtggaaaagagcttcgagacagacaccaacctgaacttccagatcctgtacgaggtgatcggcttcagaatcctgctgctgaaagtggccggctttaacctgctgatgaccctgcggctgtggtccagccgcgccaagagaagcggatctggcgtgaagcagaccctgaatttcgacctgctgaagctggctggcgacgtggaatccaacccaggcccttctagaggccatatgaccgagtacaagcccacggtgcgcctcgccacccgcgacgacgtccccagggccgtacgcaccctcgccgccgcgttcgccgactaccccgccacgcgccacaccgtcgatccggaccgccacatcgagcgggtcaccgagctgcaagaactcttcctcacgcgcgtcgggctcgacatcggcaaggtgtgggtcgcggacgacggcgccgcggtggcggtctggaccacgccggagagcgtcgaagcgggggcggtgttcgccgagatcggcccgcgcatggccgagttgagcggttcccggctggccgcgcagcaacagatggaaggcctcctggcgccgcaccggcccaaggagcccgcgtggttcctggccaccgtcggcgtctcgcccgaccaccagggcaagggtctgggcagcgccgtcgtgctccccggagtggaggcggccgagcgcgccggggtgcccgccttcctggagacctccgcgccccgcaacctccccttctacgagcggctcggcttcaccgtcaccgccgacgtcgaggtgcccgaaggaccgcgcacctggtgcatgacccgcaagcccggtgcctga

SEQ ID NO: 38990 - DNA, 2586 bp, synthetic construct
  source 1..2586: mol_type = other DNA
atggccttaccagtgaccgccttgctcctgccgctggccttgctgctccacgccgccaggccgctcgagatccagaaccctgatcctgccgtgtaccagctgcgggatagcaagagcagcgacaagagcgtgtgtctgttcaccgacttcgacagccagaccaacgtgtcccagagcaaggactccgacgtgtacatcaccgataagtgcgtgctggacatgcggagcatggacttcaagagcaactccgccgtggcctggtccaacaagtccgatttcgcctgcgccaacgccttcaacaacagcattatccccgaggacacattcttcccaagccccgagagcagctgcgacgtgaagctggtggaaaagagcttcgagacagacaccaacctgaacttccagatcctgtacgaggtgatcggcttcagaatcctgctgctgaaagtggccggctttaacctgctgatgaccctgcggctgtggtccagcagggccaagcgatctggatctggagcaacaaacttctcactactcaaacaagcaggtgacgtggaggagaatcccgggcctactagcatggccttaccagtgaccgccttgctcctgccgctggccttgctgctccacgccgccaggccgcagatcgtgctgacacagagccctgccatcatgtccgcttctcccggcgagaaagtgaccatgacatgtagcgccagcagcagcgtgtccttcatgcactggtatcagcagaagtccggcacaagccccaagcggtggatctacgataccagcacactggcctctggcgtgccagccagatttggcggatctggcagcggcacatcttacagcctgaccatcagcagcatggaagccgaagatgccgccacctactactgccagcagtggtccagcaatcccctgacatttggagccggcaccaagctggaactgaagagaggcggaggcggaagtggaggcggaggatctggcggcggaggctctcaagttcagctgcaacagagcggccctgagctggttaagcctggcgcttctgtgcggatctcttgcaaggccagcggctacaccttcaccagctactacatccactgggtcaagcagcggcctggacagggactcgaatggatcggctggatctaccccggcaacctgaacaccaagtacaacgagaagttcaagggcaaagccacactgaccgccgacaagagcagcagcacagcctacatgcagctgagcagcctgacaagcgaggacagcgccgtgtacttctgcgccagatacgactggtacttcgacgtgtggggagccggaaccaccgtgacagtttcttctacgcgtgaggacctgaagaacgtgttcccacctgaggtggccgtgttcgagcctagcgaggccgagatcagccacacccagaaagccaccctcgtgtgcctggctaccggcttctaccccgaccatgtggaactgtcttggtgggtcaacggcaaagaggtgcacagcggcgtgtgtaccgacccccagccactgaaagaacagcccgccctgaacgacagccggtactgcctgagcagcagactgagagtgtccgccaccttctggcagaacccccggaaccacttcagatgccaggtgcagttctacggcctgagcgagaacgacgagtggacccaggacagagccaagcccgtgacccagatcgtgtctgccgaagcctggggcagagccgattgcggctttaccagcgagagctaccagcagggcgtgctgagcgccaccaacctgagcgtgatcggcttcagaatcctgctgctgaaagtggccggctttaacctgctgatgaccctgcggctgtggtccagccgcgccaagagaagcggatctggcgtgaagcagaccctgaatttcgacctgctgaagctggctggcgacgtggaatccaacccaggcccttctagaggccatatgaccgagtacaagcccacggtgcgcctcgccacccgcgacgacgtccccagggccgtacgcaccctcgccgccgcgttcgccgactaccccgccacgcgccacaccgtcgatccggaccgccacatcgagcgggtcaccgagctgcaagaactcttcctcacgcgcgtcgggctcgacatcggcaaggtgtgggtcgcggacgacggcgccgcggtggcggtctggaccacgccggagagcgtcgaagcgggggcggtgttcgccgagatcggcccgcgcatggccgagttgagcggttcccggctggccgcgcagcaacagatggaaggcctcctggcgccgcaccggcccaaggagcccgcgtggttcctggccaccgtcggcgtctcgcccgaccaccagggcaagggtctgggcagcgccgtcgtgctccccggagtggaggcggccgagcgcgccggggtgcccgccttcctggagacctccgcgccccgcaacctccccttctacgagcggctcggcttcaccgtcaccgccgacgtcgaggtgcccgaaggaccgcgcacctggtgcatgacccgcaagcccggtgcctga

SEQ ID NO: 38991 - DNA, 2586 bp, synthetic construct; identical to SEQ ID NO: 38989
  source 1..2586: mol_type = other DNA

SEQ ID NO: 38992 - DNA, 2910 bp, synthetic construct
  source 1..2910: mol_type = other DNA
atggccttaccagtgaccgccttgctcctgccgctggccttgctgctccacgccgccaggccgctcgaggaggacctgaagaacgtgttcccacctgaggtggccgtgttcgagcctagcgaggccgagatcagccacacccagaaagccaccctcgtgtgcctggctaccggcttctaccccgaccatgtggaactgtcttggtgggtcaacggcaaagaggtgcacagcggcgtgtctaccgacccccagccactgaaagaacagcccgccctgaacgacagccggtactgcctgagcagcagactgagagtgtccgccaccttctggcagaacccccggaaccacttcagatgccaggtgcagttctacggcctgagcgagaacgacgagtggacccaggacagagccaagcccgtgacccagatcgtgtctgccgaagcctggggcagagccgatgatgtgattaagatccactggcaggaaaagaagtccaacaccatcctgggcagccaggaaggcaacaccatgaagaccaacgacacctacatgaagttcagctggctgaccgtgcccgagaagtccctggacaaagaacacagatgcatcgtgcggcacgaaaacaacaagaacggcgtggaccaggaaatcatcttcccacccatcaagaccgatgtgattacaatggaccccaaggacaactgctccaaggacgccaacgataccctgctgctccagctgaccaacaccagcgcctactacatgtacttgttgctgctgctgaagtccgtggtgtacttcgccatcatcacatgctgcctgctgatggctatggtcaagcggaaggacagccggggaagggccaagcgatctggatctggagcaacaaacttctcactactcaaacaagcaggtgacgtggaggagaatcccgggcctactagcatggccttaccagtgaccgccttgctcctgccgctggccttgctgctccacgccgccaggccgcagatcgtgctgacacagagccctgccatcatgtccgcttctcccggcgagaaagtgaccatgacatgtagcgccagcagcagcgtgtccttcatgcactggtatcagcagaagtccggcacaagccccaagcggtggatctacgataccagcacactggcctctggcgtgccagccagatttggcggatctggcagcggcacatcttacagcctgaccatcagcagcatggaagccgaagatgccgccacctactactgccagcagtggtccagcaatcccctgacatttggagccggcaccaagctggaactgaagagaggcggaggcggaagtggaggcggaggatctggcggcggaggctctcaagttcagctgcaacagagcggccctgagctggttaagcctggcgcttctgtgcggatctcttgcaaggccagcggctacaccttcaccagctactacatccactgggtcaagcagcggcctggacagggactcgaatggatcggctggatctaccccggcaacctgaacaccaagtacaacgagaagttcaagggcaaagccacactgaccgccgacaagagcagcagcacagcctacatgcagctgagcagcctgacaagcgaggacagcgccgtgtacttctgcgccagatacgactggtacttcgacgtgtggggagccggaaccaccgtgacagtttcttctacgcgtatccagaaccctgatcctgccgtgtaccagctgcgggatagcaagagcagcgacaagagcgtgtgtctgttcaccgacttcgacagccagaccaacgtgtcccagagcaaggactccgacgtgtacatcaccgataagaccgtgctggacatgcggagcatggacttcaagagcaactccgccgtggcctggtccaacaagtccgatttcgcctgcgccaacgccttcaacaacagcattatccccgaggacacattcttcccaagccccgagagcagcgactccaccgaccacgtgaagcccaaagagacagagaacaccaagcagcccagcaagagctgccacaagcccaaggccatcgtgcacaccgagaaagtgaacatgatgagcctgaccgtgctgggcctgcggatgctgttcgccaaaaccgtggccgtgaacttcctgctgaccgccaagctgttcttcctcctcaccgcccgcgccaagagaagcggatctggcgtgaagcagaccctgaatttcgacctgctgaagctggctggcgacgtggaatccaacccaggcccttctagaggccatatgaccgagtacaagcccacggtgcgcctcgccacccgcgacgacgtccccagggccgtacgcaccctcgccgccgcgttcgccgactaccccgccacgcgccacaccgtcgatccggaccgccacatcgagcgggtcaccgagctgcaagaactcttcctcacgcgcgtcgggctcgacatcggcaaggtgtgggtcgcggacgacggcgccgcggtggcggtctggaccacgccggagagcgtcgaagcgggggcggtgttcgccgagatcggcccgcgcatggccgagttgagcggttcccggctggccgcgcagcaacagatggaaggcctcctggcgccgcaccggcccaaggagcccgcgtggttcctggccaccgtcggcgtctcgcccgaccaccagggcaagggtctgggcagcgccgtcgtgctccccggagtggaggcggccgagcgcgccggggtgcccgccttcctggagacctccgcgccccgcaacctccccttctacgagcggctcggcttcaccgtcaccgccgacgtcgaggtgcccgaaggaccgcgcacctggtgcatgacccgcaagcccggtgcctga

SEQ ID NO: 38993 - DNA, 2910 bp, synthetic construct
  source 1..2910: mol_type = other DNA
atggccttaccagtgaccgccttgctcctgccgctggccttgctgctccacgccgccaggccgctcgagatccagaaccctgatcctgccgtgtaccagctgcgggatagcaagagcagcgacaagagcgtgtgtctgttcaccgacttcgacagccagaccaacgtgtcccagagcaaggactccgacgtgtacatcaccgataagaccgtgctggacatgcggagcatggacttcaagagcaactccgccgtggcctggtccaacaagtccgatttcgcctgcgccaacgccttcaacaacagcattatccccgaggacacattcttcccaagccccgagagcagcgactccaccgaccacgtgaagcccaaagagacagagaacaccaagcagcccagcaagagctgccacaagcccaaggccatcgtgcacaccgagaaagtgaacatgatgagcctgaccgtgctgggcctgcggatgctgttcgccaaaaccgtggccgtgaacttcctgctgaccgccaagctgttcttcctcctcaccgccagggccaagcgatctggatctggagcaacaaacttctcactactcaaacaagcaggtgacgtggaggagaatcccgggcctactagcatggccttaccagtgaccgccttgctcctgccgctggccttgctgctccacgccgccaggccgcagatcgtgctgacacagagccctgccatcatgtccgcttctcccggcgagaaagtgaccatgacatgtagcgccagcagcagcgtgtccttcatgcactggtatcagcagaagtccggcacaagccccaagcggtggatctacgataccagcacactggcctctggcgtgccagccagatttggcggatctggcagcggcacatcttacagcctgaccatcagcagcatggaagccgaagatgccgccacctactactgccagcagtggtccagcaatcccctgacatttggagccggcaccaagctggaactgaagagaggcggaggcggaagtggaggcggaggatctggcggcggaggctctcaagttcagctgcaacagagcggccctgagctggttaagcctggcgcttctgtgcggatctcttgcaaggccagcggctacaccttcaccagctactacatccactgggtcaagcagcggcctggacagggactcgaatggatcggctggatctaccccggcaacctgaacaccaagtacaacgagaagttcaagggcaaagccacactgaccgccgacaagagcagcagcacagcctacatgcagctgagcagcctgacaagcgaggacagcgccgtgtacttctgcgccagatacgactggtacttcgacgtgtggggagccggaaccaccgtgacagtttcttctacgcgtgaggacctgaagaacgtgttcccacctgaggtggccgtgttcgagcctagcgaggccgagatcagccacacccagaaagccaccctcgtgtgcctggctaccggcttctaccccgaccatgtggaactgtcttggtgggtcaacggcaaagaggtgcacagcggcgtgtctaccgacccccagccactgaaagaacagcccgccctgaacgacagccggtactgcctgagcagcagactgagagtgtccgccaccttctggcagaacccccggaaccacttcagatgccaggtgcagttctacggcctgagcgagaacgacgagtggacccaggacagagccaagcccgtgacccagatcgtgtctgccgaagcctggggcagagccgatgatgtgattaagatccactggcaggaaaagaagtccaacaccatcctgggcagccaggaaggcaacaccatgaagaccaacgacacctacatgaagttcagctggctgaccgtgcccgagaagtccctggacaaagaacacagatgcatcgtgcggcacgaaaacaacaagaacggcgtggaccaggaaatcatcttcccacccatcaagaccgatgtgattacaatggaccccaaggacaactgctccaaggacgccaacgataccctgctgctccagctgaccaacaccagcgcctactacatgtacttgttgctgctgctgaagtccgtggtgtacttcgccatcatcacatgctgcctgctgatggctatggtcaagcggaaggacagccggggacgcgccaagagaagcggatctggcgtgaagcagaccctgaatttcgacctgctgaagctggctggcgacgtggaatccaacccaggcccttctagaggccatatgaccgagtacaagcccacggtgcgcctcgccacccgcgacgacgtccccagggccgtacgcaccctcgccgccgcgttcgccgactaccccgccacgcgccacaccgtcgatccggaccgccacatcgagcgggtcaccgagctgcaagaactcttcctcacgcgcgtcgggctcgacatcggcaaggtgtgggtcgcggacgacggcgccgcggtggcggtctggaccacgccggagagcgtcgaagcgggggcggtgttcgccgagatcggcccgcgcatggccgagttgagcggttcccggctggccgcgcagcaacagatggaaggcctcctggcgccgcaccggcccaaggagcccgcgtggttcctggccaccgtcggcgtctcgcccgaccaccagggcaagggtctgggcagcgccgtcgtgctccccggagtggaggcggccgagcgcgccggggtgcccgccttcctggagacctccgcgccccgcaacctccccttctacgagcggctcggcttcaccgtcaccgccgacgtcgaggtgcccgaaggaccgcgcacctggtgcatgacccgcaagcccggtgcctga

SEQ ID NO: 38994 - DNA, 2904 bp, synthetic construct
  source 1..2904: mol_type = other DNA
atggccttaccagtgaccgccttgctcctgccgctggccttgctgctccacgccgccaggccgctcgaggaggacctgaagaacgtgttcccacctgaggtggccgtgttcgagcctagcgaggccgagatcagccacacccagaaagccaccctcgtgtgcctggctaccggcttctaccccgaccatgtggaactgtcttggtgggtcaacggcaaagaggtgcacagcggcgtgtgtaccgacccccagccactgaaagaacagcccgccctgaacgacagccggtactgcctgagcagcagactgagagtgtccgccaccttctggcagaacccccggaaccacttcagatgccaggtgcagttctacggcctgagcgagaacgacgagtggacccaggacagagccaagcccgtgacccagatcgtgtctgccgaagcctggggcagagccgatgatgtgattaagatccactggcaggaaaagaagtccaacaccatcctgggcagccaggaaggcaacaccatgaagaccaacgacacctacatgaagttcagctggctgaccgtgcccgagaagtccctggacaaagaacacagatgcatcgtgcggcacgaaaacaacaagaacggcgtggaccaggaaatcatcttcccacccatcaagaccgatgtgattacaatggaccccaaggacaactgctccaaggacgccaacgataccctgctgctccagctgaccaacaccagcgcctactacatgtacttgttgctgctgctgaagtccgtggtgtacttcgccatcatcacatgctgcctgctgcggagaaccgccttctgctgcaacggcgagaagtctagggccaagcgatctggatctggagcaacaaacttctcactactcaaacaagcaggtgacgtggaggagaatcccgggcctactagcatggccttaccagtgaccgccttgctcctgccgctggccttgctgctccacgccgccaggccgcagatcgtgctgacacagagccctgccatcatgtccgcttctcccggcgagaaagtgaccatgacatgtagcgccagcagcagcgtgtccttcatgcactggtatcagcagaagtccggcacaagccccaagcggtggatctacgataccagcacactggcctctggcgtgccagccagatttggcggatctggcagcggcacatcttacagcctgaccatcagcagcatggaagccgaagatgccgccacctactactgccagcagtggtccagcaatcccctgacatttggagccggcaccaagctggaactgaagagaggcggaggcggaagtggaggcggaggatctggcggcggaggctctcaagttcagctgcaacagagcggccctgagctggttaagcctggcgcttctgtgcggatctcttgcaaggccagcggctacaccttcaccagctactacatccactgggtcaagcagcggcctggacagggactcgaatggatcggctggatctaccccggcaacctgaacaccaagtacaacgagaagttcaagggcaaagccacactgaccgccgacaagagcagcagcacagcctacatgcagctgagcagcctgacaagcgaggacagcgccgtgtacttctgcgccagatacgactggtacttcgacgtgtggggagccggaaccaccgtgacagtttcttctacgcgtatccagaaccctgatcctgccgtgtaccagctgcgggatagcaagagcagcgacaagagcgtgtgtctgttcaccgacttcgacagccagaccaacgtgtcccagagcaaggactccgacgtgtacatcaccgataagtgcgtgctggacatgcggagcatggacttcaagagcaactccgccgtggcctggtccaacaagtccgatttcgcctgcgccaacgccttcaacaacagcattatccccgaggacacattcttcccaagccccgagagcagcgactccaccgaccacgtgaagcccaaagagacagagaacaccaagcagcccagcaagagctgccacaagcccaaggccatcgtgcacaccgagaaagtgaacatgatgagcctgaccgtgctgggcctgcggatgctgttcgccaaaaccgtggccgtgaacttcctgctgaccgccaagctgttcttcctccgcgccaagagaagcggatctggcgtgaagcagaccctgaatttcgacctgctgaagctggctggcgacgtggaatccaacccaggcccttctagaggccatatgaccgagtacaagcccacggtgcgcctcgccacccgcgacgacgtccccagggccgtacgcaccctcgccgccgcgttcgccgactaccccgccacgcgccacaccgtcgatccggaccgccacatcgagcgggtcaccgagctgcaagaactcttcctcacgcgcgtcgggctcgacatcggcaaggtgtgggtcgcggacgacggcgccgcggtggcggtctggaccacgccggagagcgtcgaagcgggggcggtgttcgccgagatcggcccgcgcatggccgagttgagcggttcccggctggccgcgcagcaacagatggaaggcctcctggcgccgcaccggcccaaggagcccgcgtggttcctggccaccgtcggcgtctcgcccgaccaccagggcaagggtctgggcagcgccgtcgtgctccccggagtggaggcggccgagcgcgccggggtgcccgccttcctggagacctccgcgccccgcaacctccccttctacgagcggctcggcttcaccgtcaccgccgacgtcgaggtgcccgaaggaccgcgcacctggtgcatgacccgcaagcccggtgcctga

SEQ ID NO: 38995 - DNA, 2904 bp, synthetic construct
  source 1..2904: mol_type = other DNA
atggccttaccagtgaccgccttgctcctgccgctggccttgctgctccacgccgccaggccgctcgagatccagaaccctgatcctgccgtgtaccagctgcgggatagcaagagcagcgacaagagcgtgtgtctgttcaccgacttcgacagccagaccaacgtgtcccagagcaaggactccgacgtgtacatcaccgataagtgcgtgctggacatgcggagcatggacttcaagagcaactccgccgtggcctggtccaacaagtccgatttcgcctgcgccaacgccttcaacaacagcattatccccgaggacacattcttcccaagccccgagagcagcgactccaccgaccacgtgaagcccaaagagacagagaacaccaagcagcccagcaagagctgccacaagcccaaggccatcgtgcacaccgagaaagtgaacatgatgagcctgaccgtgctgggcctgcggatgctgttcgccaaaaccgtggccgtgaacttcctgctgaccgccaagctgttcttcctcagggccaagcgatctggatctggagcaacaaacttctcactactcaaacaagcaggtgacgtggaggagaatcccgggcctactagcatggccttaccagtgaccgccttgctcctgccgctggccttgctgctccacgccgccaggccgcagatcgtgctgacacagagccctgccatcatgtccgcttctcccggcgagaaagtgaccatgacatgtagcgccagcagcagcgtgtccttcatgcactggtatcagcagaagtccggcacaagccccaagcggtggatctacgataccagcacactggcctctggcgtgccagccagatttggcggatctggcagcggcacatcttacagcctgaccatcagcagcatggaagccgaagatgccgccacctactactgccagcagtggtccagcaatcccctgacatttggagccggcaccaagctggaactgaagagaggcggaggcggaagtggaggcggaggatctggcggcggaggctctcaagttcagctgcaacagagcggccctgagctggttaagcctggcgcttctgtgcggatctcttgcaaggccagcggctacaccttcaccagctactacatccactgggtcaagcagcggcctggacagggactcgaatggatcggctggatctaccccggcaacctgaacaccaagtacaacgagaagttcaagggcaaagccacactgaccgccgacaagagcagcagcacagcctacatgcagctgagcagcctgacaagcgaggacagcgccgtgtacttctgcgccagatacgactggtacttcgacgtgtggggagccggaaccaccgtgacagtttcttctacgcgtgaggacctgaagaacgtgttcccacctgaggtggccgtgttcgagcctagcgaggccgagatcagccacacccagaaagccaccctcgtgtgcctggctaccggcttctaccccgaccatgtggaactgtcttggtgggtcaacggcaaagaggtgcacagcggcgtgtgtaccgacccccagccactgaaagaacagcccgccctgaacgacagccggtactgcctgagcagcagactgagagtgtccgccaccttctggcagaacccccggaaccacttcagatgccaggtgcagttctacggcctgagcgagaacgacgagtggacccaggacagagccaagcccgtgacccagatcgtgtctgccgaagcctggggcagagccgatgatgtgattaagatccactggcaggaaaagaagtccaacaccatcctgggcagccaggaaggcaacaccatgaagaccaacgacacctacatgaagttcagctggctgaccgtgcccgagaagtccctggacaaagaacacagatgcatcgtgcggcacgaaaacaacaagaacggcgtggaccaggaaatcatcttcccacccatcaagaccgatgtgattacaatggaccccaaggacaactgctccaaggacgccaacgataccctgctgctccagctgaccaacaccagcgcctactacatgtacttgttgctgctgctgaagtccgtggtgtacttcgccatcatcacatgctgcctgctgcggagaaccgccttctgctgcaacggcgagaagtctcgcgccaagagaagcggatctggcgtgaagcagaccctgaatttcgacctgctgaagctggctggcgacgtggaatccaacccaggcccttctagaggccatatgaccgagtacaagcccacggtgcgcctcgccacccgcgacgacgtccccagggccgtacgcaccctcgccgccgcgttcgccgactaccccgccacgcgccacaccgtcgatccggaccgccacatcgagcgggtcaccgagctgcaagaactcttcctcacgcgcgtcgggctcgacatcggcaaggtgtgggtcgcggacgacggcgccgcggtggcggtctggaccacgccggagagcgtcgaagcgggggcggtgttcgccgagatcggcccgcgcatggccgagttgagcggttcccggctggccgcgcagcaacagatggaaggcctcctggcgccgcaccggcccaaggagcccgcgtggttcctggccaccgtcggcgtctcgcccgaccaccagggcaagggtctgggcagcgccgtcgtgctccccggagtggaggcggccgagcgcgccggggtgcccgccttcctggagacctccgcgccccgcaacctccccttctacgagcggctcggcttcaccgtcaccgccgacgtcgaggtgcccgaaggaccgcgcacctggtgcatgacccgcaagcccggtgcctga

SEQ ID NO: 38996 - DNA, 2904 bp, synthetic construct
  source 1..2904: mol_type = other DNA
atggccttaccagtgaccgccttgctcctgccgctggccttgctgctccacgccgccaggccgctcgaggaggacctgaagaacgtgttcccacctgaggtggccgtgttcgagcctagcgaggccgagatcagccacacccagaaagccaccctcgtgtgcctggctaccggcttctaccccgaccatgtggaactgtcttggtgggtcaacggcaaagaggtgcacagcggcgtgtctaccgacccccagccactgaaagaacagcccgccctgaacgacagccggtactgcctgagcagcagactgagagtgtccgccaccttctggcagaacccccggaaccacttcagatgccaggtgcagttctacggcctgagcgagaacgacgagtggacccaggacagagccaagcccgtgacccagatcgtgtctgccgaagcctggggcagagccgatgatgtgattaagatccactggcaggaaaagaagtccaacaccatcctgggcagccaggaaggcaacaccatgaagaccaacgacacctacatgaagttcagctggctgaccgtgcccgagaagtccctggacaaagaacacagatgcatcgtgcggcacgaaaacaacaagaacggcgtggaccaggaaatcatcttcccacccatcaagaccgatgtgattacaatggaccccaaggacaactgctccaaggacgccaacgataccctgctgctccagctgaccaacaccagcgcctactacatgtacttgttgctgctgctgaagtccgtggtgtacttcgccatcatcacatgctgcctgctgcggagaaccgccttctgctgcaacggcgagaagtctagggccaagcgatctggatctggagcaacaaacttctcactactcaaacaagcaggtgacgtggaggagaatcccgggcctactagcatggccttaccagtgaccgccttgctcctgccgctggccttgctgctccacgccgccaggccgcagatcgtgctgacacagagccctgccatcatgtccgcttctcccggcgagaaagtgaccatgacatgtagcgccagcagcagcgtgtccttcatgcactggtatcagcagaagtccggcacaagccccaagcggtggatctacgataccagcacactggcctctggcgtgccagccagatttggcggatctggcagcggcacatcttacagcctgaccatcagcagcatggaagccgaagatgccgccacctactactgccagcagtggtccagcaatcccctgacatttggagccggcaccaagctggaactgaagagaggcggaggcggaagtggaggcggaggatctggcggcggaggctctcaagttcagctgcaacagagcggccctgagctggttaagcctggcgcttctgtgcggatctcttgcaaggccagcggctacaccttcaccagctactacatccactgggtcaagcagcggcctggacagggactcgaatggatcggctggatctaccccggcaacctgaacaccaagtacaacgagaagttcaagggcaaagccacactgaccgccgacaagagcagcagcacagcctacatgcagctgagcagcctgacaagcgaggacagcgccgtgtacttctgcgccagatacgactggtacttcgacgtgtggggagccggaaccaccgtgacagtttcttctacgcgtatccagaaccctgatcctgccgtgtaccagctgcgggatagcaagagcagcgacaagagcgtgtgtctgttcaccgacttcgacagccagaccaacgtgtcccagagcaaggactccgacgtgtacatcaccgataagaccgtgctggacatgcggagcatggacttcaagagcaactccgccgtggcctggtccaacaagtccgatttcgcctgcgccaacgccttcaacaacagcattatccccgaggacacattcttcccaagccccgagagcagcgactccaccgaccacgtgaagcccaaagagacagagaacaccaagcagcccagcaagagctgccacaagcccaaggccatcgtgcacaccgagaaagtgaacatgatgagcctgaccgtgctgggcctgcggatgctgttcgccaaaaccgtggccgtgaacttcctgctgaccgccaagctgttcttcctccgcgccaagagaagcggatctggcgtgaagcagaccctgaatttcgacctgctgaagctggctggcgacgtggaatccaacccaggcccttctagaggccatatgaccgagtacaagcccacggtgcgcctcgccacccgcgacgacgtccccagggccgtacgcaccctcgccgccgcgttcgccgactaccccgccacgcgccacaccgtcgatccggaccgccacatcgagcgggtcaccgagctgcaagaactcttcctcacgcgcgtcgggctcgacatcggcaaggtgtgggtcgcggacgacggcgccgcggtggcggtctggaccacgccggagagcgtcgaagcgggggcggtgttcgccgagatcggcccgcgcatggccgagttgagcggttcccggctggccgcgcagcaacagatggaaggcctcctggcgccgcaccggcccaaggagcccgcgtggttcctggccaccgtcggcgtctcgcccgaccaccagggcaagggtctgggcagcgccgtcgtgctccccggagtggaggcggccgagcgcgccggggtgcccgccttcctggagacctccgcgccccgcaacctccccttctacgagcggctcggcttcaccgtcaccgccgacgtcgaggtgcccgaaggaccgcgcacctggtgcatgacccgcaagcccggtgcctga

SEQ ID NO: 38997 - DNA, 2904 bp, synthetic construct
  source 1..2904: mol_type = other DNA
atggccttaccagtgaccgccttgctcctgccgctggccttgctgctccacgccgccaggccgctcgagatccagaaccctgatcctgccgtgtaccagctgcgggatagcaagagcagcgacaagagcgtgtgtctgttcaccgacttcgacagccagaccaacgtgtcccagagcaaggactccgacgtgtacatcaccgataagaccgtgctggacatgcggagcatggacttcaagagcaactccgccgtggcctggtccaacaagtccgatttcgcctgcgccaacgccttcaacaacagcattatccccgaggacacattcttcccaagccccgagagcagcgactccaccgaccacgtgaagcccaaagagacagagaacaccaagcagcccagcaagagctgccacaagcccaaggccatcgtgcacaccgagaaagtgaacatgatgagcctgaccgtgctgggcctgcggatgctgttcgccaaaaccgtggccgtgaacttcctgctgaccgccaagctgttcttcctcagggccaagcgatctggatctggagcaacaaacttctcactactcaaacaagcaggtgacgtggaggagaatcccgggcctactagcatggccttaccagtgaccgccttgctcctgccgctggccttgctgctccacgccgccaggccgcagatcgtgctgacacagagccctgccatcatgtccgcttctcccggcgagaaagtgaccatgacatgtagcgccagcagcagcgtgtccttcatgcactggtatcagcagaagtccggcacaagccccaagcggtggatctacgataccagcacactggcctctggcgtgccagccagatttggcggatctggcagcggcacatcttacagcctgaccatcagcagcatggaagccgaagatgccgccacctactactgccagcagtggtccagcaatcccctgacatttggagccggcaccaagctggaactgaagagaggcggaggcggaagtggaggcggaggatctggcggcggaggctctcaagttcagctgcaacagagcggccctgagctggttaagcctggcgcttctgtgcggatctcttgcaaggccagcggctacaccttcaccagctactacatccactgggtcaagcagcggcctggacagggactcgaatggatcggctggatctaccccggcaacctgaacaccaagtacaacgagaagttcaagggcaaagccacactgaccgccgacaagagcagcagcacagcctacatgcagctgagcagcctgacaagcgaggacagcgccgtgtacttctgcgccagatacgactggtacttcgacgtgtggggagccggaaccaccgtgacagtttcttctacgcgtgaggacctgaagaacgtgttcccacctgaggtggccgtgttcgagcctagcgaggccgagatcagccacacccagaaagccaccctcgtgtgcctggctaccggcttctaccccgaccatgtggaactgtcttggtgggtcaacggcaaagaggtgcacagcggcgtgtctaccgacccccagccactgaaagaacagcccgccctgaacgacagccggtactgcctgagcagcagactgagagtgtccgccaccttctggcagaacccccggaaccacttcagatgccaggtgcagttctacggcctgagcgagaacgacgagtggacccaggacagagccaagcccgtgacccagatcgtgtctgccgaagcctggggcagagccgatgatgtgattaagatccactggcaggaaaagaagtccaacaccatcctgggcagccaggaaggcaacaccatgaagaccaacgacacctacatgaagttcagctggctgaccgtgcccgagaagtccctggacaaagaacacagatgcatcgtgcggcacgaaaacaacaagaacggcgtggaccaggaaatcatcttcccacccatcaagaccgatgtgattacaatggaccccaaggacaactgctccaaggacgccaacgataccctgctgctccagctgaccaacaccagcgcctactacatgtacttgttgctgctgctgaagtccgtggtgtacttcgccatcatcacatgctgcctgctgcggagaaccgccttctgctgcaacggcgagaagtctcgcgccaagagaagcggatctggcgtgaagcagaccctgaatttcgacctgctgaagctggctggcgacgtggaatccaacccaggcccttctagaggccatatgaccgagtacaagcccacggtgcgcctcgccacccgcgacgacgtccccagggccgtacgcaccctcgccgccgcgttcgccgactaccccgccacgcgccacaccgtcgatccggaccgccacatcgagcgggtcaccgagctgcaagaactcttcctcacgcgcgtcgggctcgacatcggcaaggtgtgggtcgcggacgacggcgccgcggtggcggtctggaccacgccggagagcgtcgaagcgggggcggtgttcgccgagatcggcccgcgcatggccgagttgagcggttcccggctggccgcgcagcaacagatggaaggcctcctggcgccgcaccggcccaaggagcccgcgtggttcctggccaccgtcggcgtctcgcccgaccaccagggcaagggtctgggcagcgccgtcgtgctccccggagtggaggcggccgagcgcgccggggtgcccgccttcctggagacctccgcgccccgcaacctccccttctacgagcggctcggcttcaccgtcaccgccgacgtcgaggtgcccgaaggaccgcgcacctggtgcatgacccgcaagcccggtgcctga

SEQ ID NO: 38998 - DNA, 2598 bp, synthetic construct
  source 1..2598: mol_type = other DNA
atggccttaccagtgaccgccttgctcctgccgctggccttgctgctccacgccgccaggccgctcgaggaggacctgaagaacgtgttcccacctgaggtggccgtgttcgagcctagcaaggccgagatcgcccacacccagaaagccaccctcgtgtgcctggctaccggcttctaccccgaccatgtggaactgtcttggtgggtcaacggcaaagaggtgcacagcggcgtgtgtaccgacccccagccactgaaagaacagcccgccctgaacgacagccggtactgcctgagcagcagactgagagtgtccgccaccttctggcagaacccccggaaccacttcagatgccaggtgcagttctacggcctgagcgagaacgacgagtggacccaggacagagccaagcccgtgacccagatcgtgtctgccgaagcctggggcagagccgattgcggcatcaccagcgccagctaccaccagggcgtgctgagcgccaccatcctgtacgagatcctgctgggcaaggccaccctgtacgccgtgctggtgtctgccctggtgctgatggctatggtcaagcggaaggacagccggggaagggccaagcgatctggatctggagcaacaaacttctcactactcaaacaagcaggtgacgtggaggagaatcccgggcctactagcatggccttaccagtgaccgccttgctcctgccgctggccttgctgctccacgccgccaggccgcagatcgtgctgacacagagccctgccatcatgtccgcttctcccggcgagaaagtgaccatgacatgtagcgccagcagcagcgtgtccttcatgcactggtatcagcagaagtccggcacaagccccaagcggtggatctacgataccagcacactggcctctggcgtgccagccagatttggcggatctggcagcggcacatcttacagcctgaccatcagcagcatggaagccgaagatgccgccacctactactgccagcagtggtccagcaatcccctgacatttggagccggcaccaagctggaactgaagagaggcggaggcggaagtggaggcggaggatctggcggcggaggctctcaagttcagctgcaacagagcggccctgagctggttaagcctggcgcttctgtgcggatctcttgcaaggccagcggctacaccttcaccagctactacatccactgggtcaagcagcggcctggacagggactcgaatggatcggctggatctaccccggcaacctgaacaccaagtacaacgagaagttcaagggcaaagccacactgaccgccgacaagagcagcagcacagcctacatgcagctgagcagcctgacaagcgaggacagcgccgtgtacttctgcgccagatacgactggtacttcgacgtgtggggagccggaaccaccgtgacagtttcttctacgcgtatccagaaccctgatcctgccgtgtaccagctgcgggatagcaagagcagcgacaagagcgtgtgtctgttcaccgacttcgacagccagaccaacgtgtcccagagcaaggactccgacgtgtacatcaccgataagtgcgtgctggacatgcggagcatggacttcaagagcaactccgccgtggcctggtccaacaagtccgatttcgcctgcgccaacgccttcaacaacagcattatccccgaggacacattcttcccaagcagcgacgtgccctgcgacgtgaagctggtggaaaagagcttcgagacagacaccaacctgaacttccagaacctgagcgtgatcggcttcagaatcctgctgctgaaagtggccggctttaacctgctgatgaccctgcggctgtggtccagccgcgccaagagaagcggatctggcgtgaagcagaccctgaatttcgacctgctgaagctggctggcgacgtggaatccaacccaggcccttctagaggccatatgaccgagtacaagcccacggtgcgcctcgccacccgcgacgacgtccccagggccgtacgcaccctcgccgccgcgttcgccgactaccccgccacgcgccacaccgtcgatccggaccgccacatcgagcgggtcaccgagctgcaagaactcttcctcacgcgcgtcgggctcgacatcggcaaggtgtgggtcgcggacgacggcgccgcggtggcggtctggaccacgccggagagcgtcgaagcgggggcggtgttcgccgagatcggcccgcgcatggccgagttgagcggttcccggctggccgcgcagcaacagatggaaggcctcctggcgccgcaccggcccaaggagcccgcgtggttcctggccaccgtcggcgtctcgcccgaccaccagggcaagggtctgggcagcgccgtcgtgctccccggagtggaggcggccgagcgcgccggggtgcccgccttcctggagacctccgcgccccgcaacctccccttctacgagcggctcggcttcaccgtcaccgccgacgtcgaggtgcccgaaggaccgcgcacctggtgcatgacccgcaagcccggtgcctga

SEQ ID NO: 38999 - DNA, 2598 bp, synthetic construct
  source 1..2598: mol_type = other DNA
atggccttaccagtgaccgccttgctcctgccgctggccttgctgctccacgccgccaggccgctcgagatccagaaccctgatcctgccgtgtaccagctgcgggatagcaagagcagcgacaagagcgtgtgtctgttcaccgacttcgacagccagaccaacgtgtcccagagcaaggactccgacgtgtacatcaccgataagtgcgtgctggacatgcggagcatggacttcaagagcaactccgccgtggcctggtccaacaagtccgatttcgcctgcgccaacgccttcaacaacagcattatccccgaggacacattcttcccaagcagcgacgtgccctgcgacgtgaagctggtggaaaagagcttcgagacagacaccaacctgaacttccagaacctgagcgtgatcggcttcagaatcctgctgctgaaagtggccggctttaacctgctgatgaccctgcggctgtggtccagcagggccaagcgatctggatctggagcaacaaacttctcactactcaaacaagcaggtgacgtggaggagaatcccgggcctactagcatggccttaccagtgaccgccttgctcctgccgctggccttgctgctccacgccgccaggccgcagatcgtgctgacacagagccctgccatcatgtccgcttctcccggcgagaaagtgaccatgacatgtagcgccagcagcagcgtgtccttcatgcactggtatcagcagaagtccggcacaagccccaagcggtggatctacgataccagcacactggcctctggcgtgccagccagatttggcggatctggcagcggcacatcttacagcctgaccatcagcagcatggaagccgaagatgccgccacctactactgccagcagtggtccagcaatcccctgacatttggagccggcaccaagctggaactgaagagaggcggaggcggaagtggaggcggaggatctggcggcggaggctctcaagttcagctgcaacagagcggccctgagctggttaagcctggcgcttctgtgcggatctcttgcaaggccagcggctacaccttcaccagctactacatccactgggtcaagcagcggcctggacagggactcgaatggatcggctggatctaccccggcaacctgaacaccaagtacaacgagaagttcaagggcaaagccacactgaccgccgacaagagcagcagcacagcctacatgcagctgagcagcctgacaagcgaggacagcgccgtgtacttctgcgccagatacgactggtacttcgacgtgtggggagccggaaccaccgtgacagtttcttctacgcgtgaggacctgaagaacgtgttcccacctgaggtggccgtgttcgagcctagcaaggccgagatcgcccacacccagaaagccaccctcgtgtgcctggctaccggcttctaccccgaccatgtggaactgtcttggtgggtcaacggcaaagaggtgcacagcggcgtgtgtaccgacccccagccactgaaagaacagcccgccctgaacgacagccggtactgcctgagcagcagactgagagtgtccgccaccttctggcagaacccccggaaccacttcagatgccaggtgcagttctacggcctgagcgagaacgacgagtggacccaggacagagccaagcccgtgacccagatcgtgtctgccgaagcctggggcagagccgattgcggcatcaccagcgccagctaccaccagggcgtgctgagcgccaccatcctgtacgagatcctgctgggcaaggccaccctgtacgccgtgctggtgtctgccctggtgctgatggctatggtcaagcggaaggacagccggggacgcgccaagagaagcggatctggcgtgaagcagaccctgaatttcgacctgctgaagctggctggcgacgtggaatccaacccaggcccttctagaggccatatgaccgagtacaagcccacggtgcgcctcgccacccgcgacgacgtccccagggccgtacgcaccctcgccgccgcgttcgccgactaccccgccacgcgccacaccgtcgatccggaccgccacatcgagcgggtcaccgagctgcaagaactcttcctcacgcgcgtcgggctcgacatcggcaaggtgtgggtcgcggacgacggcgccgcggtggcggtctggaccacgccggagagcgtcgaagcgggggcggtgttcgccgagatcggcccgcgcatggccgagttgagcggttcccggctggccgcgcagcaacagatggaaggcctcctggcgccgcaccggcccaaggagcccgcgtggttcctggccaccgtcggcgtctcgcccgaccaccagggcaagggtctgggcagcgccgtcgtgctccccggagtggaggcggccgagcgcgccggggtgcccgccttcctggagacctccgcgccccgcaacctccccttctacgagcggctcggcttcaccgtcaccgccgacgtcgaggtgcccgaaggaccgcgcacctggtgcatgacccgcaagcccggtgcctga

SEQ ID NO: 39000 - DNA, 2277 bp, synthetic construct
  source 1..2277: mol_type = other DNA
atggccttaccagtgaccgccttgctcctgccgctggccttgctgctccacgccgccaggccgctcgagcagagttttgggttgttggaccctaaattgtgctatctgttggacggaatcctgttcatttacggagtgatcctgaccgcattgttcctgcgggttaagttttccagatccgcagacgcacccgcttaccaacaagggcagaaccaactctacaatgaacttaatttggggcggagggaagagtacgacgttctggacaaaaggaggggacgagatcccgagatgggcggaaagcctcagcgaaggaagaatccgcaagaggggctttataacgaactccagaaagataaaatggcagaagcctatagtgagattgggatgaagggagaaaggaggaggggtaaaggtcacgatgggttgtaccaaggattgagcacagccactaaagatacctatgatgcgctccacatgcaggccctgccgccaagaagggccaagcgatctggatctggagcaacaaacttctcactactcaaacaagcaggtgacgtggaggagaatcccgggcctactagcatggccttaccagtgaccgccttgctcctgccgctggccttgctgctccacgccgccaggccgcagatcgtgctgacacagagccctgccatcatgtccgcttctcccggcgagaaagtgaccatgacatgtagcgccagcagcagcgtgtccttcatgcactggtatcagcagaagtccggcacaagccccaagcggtggatctacgataccagcacactggcctctggcgtgccagccagatttggcggatctggcagcggcacatcttacagcctgaccatcagcagcatggaagccgaagatgccgccacctactactgccagcagtggtccagcaatcccctgacatttggagccggcaccaagctggaactgaagagaggcggaggcggaagtggaggcggaggatctggcggcggaggctctcaagttcagctgcaacagagcggccctgagctggttaagcctggcgcttctgtgcggatctcttgcaaggccagcggctacaccttcaccagctactacatccactgggtcaagcagcggcctggacagggactcgaatggatcggctggatctaccccggcaacctgaacaccaagtacaacgagaagttcaagggcaaagccacactgaccgccgacaagagcagcagcacagcctacatgcagctgagcagcctgacaagcgaggacagcgccgtgtacttctgcgccagatacgactggtacttcgacgtgtggggagccggaaccaccgtgacagtttcttctacgcgtgagctgggagagcctcagctgtgctatatcctggacgccatcctgtttctgtacggcatcgtgctgaccctgctgtactgccggctgaagatccaagtgcggaaggccgccatcaccagctacgagaaatccgacggcgtgtacaccggcctgagcaccagaaatcaagagacatacgagacactgaagcacgaaaagcctccacaacgcgccaagagaagcggatctggcgtgaagcagaccctgaatttcgacctgctgaagctggctggcgacgtggaatccaacccaggcccttctagaggccatatgaccgagtacaagcccacggtgcgcctcgccacccgcgacgacgtccccagggccgtacgcaccctcgccgccgcgttcgccgactaccccgccacgcgccacaccgtcgatccggaccgccacatcgagcgggtcaccgagctgcaagaactcttcctcacgcgcgtcgggctcgacatcggcaaggtgtgggtcgcggacgacggcgccgcggtggcggtctggaccacgccggagagcgtcgaagcgggggcggtgttcgccgagatcggcccgcgcatggccgagttgagcggttcccggctggccgcgcagcaacagatggaaggcctcctggcgccgcaccggcccaaggagcccgcgtggttcctggccaccgtcggcgtctcgcccgaccaccagggcaagggtctgggcagcgccgtcgtgctccccggagtggaggcggccgagcgcgccggggtgcccgccttcctggagacctccgcgccccgcaacctccccttctacgagcggctcggcttcaccgtcaccgccgacgtcgaggtgcccgaaggaccgcgcacctggtgcatgacccgcaagcccggtgcctga

SEQ ID NO: 39001 - DNA, 2910 bp, synthetic construct; identical to SEQ ID NO: 38992
  source 1..2910: mol_type = other DNA

SEQ ID NO: 39002 - DNA, 2910 bp, synthetic construct; identical to SEQ ID NO: 38993
  source 1..2910: mol_type = other DNA

SEQ ID NO: 39003 - DNA, 2907 bp, synthetic construct
  source 1..2907: mol_type = other DNA
atggccttaccagtgaccgccttgctcctgccgctggccttgctgctccacgccgccaggccgctcgaggaggaggacctgaagaacgtgttcccacctgaggtggccgtgttcgagcctagcgaggccgagatcagccacacccagaaagccaccctcgtgtgcctggctaccggcttctaccccgaccatgtggaactgtcttggtgggtcaacggcaaagaggtgcacagcggcgtgtgtaccgacccccagccactgaaagaacagcccgccctgaacgacagccggtactgcctgagcagcagactgagagtgtccgccaccttctggcagaacccccggaaccacttcagatgccaggtgcagttctacggcctgagcgagaacgacgagtggacccaggacagagccaagcccgtgacccagatcgtgtctgccgaagcctggggcagagccgatgatgtgattaagatccactggcaggaaaagaagtccaacaccatcctgggcagccaggaaggcaacaccatgaagaccaacgacacctacatgaagttcagctggctgaccgtgcccgagaagtccctggacaaagaacacagatgcatcgtgcggcacgaaaacaacaagaacggcgtggaccaggaaatcatcttcccacccatcaagaccgatgtgattacaatggaccccaaggacaactgctccaaggacgccaacgataccctgctgctccagctgaccaacaccagcgcctactacatgtacttgttgctgctgctgaagtccgtggtgtacttcgccatcatcacatgctgcctgctgcggagaaccgccttctgctgcaacggcgagaagtctagggccaagcgatctggatctggagcaacaaacttctcactactcaaacaagcaggtgacgtggaggagaatcccgggcctactagcatggccttaccagtgaccgccttgctcctgccgctggccttgctgctccacgccgccaggccgcagatcgtgctgacacagagccctgccatcatgtccgcttctcccggcgagaaagtgaccatgacatgtagcgccagcagcagcgtgtccttcatgcactggtatcagcagaagtccggcacaagccccaagcggtggatctacgataccagcacactggcctctggcgtgccagccagatttggcggatctggcagcggcacatcttacagcctgaccatcagcagcatggaagccgaagatgccgccacctactactgccagcagtggtccagcaatcccctgacatttggagccggcaccaagctggaactgaagagaggcggaggcggaagtggaggcggaggatctggcggcggaggctctcaagttcagctgcaacagagcggccctgagctggttaagcctggcgcttctgtgcggatctcttgcaaggccagcggctacaccttcaccagctactacatccactgggtcaagcagcggcctggacagggactcgaatggatcggctggatctaccccggcaacctgaacaccaagtacaacgagaagttcaagggcaaagccacactgaccgccgacaagagcagcagcacagcctacatgcagctgagcagcctgacaagcgaggacagcgccgtgtacttctgcgccagatacgactggtacttcgacgtgtggggagccggaaccaccgtgacagtttcttctacgcgtatccagaaccctgatcctgccgtgtaccagctgcgggatagcaagagcagcgacaagagcgtgtgtctgttcaccgacttcgacagccagaccaacgtgtcccagagcaaggactccgacgtgtacatcaccgataagtgcgtgctggacatgcggagcatggacttcaagagcaactccgccgtggcctggtccaacaagtccgatttcgcctgcgccaacgccttcaacaacagcattatccccgaggacacattcttcccaagccccgagagcagcgactccaccgaccacgtgaagcccaaagagacagagaacaccaagcagcccagcaagagctgccacaagcccaaggccatcgtgcacaccgagaaagtgaacatgatgagcctgaccgtgctgggcctgcggatgctgttcgccaaaaccgtggccgtgaacttcctgctgaccgccaagctgttcttcctccgcgccaagagaagcggatctggcgtgaagcagaccctgaatttcgacctgctgaagctggctggcgacgtggaatccaacccaggcccttctagaggccatatgaccgagtacaagcccacggtgcgcctcgccacccgcgacgacgtccccagggccgtacgcaccctcgccgccgcgttcgccgactaccccgccacgcgccacaccgtcgatccggaccgccacatcgagcgggtcaccgagctgcaagaactcttcctcacgcgcgtcgggctcgacatcggcaaggtgtgggtcgcggacgacggcgccgcggtggcggtctggaccacgccggagagcgtcgaagcgggggcggtgttcgccgagatcggcccgcgcatggccgagttgagcggttcccggctggccgcgcagcaacagatggaaggcctcctggcgccgcaccggcccaaggagcccgcgtggttcctggccaccgtcggcgtctcgcccgaccaccagggcaagggtctgggcagcgccgtcgtgctccccggagtggaggcggccgagcgcgccggggtgcccgccttcctggagacctccgcgccccgcaacctccccttctacgagcggctcggcttcaccgtcaccgccgacgtcgaggtgcccgaaggaccgcgcacctggtgcatgacccgcaagcccggtgcctga

SEQ ID NO: 39004 - DNA, 2907 bp, synthetic construct
  source 1..2907: mol_type = other DNA
atggccttaccagtgaccgccttgctcctgccgctggccttgctgctccacgccgccaggccgctcgagatccagaaccctgatcctgccgtgtaccagctgcgggatagcaagagcagcgacaagagcgtgtgtctgttcaccgacttcgacagccagaccaacgtgtcccagagcaaggactccgacgtgtacatcaccgataagtgcgtgctggacatgcggagcatggacttcaagagcaactccgccgtggcctggtccaacaagtccgatttcgcctgcgccaacgccttcaacaacagcattatccccgaggacacattcttcccaagccccgagagcagcgactccaccgaccacgtgaagcccaaagagacagagaacaccaagcagcccagcaagagctgccacaagcccaaggccatcgtgcacaccgagaaagtgaacatgatgagcctgaccgtgctgggcctgcggatgctgttcgccaaaaccgtggccgtgaacttcctgctgaccgccaagctgttcttcctcagggccaagcgatctggatctggagcaacaaacttctcactactcaaacaagcaggtgacgtggaggagaatcccgggcctactagcatggccttaccagtgaccgccttgctcctgccgctggccttgctgctccacgccgccaggccgcagatcgtgctgacacagagccctgccatcatgtccgcttctcccggcgagaaagtgaccatgacatgtagcgccagcagcagcgtgtccttcatgcactggtatcagcagaagtccggcacaagccccaagcggtggatctacgataccagcacactggcctctggcgtgccagccagatttggcggatctggcagcggcacatcttacagcctgaccatcagcagcatggaagccgaagatgccgccacctactactgccagcagtggtccagcaatcccctgacatttggagccggcaccaagctggaactgaagagaggcggaggcggaagtggaggcggaggatctggcggcggaggctctcaagttcagctgcaacagagcggccctgagctggttaagcctggcgcttctgtgcggatctcttgcaaggccagcggctacaccttcaccagctactacatccactgggtcaagcagcggcctggacagggactcgaatggatcggctggatctaccccggcaacctgaacaccaagtacaacgagaagttcaagggcaaagccacactgaccgccgacaagagcagcagcacagcctacatgcagctgagcagcctgacaagcgaggacagcgccgtgtacttctgcgccagatacgactggtacttcgacgtgtggggagccggaaccaccgtgacagtttcttctacgcgtgaggaggacctgaagaacgtgttcccacctgaggtggccgtgttcgagcctagcgaggccgagatcagccacacccagaaagccaccctcgtgtgcctggctaccggcttctaccccgaccatgtggaactgtcttggtgggtcaacggcaaagaggtgcacagcggcgtgtgtaccgacccccagccactgaaagaacagcccgccctgaacgacagccggtactgcctgagcagcagactgagagtgtccgccaccttctggcagaacccccggaaccacttcagatgccaggtgcagttctacggcctgagcgagaacgacgagtggacccaggacagagccaagcccgtgacccagatcgtgtctgccgaagcctggggcagagccgatgatgtgattaagatccactggcaggaaaagaagtccaacaccatcctgggcagccaggaaggcaacaccatgaagaccaacgacacctacatgaagttcagctggctgaccgtgcccgagaagtccctggacaaagaacacagatgcatcgtgcggcacgaaaacaacaagaacggcgtggaccaggaaatcatcttcccacccatcaagaccgatgtgattacaatggaccccaaggacaactgctccaaggacgccaacgataccctgctgctccagctgaccaacaccagcgcctactacatgtacttgttgctgctgctgaagtccgtggtgtacttcgccatcatcacatgctgcctgctgcggagaaccgccttctgctgcaacggcgagaagtctcgcgccaagagaagcggatctggcgtgaagcagaccctgaatttcgacctgctgaagctggctggcgacgtggaatccaacccaggcccttctagaggccatatgaccgagtacaagcccacggtgcgcctcgccacccgcgacgacgtccccagggccgtacgcaccctcgccgccgcgttcgccgactaccccgccacgcgccacaccgtcgatccggaccgccacatcgagcgggtcaccgagctgcaagaactcttcctcacgcgcgtcgggctcgacatcggcaaggtgtgggtcgcggacgacggcgccgcggtggcggtctggaccacgccggagagcgtcgaagcgggggcggtgttcgccgagatcggcccgcgcatggccgagttgagcggttcccggctggccgcgcagcaacagatggaaggcctcctggcgccgcaccggcccaaggagcccgcgtggttcctggccaccgtcggcgtctcgcccgaccaccagggcaagggtctgggcagcgccgtcgtgctccccggagtggaggcggccgagcgcgccggggtgcccgccttcctggagacctccgcgccccgcaacctccccttctacgagcggctcggcttcaccgtcaccgccgacgtcgaggtgcccgaaggaccgcgcacctggtgcatgacccgcaagcccggtgcctga

SEQ ID NO: 39005 - DNA, 2598 bp, synthetic construct
  source 1..2598: mol_type = other DNA
atggccttaccagtgaccgccttgctcctgccgctggccttgctgctccacgccgccaggccgctcgaggaggacctgaagaacgtgttcccacctgaggtggccgtgttcgagcctagcgaggccgagatcagccacacccagaaagccaccctcgtgtgcctggctaccggcttctaccccgaccatgtggaactgtcttggtgggtcaacggcaaagaggtgcacagcggcgtgtctaccgacccccagccactgaaagaacagcccgccctgaacgacagccggtactgcctgagcagcagactgagagtgtccgccaccttctggcagaacccccggaaccacttcagatgccaggtgcagttctacggcctgagcgagaacgacgagtggacccaggacagagccaagcccgtgacccagatcgtgtctgccgaagcctggggcagagccgattgcggctttaccagcgagagctaccagcagggcgtgctgagcgccaccaacctgagcgtgatcggcttcagaatcctgctgctgaaagtggccggctttaacctgctgatgaccctgcggctgtggtccagcagggccaagcgatctggatctggagcaacaaacttctcactactcaaacaagcaggtgacgtggaggagaatcccgggcctactagcatggccttaccagtgaccgccttgctcctgccgctggccttgctgctccacgccgccaggccgcagatcgtgctgacacagagccctgccatcatgtccgcttctcccggcgagaaagtgaccatgacatgtagcgccagcagcagcgtgtccttcatgcactggtatcagcagaagtccggcacaagccccaagcggtggatctacgataccagcacactggcctctggcgtgccagccagatttggcggatctggcagcggcacatcttacagcctgaccatcagcagcatggaagccgaagatgccgccacctactactgccagcagtggtccagcaatcccctgacatttggagccggcaccaagctggaactgaagagaggcggaggcggaagtggaggcggaggatctggcggcggaggctctcaagttcagctgcaacagagcggccctgagctggttaagcctggcgcttctgtgcggatctcttgcaaggccagcggctacaccttcaccagctactacatccactgggtcaagcagcggcctggacagggactcgaatggatcggctggatctaccccggcaacctgaacaccaagtacaacgagaagttcaagggcaaagccacactgaccgccgacaagagcagcagcacagcctacatgcagctgagcagcctgacaagcgaggacagcgccgtgtacttctgcgccagatacgactggtacttcgacgtgtggggagccggaaccaccgtgacagtttcttctacgcgtatccagaaccctgatcctgccgtgtaccagctgcgggatagcaagagcagcgacaagagcgtgtgtctgttcaccgacttcgacagccagaccaacgtgtcccagagcaaggactccgacgtgtacatcaccgataagaccgtgctggacatgcggagcatggacttcaagagcaactccgccgtggcctggtccaacaagtccgatttcgcctgcgccaacgccttcaacaacagcattatccccgaggacacattcttcccaagccccgagagcagctgcgacgtgaagctggtggaaaagagcttcgagacagacaccaacctgaacttccagatcctgtacgagatcctgctgggcaaggccaccctgtacgccgtgctggtgtctgccctggtgctgatggctatggtcaagcggaaggacagccggggacgcgccaagagaagcggatctggcgtgaagcagaccctgaatttcgacctgctgaagctggctggcgacgtggaatccaacccaggcccttctagaggccatatgaccgagtacaagcccacggtgcgcctcgccacccgcgacgacgtccccagggccgtacgcaccctcgccgccgcgttcgccgactaccccgccacgcgccacaccgtcgatccggaccgccacatcgagcgggtcaccgagctgcaagaactcttcctcacgcgcgtcgggctcgacatcggcaaggtgtgggtcgcggacgacggcgccgcggtggcggtctggaccacgccggagagcgtcgaagcgggggcggtgttcgccgagatcggcccgcgcatggccgagttgagcggttcccggctggccgcgcagcaacagatggaaggcctcctggcgccgcaccggcccaaggagcccgcgtggttcctggccaccgtcggcgtctcgcccgaccaccagggcaagggtctgggcagcgccgtcgtgctccccggagtggaggcggccgagcgcgccggggtgcccgccttcctggagacctccgcgccccgcaacctccccttctacgagcggctcggcttcaccgtcaccgccgacgtcgaggtgcccgaaggaccgcgcacctggtgcatgacccgcaagcccggtgcctga

SEQ ID NO: 39006 - DNA, 2598 bp, synthetic construct
  source 1..2598: mol_type = other DNA
atggccttaccagtgaccgccttgctcctgccgctggccttgctgctccacgccgccaggccgctcgagatccagaaccctgatcctgccgtgtaccagctgcgggatagcaagagcagcgacaagagcgtgtgtctgttcaccgacttcgacagccagaccaacgtgtcccagagcaaggactccgacgtgtacatcaccgataagaccgtgctggacatgcggagcatggacttcaagagcaactccgccgtggcctggtccaacaagtccgatttcgcctgcgccaacgccttcaacaacagcattatccccgaggacacattcttcccaagccccgagagcagctgcgacgtgaagctggtggaaaagagcttcgagacagacaccaacctgaacttccagatcctgtacgagatcctgctgggcaaggccaccctgtacgccgtgctggtgtctgccctggtgctgatggctatggtcaagcggaaggacagccggggaagggccaagcgatctggatctggagcaacaaacttctcactactcaaacaagcaggtgacgtggaggagaatcccgggcctactagcatggccttaccagtgaccgccttgctcctgccgctggccttgctgctccacgccgccaggccgcagatcgtgctgacacagagccctgccatcatgtccgcttctcccggcgagaaagtgaccatgacatgtagcgccagcagcagcgtgtccttcatgcactggtatcagcagaagtccggcacaagccccaagcggtggatctacgataccagcacactggcctctggcgtgccagccagatttggcggatctggcagcggcacatcttacagcctgaccatcagcagcatggaagccgaagatgccgccacctactactgccagcagtggtccagcaatcccctgacatttggagccggcaccaagctggaactgaagagaggcggaggcggaagtggaggcggaggatctggcggcggaggctctcaagttcagctgcaacagagcggccctgagctggttaagcctggcgcttctgtgcggatctcttgcaaggccagcggctacaccttcaccagctactacatccactgggtcaagcagcggcctggacagggactcgaatggatcggctggatctaccccggcaacctgaacaccaagtacaacgagaagttcaagggcaaagccacactgaccgccgacaagagcagcagcacagcctacatgcagctgagcagcctgacaagcgaggacagcgccgtgtacttctgcgccagatacgactggtacttcgacgtgtggggagccggaaccaccgtgacagtttcttctacgcgtgaggacctgaagaacgtgttcccacctgaggtggccgtgttcgagcctagcgaggccgagatcagccacacccagaaagccaccctcgtgtgcctggctaccggcttctaccccgaccatgtggaactgtcttggtgggtcaacggcaaagaggtgcacagcggcgtgtctaccgacccccagccactgaaagaacagcccgccctgaacgacagccggtactgcctgagcagcagactgagagtgtccgccaccttctggcagaacccccggaaccacttcagatgccaggtgcagttctacggcctgagcgagaacgacgagtggacccaggacagagccaagcccgtgacccagatcgtgtctgccgaagcctggggcagagccgattgcggctttaccagcgagagctaccagcagggcgtgctgagcgccaccaacctgagcgtgatcggcttcagaatcctgctgctgaaagtggccggctttaacctgctgatgaccctgcggctgtggtccagccgcgccaagagaagcggatctggcgtgaagcagaccctgaatttcgacctgctgaagctggctggcgacgtggaatccaacccaggcccttctagaggccatatgaccgagtacaagcccacggtgcgcctcgccacccgcgacgacgtccccagggccgtacgcaccctcgccgccgcgttcgccgactaccccgccacgcgccacaccgtcgatccggaccgccacatcgagcgggtcaccgagctgcaagaactcttcctcacgcgcgtcgggctcgacatcggcaaggtgtgggtcgcggacgacggcgccgcggtggcggtctggaccacgccggagagcgtcgaagcgggggcggtgttcgccgagatcggcccgcgcatggccgagttgagcggttcccggctggccgcgcagcaacagatggaaggcctcctggcgccgcaccggcccaaggagcccgcgtggttcctggccaccgtcggcgtctcgcccgaccaccagggcaagggtctgggcagcgccgtcgtgctccccggagtggaggcggccgagcgcgccggggtgcccgccttcctggagacctccgcgccccgcaacctccccttctacgagcggctcggcttcaccgtcaccgccgacgtcgaggtgcccgaaggaccgcgcacctggtgcatgacccgcaagcccggtgcctga

SEQ ID NO: 39007 - DNA, 2598 bp, synthetic construct
  source 1..2598: mol_type = other DNA
atggccttaccagtgaccgccttgctcctgccgctggccttgctgctccacgccgccaggccgctcgaggaggacctgaagaacgtgttcccacctgaggtggccgtgttcgagcctagcgaggccgagatcagccacacccagaaagccaccctcgtgtgcctggctaccggcttctaccccgaccatgtggaactgtcttggtgggtcaacggcaaagaggtgcacagcggcgtgtgtaccgacccccagccactgaaagaacagcccgccctgaacgacagccggtactgcctgagcagcagactgagagtgtccgccaccttctggcagaacccccggaaccacttcagatgccaggtgcagttctacggcctgagcgagaacgacgagtggacccaggacagagccaagcccgtgacccagatcgtgtctgccgaagcctggggcagagccgattgcgacgtgaagctggtggaaaagagcttcgagacagacaccaacctgaacttccagaacctgagcgtgatcggcttcagaatcctgctgctgaaagtggccggctttaacctgctgatgaccctgcggctgtggtccagcagggccaagcgatctggatctggagcaacaaacttctcactactcaaacaagcaggtgacgtggaggagaatcccgggcctactagcatggccttaccagtgaccgccttgctcctgccgctggccttgctgctccacgccgccaggccgcagatcgtgctgacacagagccctgccatcatgtccgcttctcccggcgagaaagtgaccatgacatgtagcgccagcagcagcgtgtccttcatgcactggtatcagcagaagtccggcacaagccccaagcggtggatctacgataccagcacactggcctctggcgtgccagccagatttggcggatctggcagcggcacatcttacagcctgaccatcagcagcatggaagccgaagatgccgccacctactactgccagcagtggtccagcaatcccctgacatttggagccggcaccaagctggaactgaagagaggcggaggcggaagtggaggcggaggatctggcggcggaggctctcaagttcagctgcaacagagcggccctgagctggttaagcctggcgcttctgtgcggatctcttgcaaggccagcggctacaccttcaccagctactacatccactgggtcaagcagcggcctggacagggactcgaatggatcggctggatctaccccggcaacctgaacaccaagtacaacgagaagttcaagggcaaagccacactgaccgccgacaagagcagcagcacagcctacatgcagctgagcagcctgacaagcgaggacagcgccgtgtacttctgcgccagatacgactggtacttcgacgtgtggggagccggaaccaccgtgacagtttcttctacgcgtatccagaaccctgatcctgccgtgtaccagctgcgggatagcaagagcagcgacaagagcgtgtgtctgttcaccgacttcgacagccagaccaacgtgtcccagagcaaggactccgacgtgtacatcaccgataagtgcgtgctggacatgcggagcatggacttcaagagcaactccgccgtggcctggtccaacaagtccgatttcgcctgcgccaacgccttcaacaacagcattatccccgaggacacattcttcccaagccccgagagcagctgcggctttaccagcgagagctaccagcagggcgtgctgagcgccaccatcctgtacgagatcctgctgggcaaggccaccctgtacgccgtgctggtgtctgccctggtgctgatggctatggtcaagcggaaggacagccggggacgcgccaagagaagcggatctggcgtgaagcagaccctgaatttcgacctgctgaagctggctggcgacgtggaatccaacccaggcccttctagaggccatatgaccgagtacaagcccacggtgcgcctcgccacccgcgacgacgtccccagggccgtacgcaccctcgccgccgcgttcgccgactaccccgccacgcgccacaccgtcgatccggaccgccacatcgagcgggtcaccgagctgcaagaactcttcctcacgcgcgtcgggctcgacatcggcaaggtgtgggtcgcggacgacggcgccgcggtggcggtctggaccacgccggagagcgtcgaagcgggggcggtgttcgccgagatcggcccgcgcatggccgagttgagcggttcccggctggccgcgcagcaacagatggaaggcctcctggcgccgcaccggcccaaggagcccgcgtggttcctggccaccgtcggcgtctcgcccgaccaccagggcaagggtctgggcagcgccgtcgtgctccccggagtggaggcggccgagcgcgccggggtgcccgccttcctggagacctccgcgccccgcaacctccccttctacgagcggctcggcttcaccgtcaccgccgacgtcgaggtgcccgaaggaccgcgcacctggtgcatgacccgcaagcccggtgcctga

SEQ ID NO: 39008 - DNA, 2598 bp, synthetic construct
  source 1..2598: mol_type = other DNA
atggccttaccagtgaccgccttgctcctgccgctggccttgctgctccacgccgccaggccgctcgaggaggacctgaagaacgtgttcccacctgaggtggccgtgttcgagcctagcgaggccgagatcagccacacccagaaagccaccctcgtgtgcctggctaccggcttctaccccgaccatgtggaactgtcttggtgggtcaacggcaaagaggtgcacagcggcgtgtctaccgacccccagccactgaaagaacagcccgccctgaacgacagccggtactgcctgagcagcagactgagagtgtccgccaccttctggcagaacccccggaaccacttcagatgccaggtgcagttctacggcctgagcgagaacgacgagtggacccaggacagagccaagcccgtgacccagatcgtgtctgccgaagcctggggcagagccgattgcgacgtgaagctggtggaaaagagcttcgagacagacaccaacctgaacttccagaacctgagcgtgatcggcttcagaatcctgctgctgaaagtggccggctttaacctgctgatgaccctgcggctgtggtccagcagggccaagcgatctggatctggagcaacaaacttctcactactcaaacaagcaggtgacgtggaggagaatcccgggcctactagcatggccttaccagtgaccgccttgctcctgccgctggccttgctgctccacgccgccaggccgcagatcgtgctgacacagagccctgccatcatgtccgcttctcccggcgagaaagtgaccatgacatgtagcgccagcagcagcgtgtccttcatgcactggtatcagcagaagtccggcacaagccccaagcggtggatctacgataccagcacactggcctctggcgtgccagccagatttggcggatctggcagcggcacatcttacagcctgaccatcagcagcatggaagccgaagatgccgccacctactactgccagcagtggtccagcaatcccctgacatttggagccggcaccaagctggaactgaagagaggcggaggcggaagtggaggcggaggatctggcggcggaggctctcaagttcagctgcaacagagcggccctgagctggttaagcctggcgcttctgtgcggatctcttgcaaggccagcggctacaccttcaccagctactacatccactgggtcaagcagcggcctggacagggactcgaatggatcggctggatctaccccggcaacctgaacaccaagtacaacgagaagttcaagggcaaagccacactgaccgccgacaagagcagcagcacagcctacatgcagctgagcagcctgacaagcgaggacagcgccgtgtacttctgcgccagatacgactggtacttcgacgtgtggggagccggaaccaccgtgacagtttcttctacgcgtatccagaaccctgatcctgccgtgtaccagctgcgggatagcaagagcagcgacaagagcgtgtgtctgttcaccgacttcgacagccagaccaacgtgtcccagagcaaggactccgacgtgtacatcaccgataagaccgtgctggacatgcggagcatggacttcaagagcaactccgccgtggcctggtccaacaagtccgatttcgcctgcgccaacgccttcaacaacagcattatccccgaggacacattcttcccaagccccgagagcagctgcggctttaccagcgagagctaccagcagggcgtgctgagcgccaccatcctgtacgagatcctgctgggcaaggccaccctgtacgccgtgctggtgtctgccctggtgctgatggctatggtcaagcggaaggacagccggggacgcgccaagagaagcggatctggcgtgaagcagaccctgaatttcgacctgctgaagctggctggcgacgtggaatccaacccaggcccttctagaggccatatgaccgagtacaagcccacggtgcgcctcgccacccgcgacgacgtccccagggccgtacgcaccctcgccgccgcgttcgccgactaccccgccacgcgccacaccgtcgatccggaccgccacatcgagcgggtcaccgagctgcaagaactcttcctcacgcgcgtcgggctcgacatcggcaaggtgtgggtcgcggacgacggcgccgcggtggcggtctggaccacgccggagagcgtcgaagcgggggcggtgttcgccgagatcggcccgcgcatggccgagttgagcggttcccggctggccgcgcagcaacagatggaaggcctcctggcgccgcaccggcccaaggagcccgcgtggttcctggccaccgtcggcgtctcgcccgaccaccagggcaagggtctgggcagcgccgtcgtgctccccggagtggaggcggccgagcgcgccggggtgcccgccttcctggagacctccgcgccccgcaacctccccttctacgagcggctcggcttcaccgtcaccgccgacgtcgaggtgcccgaaggaccgcgcacctggtgcatgacccgcaagcccggtgcctga

SEQ ID NO: 39009 - DNA, 2907 bp, synthetic construct
  source 1..2907: mol_type = other DNA
atggccttaccagtgaccgccttgctcctgccgctggccttgctgctccacgccgccaggccgctcgaggaggaggacctgaagaacgtgttcccacctgaggtggccgtgttcgagcctagcgaggccgagatcagccacacccagaaagccaccctcgtgtgcctggctaccggcttctaccccgaccatgtggaactgtcttggtgggtcaacggcaaagaggtgcacagcggcgtgtctaccgacccccagccactgaaagaacagcccgccctgaacgacagccggtactgcctgagcagcagactgagagtgtccgccaccttctggcagaacccccggaaccacttcagatgccaggtgcagttctacggcctgagcgagaacgacgagtggacccaggacagagccaagcccgtgacccagatcgtgtctgccgaagcctggggcagagccgatgatgtgattaagatccactggcaggaaaagaagtccaacaccatcctgggcagccaggaaggcaacaccatgaagaccaacgacacctacatgaagttcagctggctgaccgtgcccgagaagtccctggacaaagaacacagatgcatcgtgcggcacgaaaacaacaagaacggcgtggaccaggaaatcatcttcccacccatcaagaccgatgtgattacaatggaccccaaggacaactgctccaaggacgccaacgataccctgctgctccagctgaccaacaccagcgcctactacatgtacttgttgctgctgctgaagtccgtggtgtacttcgccatcatcacatgctgcctgctgcggagaaccgccttctgctgcaacggcgagaagtctagggccaagcgatctggatctggagcaacaaacttctcactactcaaacaagcaggtgacgtggaggagaatcccgggcctactagcatggccttaccagtgaccgccttgctcctgccgctggccttgctgctccacgccgccaggccgcagatcgtgctgacacagagccctgccatcatgtccgcttctcccggcgagaaagtgaccatgacatgtagcgccagcagcagcgtgtccttcatgcactggtatcagcagaagtccggcacaagccccaagcggtggatctacgataccagcacactggcctctggcgtgccagccagatttggcggatctggcagcggcacatcttacagcctgaccatcagcagcatggaagccgaagatgccgccacctactactgccagcagtggtccagcaatcccctgacatttggagccggcaccaagctggaactgaagagaggcggaggcggaagtggaggcggaggatctggcggcggaggctctcaagttcagctgcaacagagcggccctgagctggttaagcctggcgcttctgtgcggatctcttgcaaggccagcggctacaccttcaccagctactacatccactgggtcaagcagcggcctggacagggactcgaatggatcggctggatctaccccggcaacctgaacaccaagtacaacgagaagttcaagggcaaagccacactgaccgccgacaagagcagcagcacagcctacatgcagctgagcagcctgacaagcgaggacagcgccgtgtacttctgcgccagatacgactggtacttcgacgtgtggggagccggaaccaccgtgacagtttcttctacgcgtatccagaaccctgatcctgccgtgtaccagctgcgggatagcaagagcagcgacaagagcgtgtgtctgttcaccgacttcgacagccagaccaacgtgtcccagagcaaggactccgacgtgtacatcaccgataagaccgtgctggacatgcggagcatggacttcaagagcaactccgccgtggcctggtccaacaagtccgatttcgcctgcgccaacgccttcaacaacagcattatccccgaggacacattcttcccaagccccgagagcagcgactccaccgaccacgtgaagcccaaagagacagagaacaccaagcagcccagcaagagctgccacaagcccaaggccatcgtgcacaccgagaaagtgaacatgatgagcctgaccgtgctgggcctgcggatgctgttcgccaaaaccgtggccgtgaacttcctgctgaccgccaagctgttcttcctccgcgccaagagaagcggatctggcgtgaagcagaccctgaatttcgacctgctgaagctggctggcgacgtggaatccaacccaggcccttctagaggccatatgaccgagtacaagcccacggtgcgcctcgccacccgcgacgacgtccccagggccgtacgcaccctcgccgccgcgttcgccgactaccccgccacgcgccacaccgtcgatccggaccgccacatcgagcgggtcaccgagctgcaagaactcttcctcacgcgcgtcgggctcgacatcggcaaggtgtgggtcgcggacgacggcgccgcggtggcggtctggaccacgccggagagcgtcgaagcgggggcggtgttcgccgagatcggcccgcgcatggccgagttgagcggttcccggctggccgcgcagcaacagatggaaggcctcctggcgccgcaccggcccaaggagcccgcgtggttcctggccaccgtcggcgtctcgcccgaccaccagggcaagggtctgggcagcgccgtcgtgctccccggagtggaggcggccgagcgcgccggggtgcccgccttcctggagacctccgcgccccgcaacctccccttctacgagcggctcggcttcaccgtcaccgccgacgtcgaggtgcccgaaggaccgcgcacctggtgcatgacccgcaagcccggtgcctga

SEQ ID NO: 39010 - DNA, 2598 bp, synthetic construct
  source 1..2598: mol_type = other DNA
atggccttaccagtgaccgccttgctcctgccgctggccttgctgctccacgccgccaggccgctcgaggaggacctgaagaacgtgttcccacctgaggtggccgtgttcgagcctagcgaggccgagatcagccacacccagaaagccaccctcgtgtgcctggctaccggcttctaccccgaccatgtggaactgtcttggtgggtcaacggcaaagaggtgcacagcggcgtgtgtaccgacccccagccactgaaagaacagcccgccctgaacgacagccggtactgcctgagcagcagactgagagtgtccgccaccttctggcagaacccccggaaccacttcagatgccaggtgcagttctacggcctgagcgagaacgacgagtggacccaggacagagccaagcccgtgacccagatcgtgtctgccgaagcctggggcagagccgattgcggctttaccagcgagagctaccagcagggcgtgctgagcgccaccaacctgagcgtgatcggcttcagaatcctgctgctgaaagtggccggctttaacctgctgatgaccctgcggctgtggtccagcagggccaagcgatctggatctggagcaacaaacttctcactactcaaacaagcaggtgacgtggaggagaatcccgggcctactagcatggccttaccagtgaccgccttgctcctgccgctggccttgctgctccacgccgccaggccgcagatcgtgctgacacagagccctgccatcatgtccgcttctcccggcgagaaagtgaccatgacatgtagcgccagcagcagcgtgtccttcatgcactggtatcagcagaagtccggcacaagccccaagcggtggatctacgataccagcacactggcctctggcgtgccagccagatttggcggatctggcagcggcacatcttacagcctgaccatcagcagcatggaagccgaagatgccgccacctactactgccagcagtggtccagcaatcccctgacatttggagccggcaccaagctggaactgaagagaggcggaggcggaagtggaggcggaggatctggcggcggaggctctcaagttcagctgcaacagagcggccctgagctggttaagcctggcgcttctgtgcggatctcttgcaaggccagcggctacaccttcaccagctactacatccactgggtcaagcagcggcctggacagggactcgaatggatcggctggatctaccccggcaacctgaacaccaagtacaacgagaagttcaagggcaaagccacactgaccgccgacaagagcagcagcacagcctacatgcagctgagcagcctgacaagcgaggacagcgccgtgtacttctgcgccagatacgactggtacttcgacgtgtggggagccggaaccaccgtgacagtttcttctacgcgtatccagaaccctgatcctgccgtgtaccagctgcgggatagcaagagcagcgacaagagcgtgtgtctgttcaccgacttcgacagccagaccaacgtgtcccagagcaaggactccgacgtgtacatcaccgataagtgcgtgctggacatgcggagcatggacttcaagagcaactccgccgtggcctggtccaacaagtccgatttcgcctgcgccaacgccttcaacaacagcattatccccgaggacacattcttcccaagccccgagagcagctgcgacgtgaagctggtggaaaagagcttcgagacagacaccaacctgaacttccagatcctgtacgagatcctgctgggcaaggccaccctgtacgccgtgctggtgtctgccctggtgctgatggctatggtcaagcggaaggacagccggggacgcgccaagagaagcggatctggcgtgaagcagaccctgaatttcgacctgctgaagctggctggcgacgtggaatccaacccaggcccttctagaggccatatgaccgagtacaagcccacggtgcgcctcgccacccgcgacgacgtccccagggccgtacgcaccctcgccgccgcgttcgccgactaccccgccacgcgccacaccgtcgatccggaccgccacatcgagcgggtcaccgagctgcaagaactcttcctcacgcgcgtcgggctcgacatcggcaaggtgtgggtcgcggacgacggcgccgcggtggcggtctggaccacgccggagagcgtcgaagcgggggcggtgttcgccgagatcggcccgcgcatggccgagttgagcggttcccggctggccgcgcagcaacagatggaaggcctcctggcgccgcaccggcccaaggagcccgcgtggttcctggccaccgtcggcgtctcgcccgaccaccagggcaagggtctgggcagcgccgtcgtgctccccggagtggaggcggccgagcgcgccggggtgcccgccttcctggagacctccgcgccccgcaacctccccttctacgagcggctcggcttcaccgtcaccgccgacgtcgaggtgcccgaaggaccgcgcacctggtgcatgacccgcaagcccggtgcctga

SEQ ID NO: 39011 - DNA, 2685 bp, synthetic construct
  source 1..2685: mol_type = other DNA
atggccttaccagtgaccgccttgctcctgccgctggccttgctgctccacgccgccaggccgctcgaggaggaggacctgaagaacgtgttcccacctgaggtggccgtgttcgagcctagcgaggccgagatcagccacacccagaaagccaccctcgtgtgcctggctaccggcttctaccccgaccatgtggaactgtcttggtgggtcaacggcaaagaggtgcacagcggcgtgtgtaccgacccccagccactgaaagaacagcccgccctgaacgacagccggtactgcctgagcagcagactgagagtgtccgccaccttctggcagaacccccggaaccacttcagatgccaggtgcagttctacggcctgagcgagaacgacgagtggacccaggacagagccaagcccgtgacccagatcgtgtctgccgaagcctggggcagagccgattgcggctttaccagcgagagctaccagcagggcgtgctgagcgccaccaacctgagcgtgatcggcttcagaatcctgctgctgaaagtggccggctttaacctgctgatgaccctgcggctgtggtccagcagggccaagcgatctggatctggagcaacaaacttctcactactcaaacaagcaggtgacgtggaggagaatcccgggcctactagcatggccttaccagtgaccgccttgctcctgccgctggccttgctgctccacgccgccaggccgcagatcgtgctgacacagagccctgccatcatgtccgcttctcccggcgagaaagtgaccatgacatgtagcgccagcagcagcgtgtccttcatgcactggtatcagcagaagtccggcacaagccccaagcggtggatctacgataccagcacactggcctctggcgtgccagccagatttggcggatctggcagcggcacatcttacagcctgaccatcagcagcatggaagccgaagatgccgccacctactactgccagcagtggtccagcaatcccctgacatttggagccggcaccaagctggaactgaagagaggcggaggcggaagtggaggcggaggatctggcggcggaggctctcaagttcagctgcaacagagcggccctgagctggttaagcctggcgcttctgtgcggatctcttgcaaggccagcggctacaccttcaccagctactacatccactgggtcaagcagcggcctggacagggactcgaatggatcggctggatctaccccggcaacctgaacaccaagtacaacgagaagttcaagggcaaagccacactgaccgccgacaagagcagcagcacagcctacatgcagctgagcagcctgacaagcgaggacagcgccgtgtacttctgcgccagatacgactggtacttcgacgtgtggggagccggaaccaccgtgacagtttcttctacgcgtggacagcctaaggccaatcctaccgtgacactgttccctccaagcagcgaagaactccaggccaacaaggccacacttgtgtgcctgatctccgacttctaccctggggctgtgacagtggcttggaaggccgatggatctcctgtgaaagccggcgtggaaaccaccaagccatccaagcagagcaacaacaaatacgccgccagctcctacctgagcctgacacctgagcagtggaagtcccacagatcctacagctgccaagtgacccacgaaggcagcaccgtggaaaagacagtggcccctacagagtgcagccccatcaagaccgatgtgattacaatggaccccaaggacaactgctccaaggacgccaacgataccctgctgctccagctgaccaacaccagcgcctactacatgtacttgttgctgctgctgaagtccgtggtgtacttcgccatcatcacatgctgcctgctgcggagaaccgccttctgctgcaacggcgagaagtctcgcgccaagagaagcggatctggcgtgaagcagaccctgaatttcgacctgctgaagctggctggcgacgtggaatccaacccaggcccttctagaggccatatgaccgagtacaagcccacggtgcgcctcgccacccgcgacgacgtccccagggccgtacgcaccctcgccgccgcgttcgccgactaccccgccacgcgccacaccgtcgatccggaccgccacatcgagcgggtcaccgagctgcaagaactcttcctcacgcgcgtcgggctcgacatcggcaaggtgtgggtcgcggacgacggcgccgcggtggcggtctggaccacgccggagagcgtcgaagcgggggcggtgttcgccgagatcggcccgcgcatggccgagttgagcggttcccggctggccgcgcagcaacagatggaaggcctcctggcgccgcaccggcccaaggagcccgcgtggttcctggccaccgtcggcgtctcgcccgaccaccagggcaagggtctgggcagcgccgtcgtgctccccggagtggaggcggccgagcgcgccggggtgcccgccttcctggagacctccgcgccccgcaacctccccttctacgagcggctcggcttcaccgtcaccgccgacgtcgaggtgcccgaaggaccgcgcacctggtgcatgacccgcaagcccggtgcctga

SEQ ID NO: 39012 - DNA, 2685 bp, synthetic construct
  source 1..2685: mol_type = other DNA
atggccttaccagtgaccgccttgctcctgccgctggccttgctgctccacgccgccaggccgctcgagggacagcctaaggccaatcctaccgtgacactgttccctccaagcagcgaagaactccaggccaacaaggccacacttgtgtgcctgatctccgacttctaccctggggctgtgacagtggcttggaaggccgatggatctcctgtgaaagccggcgtggaaaccaccaagccatccaagcagagcaacaacaaatacgccgccagctcctacctgagcctgacacctgagcagtggaagtcccacagatcctacagctgccaagtgacccacgaaggcagcaccgtggaaaagacagtggcccctacagagtgcagccccatcaagaccgatgtgattacaatggaccccaaggacaactgctccaaggacgccaacgataccctgctgctccagctgaccaacaccagcgcctactacatgtacttgttgctgctgctgaagtccgtggtgtacttcgccatcatcacatgctgcctgctgcggagaaccgccttctgctgcaacggcgagaagtctagggccaagcgatctggatctggagcaacaaacttctcactactcaaacaagcaggtgacgtggaggagaatcccgggcctactagcatggccttaccagtgaccgccttgctcctgccgctggccttgctgctccacgccgccaggccgcagatcgtgctgacacagagccctgccatcatgtccgcttctcccggcgagaaagtgaccatgacatgtagcgccagcagcagcgtgtccttcatgcactggtatcagcagaagtccggcacaagccccaagcggtggatctacgataccagcacactggcctctggcgtgccagccagatttggcggatctggcagcggcacatcttacagcctgaccatcagcagcatggaagccgaagatgccgccacctactactgccagcagtggtccagcaatcccctgacatttggagccggcaccaagctggaactgaagagaggcggaggcggaagtggaggcggaggatctggcggcggaggctctcaagttcagctgcaacagagcggccctgagctggttaagcctggcgcttctgtgcggatctcttgcaaggccagcggctacaccttcaccagctactacatccactgggtcaagcagcggcctggacagggactcgaatggatcggctggatctaccccggcaacctgaacaccaagtacaacgagaagttcaagggcaaagccacactgaccgccgacaagagcagcagcacagcctacatgcagctgagcagcctgacaagcgaggacagcgccgtgtacttctgcgccagatacgactggtacttcgacgtgtggggagccggaaccaccgtgacagtttcttctacgcgtgaggaggacctgaagaacgtgttcccacctgaggtggccgtgttcgagcctagcgaggccgagatcagccacacccagaaagccaccctcgtgtgcctggctaccggcttctaccccgaccatgtggaactgtcttggtgggtcaacggcaaagaggtgcacagcggcgtgtgtaccgacccccagccactgaaagaacagcccgccctgaacgacagccggtactgcctgagcagcagactgagagtgtccgccaccttctggcagaacccccggaaccacttcagatgccaggtgcagttctacggcctgagcgagaacgacgagtggacccaggacagagccaagcccgtgacccagatcgtgtctgccgaagcctggggcagagccgattgcggctttaccagcgagagctaccagcagggcgtgctgagcgccaccaacctgagcgtgatcggcttcagaatcctgctgctgaaagtggccggctttaacctgctgatgaccctgcggctgtggtccagccgcgccaagagaagcggatctggcgtgaagcagaccctgaatttcgacctgctgaagctggctggcgacgtggaatccaacccaggcccttctagaggccatatgaccgagtacaagcccacggtgcgcctcgccacccgcgacgacgtccccagggccgtacgcaccctcgccgccgcgttcgccgactaccccgccacgcgccacaccgtcgatccggaccgccacatcgagcgggtcaccgagctgcaagaactcttcctcacgcgcgtcgggctcgacatcggcaaggtgtgggtcgcggacgacggcgccgcggtggcggtctggaccacgccggagagcgtcgaagcgggggcggtgttcgccgagatcggcccgcgcatggccgagttgagcggttcccggctggccgcgcagcaacagatggaaggcctcctggcgccgcaccggcccaaggagcccgcgtggttcctggccaccgtcggcgtctcgcccgaccaccagggcaagggtctgggcagcgccgtcgtgctccccggagtggaggcggccgagcgcgccggggtgcccgccttcctggagacctccgcgccccgcaacctccccttctacgagcggctcggcttcaccgtcaccgccgacgtcgaggtgcccgaaggaccgcgcacctggtgcatgacccgcaagcccggtgcctga

SEQ ID NO: 39013 - DNA, 2676 bp, synthetic construct
  source 1..2676: mol_type = other DNA
atggccttaccagtgaccgccttgctcctgccgctggccttgctgctccacgccgccaggccgctcgaggaggcctctacaaagggaccctccgtgtttcctctggctcccagcagcaagtctacaagcggaggaacagccgctctgggctgcctggtcaaggattactttcccgagcctgtgaccgtgtcctggaatagcggagcactgacaagcggcgtgcacacctttccagccgtgctgcaaagcagcggcctgtactctctgagcagcgtggtcacagtgcctagctctagcctgggcacccagacctacatctgcaatgtgaaccacaagcctagcaacaccaaggtggacaagagagtggaacccaagagctgtcccatcaagaccgatgtgattacaatggaccccaaggacaactgctccaaggacgccaacgataccctgctgctccagctgaccaacaccagcgcctactacatgtacttgttgctgctgctgaagtccgtggtgtacttcgccatcatcacatgctgcctgctgcggagaaccgccttctgctgcaacggcgagaagtctagggccaagcgatctggatctggagcaacaaacttctcactactcaaacaagcaggtgacgtggaggagaatcccgggcctactagcatggccttaccagtgaccgccttgctcctgccgctggccttgctgctccacgccgccaggccgcagatcgtgctgacacagagccctgccatcatgtccgcttctcccggcgagaaagtgaccatgacatgtagcgccagcagcagcgtgtccttcatgcactggtatcagcagaagtccggcacaagccccaagcggtggatctacgataccagcacactggcctctggcgtgccagccagatttggcggatctggcagcggcacatcttacagcctgaccatcagcagcatggaagccgaagatgccgccacctactactgccagcagtggtccagcaatcccctgacatttggagccggcaccaagctggaactgaagagaggcggaggcggaagtggaggcggaggatctggcggcggaggctctcaagttcagctgcaacagagcggccctgagctggttaagcctggcgcttctgtgcggatctcttgcaaggccagcggctacaccttcaccagctactacatccactgggtcaagcagcggcctggacagggactcgaatggatcggctggatctaccccggcaacctgaacaccaagtacaacgagaagttcaagggcaaagccacactgaccgccgacaagagcagcagcacagcctacatgcagctgagcagcctgacaagcgaggacagcgccgtgtacttctgcgccagatacgactggtacttcgacgtgtggggagccggaaccaccgtgacagtttcttctacgcgtggacagcctaaggccaatcctaccgtgacactgttccctccaagcagcgaagaactccaggccaacaaggccacacttgtgtgcctgatctccgacttctaccctggggctgtgacagtggcttggaaggccgatggatctcctgtgaaagccggcgtggaaaccaccaagccatccaagcagagcaacaacaaatacgccgccagctcctacctgagcctgacacctgagcagtggaagtcccacagatcctacagctgccaagtgacccacgaaggcagcaccgtggaaaagacagtggcccctacagagtgcagcgaagtgaaaaccgactccaccgaccacgtgaagcccaaagagacagagaacaccaagcagcccagcaagagctgccacaagcccaaggccatcgtgcacaccgagaaagtgaacatgatgagcctgaccgtgctgggcctgcggatgctgttcgccaaaaccgtggccgtgaacttcctgctgaccgccaagctgttcttcctccgcgccaagagaagcggatctggcgtgaagcagaccctgaatttcgacctgctgaagctggctggcgacgtggaatccaacccaggcccttctagaggccatatgaccgagtacaagcccacggtgcgcctcgccacccgcgacgacgtccccagggccgtacgcaccctcgccgccgcgttcgccgactaccccgccacgcgccacaccgtcgatccggaccgccacatcgagcgggtcaccgagctgcaagaactcttcctcacgcgcgtcgggctcgacatcggcaaggtgtgggtcgcggacgacggcgccgcggtggcggtctggaccacgccggagagcgtcgaagcgggggcggtgttcgccgagatcggcccgcgcatggccgagttgagcggttcccggctggccgcgcagcaacagatggaaggcctcctggcgccgcaccggcccaaggagcccgcgtggttcctggccaccgtcggcgtctcgcccgaccaccagggcaagggtctgggcagcgccgtcgtgctccccggagtggaggcggccgagcgcgccggggtgcccgccttcctggagacctccgcgccccgcaacctccccttctacgagcggctcggcttcaccgtcaccgccgacgtcgaggtgcccgaaggaccgcgcacctggtgcatgacccgcaagcccggtgcctga

SEQ ID NO: 39014 - DNA, 2610 bp, synthetic construct
  source 1..2610: mol_type = other DNA
atggccttaccagtgaccgccttgctcctgccgctggccttgctgctccacgccgccaggccgctcgaggaggcctctacaaagggaccctccgtgtttcctctggctcccagcagcaagtctacaagcggaggaacagccgctctgggctgcctggtcaaggattactttcccgagcctgtgaccgtgtcctggaatagcggagcactgacaagcggcgtgcacacctttccagccgtgctgcaaagcagcggcctgtactctctgagcagcgtggtcacagtgcctagctctagcctgggcacccagacctacatctgcaatgtgaaccacaagcctagcaacaccaaggtggacaagagagtggaacccaagagctgtggcagagccgattgcggctttaccagcgagagctaccagcagggcgtgctgagcgccaccatcctgtacgagatcctgctgggcaaggccaccctgtacgccgtgctggtgtctgccctggtgctgatggctatggtcaagcggaaggacagccggggaagggccaagcgatctggatctggagcaacaaacttctcactactcaaacaagcaggtgacgtggaggagaatcccgggcctactagcatggccttaccagtgaccgccttgctcctgccgctggccttgctgctccacgccgccaggccgcagatcgtgctgacacagagccctgccatcatgtccgcttctcccggcgagaaagtgaccatgacatgtagcgccagcagcagcgtgtccttcatgcactggtatcagcagaagtccggcacaagccccaagcggtggatctacgataccagcacactggcctctggcgtgccagccagatttggcggatctggcagcggcacatcttacagcctgaccatcagcagcatggaagccgaagatgccgccacctactactgccagcagtggtccagcaatcccctgacatttggagccggcaccaagctggaactgaagagaggcggaggcggaagtggaggcggaggatctggcggcggaggctctcaagttcagctgcaacagagcggccctgagctggttaagcctggcgcttctgtgcggatctcttgcaaggccagcggctacaccttcaccagctactacatccactgggtcaagcagcggcctggacagggactcgaatggatcggctggatctaccccggcaacctgaacaccaagtacaacgagaagttcaagggcaaagccacactgaccgccgacaagagcagcagcacagcctacatgcagctgagcagcctgacaagcgaggacagcgccgtgtacttctgcgccagatacgactggtacttcgacgtgtggggagccggaaccaccgtgacagtttcttctacgcgtggacagcctaaggccaatcctaccgtgacactgttccctccaagcagcgaagaactccaggccaacaaggccacacttgtgtgcctgatctccgacttctaccctggggctgtgacagtggcttggaaggccgatggatctcctgtgaaagccggcgtggaaaccaccaagccatccaagcagagcaacaacaaatacgccgccagctcctacctgagcctgacacctgagcagtggaagtcccacagatcctacagctgccaagtgacccacgaaggcagcaccgtggaaaagacagtggcccctacagagtgcagcatccccgaggacacattcttcccaagccccgagagcagctgcgacgtgaagctggtggaaaagagcttcgagacagacaccaacctgaacttccagaacctgagcgtgatcggcttcagaatcctgctgctgaaagtggccggctttaacctgctgatgaccctgcggctgtggtccagccgcgccaagagaagcggatctggcgtgaagcagaccctgaatttcgacctgctgaagctggctggcgacgtggaatccaacccaggcccttctagaggccatatgaccgagtacaagcccacggtgcgcctcgccacccgcgacgacgtccccagggccgtacgcaccctcgccgccgcgttcgccgactaccccgccacgcgccacaccgtcgatccggaccgccacatcgagcgggtcaccgagctgcaagaactcttcctcacgcgcgtcgggctcgacatcggcaaggtgtgggtcgcggacgacggcgccgcggtggcggtctggaccacgccggagagcgtcgaagcgggggcggtgttcgccgagatcggcccgcgcatggccgagttgagcggttcccggctggccgcgcagcaacagatggaaggcctcctggcgccgcaccggcccaaggagcccgcgtggttcctggccaccgtcggcgtctcgcccgaccaccagggcaagggtctgggcagcgccgtcgtgctccccggagtggaggcggccgagcgcgccggggtgcccgccttcctggagacctccgcgccccgcaacctccccttctacgagcggctcggcttcaccgtcaccgccgacgtcgaggtgcccgaaggaccgcgcacctggtgcatgacccgcaagcccggtgcctga

SEQ ID NO: 39015 - DNA, 2610 bp, synthetic construct
  source 1..2610: mol_type = other DNA
atggccttaccagtgaccgccttgctcctgccgctggccttgctgctccacgccgccaggccgctcgaggaggcctctacaaagggaccctccgtgtttcctctggctcccagcagcaagtctacaagcggaggaacagccgctctgggctgcctggtcaaggattactttcccgagcctgtgaccgtgtcctggaatagcggagcactgacaagcggcgtgcacacctttccagccgtgctgcaaagcagcggcctgtactctctgagcagcgtggtcacagtgcctagctctagcctgggcacccagacctacatctgcaatgtgaaccacaagcctagcaacaccaaggtggacaagagagtggaacccaagagctgtatccccgaggacacattcttcccaagccccgagagcagctgcgacgtgaagctggtggaaaagagcttcgagacagacaccaacctgaacttccagaacctgagcgtgatcggcttcagaatcctgctgctgaaagtggccggctttaacctgctgatgaccctgcggctgtggtccagcagggccaagcgatctggatctggagcaacaaacttctcactactcaaacaagcaggtgacgtggaggagaatcccgggcctactagcatggccttaccagtgaccgccttgctcctgccgctggccttgctgctccacgccgccaggccgcagatcgtgctgacacagagccctgccatcatgtccgcttctcccggcgagaaagtgaccatgacatgtagcgccagcagcagcgtgtccttcatgcactggtatcagcagaagtccggcacaagccccaagcggtggatctacgataccagcacactggcctctggcgtgccagccagatttggcggatctggcagcggcacatcttacagcctgaccatcagcagcatggaagccgaagatgccgccacctactactgccagcagtggtccagcaatcccctgacatttggagccggcaccaagctggaactgaagagaggcggaggcggaagtggaggcggaggatctggcggcggaggctctcaagttcagctgcaacagagcggccctgagctggttaagcctggcgcttctgtgcggatctcttgcaaggccagcggctacaccttcaccagctactacatccactgggtcaagcagcggcctggacagggactcgaatggatcggctggatctaccccggcaacctgaacaccaagtacaacgagaagttcaagggcaaagccacactgaccgccgacaagagcagcagcacagcctacatgcagctgagcagcctgacaagcgaggacagcgccgtgtacttctgcgccagatacgactggtacttcgacgtgtggggagccggaaccaccgtgacagtttcttctacgcgtggacagcctaaggccaatcctaccgtgacactgttccctccaagcagcgaagaactccaggccaacaaggccacacttgtgtgcctgatctccgacttctaccctggggctgtgacagtggcttggaaggccgatggatctcctgtgaaagccggcgtggaaaccaccaagccatccaagcagagcaacaacaaatacgccgccagctcctacctgagcctgacacctgagcagtggaagtcccacagatcctacagctgccaagtgacccacgaaggcagcaccgtggaaaagacagtggcccctacagagtgcagcggcagagccgattgcggctttaccagcgagagctaccagcagggcgtgctgagcgccaccatcctgtacgagatcctgctgggcaaggccaccctgtacgccgtgctggtgtctgccctggtgctgatggctatggtcaagcggaaggacagccggggacgcgccaagagaagcggatctggcgtgaagcagaccctgaatttcgacctgctgaagctggctggcgacgtggaatccaacccaggcccttctagaggccatatgaccgagtacaagcccacggtgcgcctcgccacccgcgacgacgtccccagggccgtacgcaccctcgccgccgcgttcgccgactaccccgccacgcgccacaccgtcgatccggaccgccacatcgagcgggtcaccgagctgcaagaactcttcctcacgcgcgtcgggctcgacatcggcaaggtgtgggtcgcggacgacggcgccgcggtggcggtctggaccacgccggagagcgtcgaagcgggggcggtgttcgccgagatcggcccgcgcatggccgagttgagcggttcccggctggccgcgcagcaacagatggaaggcctcctggcgccgcaccggcccaaggagcccgcgtggttcctggccaccgtcggcgtctcgcccgaccaccagggcaagggtctgggcagcgccgtcgtgctccccggagtggaggcggccgagcgcgccggggtgcccgccttcctggagacctccgcgccccgcaacctccccttctacgagcggctcggcttcaccgtcaccgccgacgtcgaggtgcccgaaggaccgcgcacctggtgcatgacccgcaagcccggtgcctga

SEQ ID NO: 39016 - DNA, 1848 bp, synthetic construct
  source 1..1848: mol_type = other DNA
atggccttaccagtgaccgccttgctcctgccgctggccttgctgctccacgccgccaggccgcagatcgtgctgacacagagccctgccatcatgtccgcttctcccggcgagaaagtgaccatgacatgtagcgccagcagcagcgtgtccttcatgcactggtatcagcagaagtccggcacaagccccaagcggtggatctacgataccagcacactggcctctggcgtgccagccagatttggcggatctggcagcggcacatcttacagcctgaccatcagcagcatggaagccgaagatgccgccacctactactgccagcagtggtccagcaatcccctgacatttggagccggcaccaagctggaactgaagagactcgaggacctgaagaacgtgttcccacctgaggtggccgtgttcgagcctagcgaggccgagatcagccacacccagaaagccaccctcgtgtgcctggctaccggcttctaccccgaccatgtggaactgtcttggtgggtcaacggcaaagaggtgcacagcggcgtgtgtaccgacccccagccactgaaagaacagcccgccctgaacgacagccggtactgcctgagcagcagactgagagtgtccgccaccttctggcagaacccccggaaccacttcagatgccaggtgcagttctacggcctgagcgagaacgacgagtggacccaggacagagccaagcccgtgacccagatcgtgtctgccgaagcctggggcagagccgatagcggctttaccagcgagagctaccagcagggcgtgctgagcgccaccatcctgtacgagatcctgctgggcaaggccaccctgtacgccgtgctggtgtctgccctggtgctgatggctatggtcaagcggaaggacagccggggaagggccaagcgatctggatctggagcaacaaacttctcactactcaaacaagcaggtgacgtggaggagaatcccgggcctactagtatggactggatttggcgcatccttttccttgtcggcgctgctaccggcgcgcattccttcgaacaagttcagctgcaacagagcggccctgagctggttaagcctggcgcttctgtgcggatctcttgcaaggccagcggctacaccttcaccagctactacatccactgggtcaagcagcggcctggacagggactcgaatggatcggctggatctaccccggcaacctgaacaccaagtacaacgagaagttcaagggcaaagccacactgaccgccgacaagagcagcagcacagcctacatgcagctgagcagcctgacaagcgaggacagcgccgtgtacttctgcgccagatacgactggtacttcgacgtgtggggagccggaaccaccgtgacagtttcttctacgcgtatccagaaccctgatcctgccgtgtaccagctgcgggatagcaagagcagcgacaagagcgtgtgtctgttcaccgacttcgacagccagaccaacgtgtcccagagcaaggactccgacgtgtacatcaccgataagtgcgtgctggacatgcggagcatggacttcaagagcaactccgccgtggcctggtccaacaagtccgatttcgcctgcgccaacgccttcaacaacagcattatccccgaggacacattcttcccaagccccgagagcagcagcgacgtgaagctggtggaaaagagcttcgagacagacaccaacctgaacttccagaacctgagcgtgatcggcttcagaatcctgctgctgaaagtggccggctttaacctgctgatgaccctgcggctgtggtccagc

SEQ ID NO: 39017 - DNA, 2688 bp, synthetic construct
  source 1..2688: mol_type = other DNA
atggccttaccagtgaccgccttgctcctgccgctggccttgctgctccacgccgccaggccggaggttcagctgcttgagtctggcggaggactggttcaacctggcggaagcctgagactgtcttgtgccgcctctggcagaaccttcagcatgggctggtatagacaggcccctggcaagggcctcgaatttgtgtctgccatcacatacagcggcggcagcccttactacgccgattctgtgaagggcagattcaccatcagccgggacaacagcaagaacaccgtgtacctccagatgaacagcctgagagccgaggacaccgccgtgtactactgtgccgccaatccaacctacggcagcgactggaatgccgagaattggggccagggcacactggtcacagtgtctagtggtaccggcggaggcggatctggcggcggaggtagcggtggcggaggatctgaattccagatcgtgctgacacagagccctgccatcatgtccgcttctcccggcgagaaagtgaccatgacatgtagcgccagcagcagcgtgtccttcatgcactggtatcagcagaagtccggcacaagccccaagcggtggatctacgataccagcacactggcctctggcgtgccagccagatttggcggatctggcagcggcacatcttacagcctgaccatcagcagcatggaagccgaagatgccgccacctactactgccagcagtggtccagcaatcccctgacatttggagccggcaccaagctggaactgaagagactcgagatccagaaccctgatcctgccgtgtaccagctgcgggatagcaagagcagcgacaagagcgtgtgtctgttcaccgacttcgacagccagaccaacgtgtcccagagcaaggactccgacgtgtacatcaccgataagtgcgtgctggacatgcggagcatggacttcaagagcaactccgccgtggcctggtccaacaagtccgatttcgcctgcgccaacgccttcaacaacagcattatccccgaggacacattcttcccaagcagcgacgtgccctgcgacgtgaagctggtggaaaagagcttcgagacagacaccaacctgaacttccagaacctgagcgtgatcggcttcagaatcctgctgctgaaagtggccggctttaacctgctgatgaccctgcggctgtggtccagccgcgccaagagaagcggatctggcgtgaagcagaccctgaatttcgacctgctgaagctggctggcgacgtggaatccaacccaggccctactagtaccatggactggatttggcgcatccttttccttgtcggcgctgctaccggcacccattccgggcccgaagtgcaactggttgaatccggtggcggcctggtgcaacccggcggatctctcagacttagctgtgccgcctccggcagaaccttcacaatgggatggtacaggcaggctccagggaaagagagagagttcgtcgccgccatctctctgtctcccacactggcctactacgccgactctgtgaaaggccggttcaccatctccagagataatagcaagaacaccgtggtgctgcaaatgaactctctgagagccgaggatacagccctgtactattgtgccgctgaccggaagtccgtgatgagcatcagacccgattactggggacagggcacactggtcacagtgtctagtggatccggcggcggaggatctggcggaggcggatctgggggcggaggctctttcgaacaagttcagctgcaacagagcggccctgagctggttaagcctggcgcttctgtgcggatctcttgcaaggccagcggctacaccttcaccagctactacatccactgggtcaagcagcggcctggacagggactcgaatggatcggctggatctaccccggcaacctgaacaccaagtacaacgagaagttcaagggcaaagccacactgaccgccgacaagagcagcagcacagcctacatgcagctgagcagcctgacaagcgaggacagcgccgtgtacttctgcgccagatacgactggtacttcgacgtgtggggagccggaaccaccgtgacagtttcttctacgcgtgaggacctgaagaacgtgttcccacctgaggtggccgtgttcgagcctagcaaggccgagatcgcccacacccagaaagccaccctcgtgtgcctggctaccggcttctaccccgaccatgtggaactgtcttggtgggtcaacggcaaagaggtgcacagcggcgtgtgtaccgacccccagccactgaaagaacagcccgccctgaacgacagccggtactgcctgagcagcagactgagagtgtccgccaccttctggcagaacccccggaaccacttcagatgccaggtgcagttctacggcctgagcgagaacgacgagtggacccaggacagagccaagcccgtgacccagatcgtgtctgccgaagcctggggcagagccgattgcggcatcaccagcgccagctaccaccagggcgtgctgagcgccaccatcctgtacgagatcctgctgggcaaggccaccctgtacgccgtgctggtgtctgccctggtgctgatggctatggtcaagcggaaggacagccggggataa

SEQ ID NO: 39018 - DNA, 2688 bp, synthetic construct
  source 1..2688: mol_type = other DNA
atggccttaccagtgaccgccttgctcctgccgctggccttgctgctccacgccgccaggccggaagtgcagctggttgaatctggcggaggactggttcaggctggcggatctctgagactgtcttgtgccgccagcggcagaacctttagcatgggctggtttagacaggcccctggcaaagagagagagttcgtcgccgccatcacatactctggcggcagcccttactacgccgactctgtgaagggcagattcaccatcagccgggacaacgccaagaacaccgtgtacctccagatgaacagcctgaagcctgaggacaccgccgtgtactactgcgccgccaatccaacatacggcagcgactggaacgccgagaattggggccagggaacccaagtgacagtgtctagcggtaccggcggaggcggatctggcggcggaggtagcggtggcggaggatctgaattccagatcgtgctgacacagagccctgccatcatgtccgcttctcccggcgagaaagtgaccatgacatgtagcgccagcagcagcgtgtccttcatgcactggtatcagcagaagtccggcacaagccccaagcggtggatctacgataccagcacactggcctctggcgtgccagccagatttggcggatctggcagcggcacatcttacagcctgaccatcagcagcatggaagccgaagatgccgccacctactactgccagcagtggtccagcaatcccctgacatttggagccggcaccaagctggaactgaagagactcgagatccagaaccctgatcctgccgtgtaccagctgcgggatagcaagagcagcgacaagagcgtgtgtctgttcaccgacttcgacagccagaccaacgtgtcccagagcaaggactccgacgtgtacatcaccgataagtgcgtgctggacatgcggagcatggacttcaagagcaactccgccgtggcctggtccaacaagtccgatttcgcctgcgccaacgccttcaacaacagcattatccccgaggacacattcttcccaagcagcgacgtgccctgcgacgtgaagctggtggaaaagagcttcgagacagacaccaacctgaacttccagaacctgagcgtgatcggcttcagaatcctgctgctgaaagtggccggctttaacctgctgatgaccctgcggctgtggtccagccgcgccaagagaagcggatctggcgtgaagcagaccctgaatttcgacctgctgaagctggctggcgacgtggaatccaacccaggccctactagtaccatggactggatttggcgcatccttttccttgtcggcgctgctaccggcgcccattccgggcccgaagtgcaactggttgaatccggtggcggcctggtgcaacccggcggatctctcagacttagctgtgccgcctccggcagaaccttcacaatgggatggtacaggcaggctccagggaaagagagagagttcgtcgccgccatctctctgtctcccacactggcctactacgccgactctgtgaaaggccggttcaccatctccagagataatagcaagaacaccgtggtgctgcaaatgaactctctgagagccgaggatacagccctgtactattgtgccgctgaccggaagtccgtgatgagcatcagacccgattactggggacagggcacactggtcacagtgtctagtggatccggcggcggaggatctggcggaggcggatctgggggcggaggctctttcgaacaagttcagctgcaacagagcggccctgagctggttaagcctggcgcttctgtgcggatctcttgcaaggccagcggctacaccttcaccagctactacatccactgggtcaagcagcggcctggacagggactcgaatggatcggctggatctaccccggcaacctgaacaccaagtacaacgagaagttcaagggcaaagccacactgaccgccgacaagagcagcagcacagcctacatgcagctgagcagcctgacaagcgaggacagcgccgtgtacttctgcgccagatacgactggtacttcgacgtgtggggagccggaaccaccgtgacagtttcttctacgcgtgaggacctgaagaacgtgttcccacctgaggtggccgtgttcgagcctagcaaggccgagatcgcccacacccagaaagccaccctcgtgtgcctggctaccggcttctaccccgaccatgtggaactgtcttggtgggtcaacggcaaagaggtgcacagcggcgtgtgtaccgacccccagccactgaaagaacagcccgccctgaacgacagccggtactgcctgagcagcagactgagagtgtccgccaccttctggcagaacccccggaaccacttcagatgccaggtgcagttctacggcctgagcgagaacgacgagtggacccaggacagagccaagcccgtgacccagatcgtgtctgccgaagcctggggcagagccgattgcggcatcaccagcgccagctaccaccagggcgtgctgagcgccaccatcctgtacgagatcctgctgggcaaggccaccctgtacgccgtgctggtgtctgccctggtgctgatggctatggtcaagcggaaggacagccggggataa

SEQ ID NO: 39019 - DNA, 2679 bp, synthetic construct
  source 1..2679: mol_type = other DNA
atggccttaccagtgaccgccttgctcctgccgctggccttgctgctccacgccgccaggccggaagtgcagctggttgaatctggcggaggactggttcaggctggcggatctctgagactgtcttgtgccgccagcggcagaacctttagcatgggctggtttagacaggcccctggcaaagagagagagttcgtcgccgccatcacatactctggcggcagcccttactacgccgactctgtgaagggcagattcaccatcagccgggacaacgccaagaacaccgtgtacctccagatgaacagcctgaagcctgaggacaccgccgtgtactactgcgccgccaatccaacatacggcagcgactggaacgccgagaattggggccagggaacccaagtgacagtgtctagcggtaccggcggaggcggatctggcggcggaggtagcggtggcggaggatctgaattccagatcgtgctgacacagagccctgccatcatgtccgcttctcccggcgagaaagtgaccatgacatgtagcgccagcagcagcgtgtccttcatgcactggtatcagcagaagtccggcacaagccccaagcggtggatctacgataccagcacactggcctctggcgtgccagccagatttggcggatctggcagcggcacatcttacagcctgaccatcagcagcatggaagccgaagatgccgccacctactactgccagcagtggtccagcaatcccctgacatttggagccggcaccaagctggaactgaagagactcgaggacctgaagaacgtgttcccacctgaggtggccgtgttcgagcctagcgaggccgagatcagccacacccagaaagccaccctcgtgtgcctggctaccggcttctaccccgaccatgtggaactgtcttggtgggtcaacggcaaagaggtgcacagcggcgtgtgtaccgacccccagccactgaaagaacagcccgccctgaacgacagccggtactgcctgagcagcagactgagagtgtccgccaccttctggcagaacccccggaaccacttcagatgccaggtgcagttctacggcctgagcgagaacgacgagtggacccaggacagagccaagcccgtgacccagatcgtgtctgccgaagcctggggcagagccgattgcggctttaccagcgagagctaccagcagggcgtgctgagcgccaccatcctgtacgagatcctgctgggcaaggccaccctgtacgccgtgctggtgtctgccctggtgctgatggctatggtcaagcggaaggacagccggggaagggccaagcgatctggatctggagcaacaaacttctcactactcaaacaagcaggtgacgtggaggagaatcccgggcctactagtgccaccatggactggatttggcgcatccttttccttgtcggcgctgctaccggcgcccattccgggcccgaagtgcaactggttgaatccggtggcggcctggtgcaagcaggcggatctctcagacttagctgtgccgcctccggcagaaccttcacaatgggatggtttaggcaggctccagggaaagagagagagttcgtcgccgccatctctctgtctcccacactggcctactacgccgactctgtgaaaggccggttcaccatctccagagataatgccaagaacaccgtggtgctgcaaatgaactctctgaaacccgaggatacagccctgtactattgtgccgctgaccggaagtccgtgatgagcatcagacccgattactggggacagggcacacaagtcacagtgtcctctggatccggcggcggaggatctggcggaggcggatctgggggcggaggctctttcgaacaagttcagctgcaacagagcggccctgagctggttaagcctggcgcttctgtgcggatctcttgcaaggccagcggctacaccttcaccagctactacatccactgggtcaagcagcggcctggacagggactcgaatggatcggctggatctaccccggcaacctgaacaccaagtacaacgagaagttcaagggcaaagccacactgaccgccgacaagagcagcagcacagcctacatgcagctgagcagcctgacaagcgaggacagcgccgtgtacttctgcgccagatacgactggtacttcgacgtgtggggagccggaaccaccgtgacagtttcttctacgcgtatccagaaccctgatcctgccgtgtaccagctgcgggatagcaagagcagcgacaagagcgtgtgtctgttcaccgacttcgacagccagaccaacgtgtcccagagcaaggactccgacgtgtacatcaccgataagtgcgtgctggacatgcggagcatggacttcaagagcaactccgccgtggcctggtccaacaagtccgatttcgcctgcgccaacgccttcaacaacagcattatccccgaggacacattcttcccaagccccgagagcagctgcgacgtgaagctggtggaaaagagcttcgagacagacaccaacctgaacttccagaacctgagcgtgatcggcttcagaatcctgctgctgaaagtggccggctttaacctgctgatgaccctgcggctgtggtccagctaa

SEQ ID NO: 39020 - DNA, 2292 bp, synthetic construct
  source 1..2292: mol_type = other DNA
atggccttaccagtgaccgccttgctcctgccgctggccttgctgctccacgccgccaggccggaagtgcagctggttgaatctggcggaggactggttcagcctggcggatctctgagactgagctgtgaagccagcggcttcgccagcgacgattacatcatcggctggttcagacaggcccctggcaaagagagagagggcgtcagctgcatcagctctaagtacgccaacaccgtgtacaccgacagcgtgaagggcagattcagactgagcagaggcaccgccaagaataccgtgtacctccagatgagcgccctgaagcctgaggataccgccgtgtactactgcgctatggacagccgcagagtgacatgccctgagatcagcaccatgcaccggaacttcgattcttggggccagggcacactggtcacagtgtcatctggtaccggcggaggcggatctggcggcggaggtagcggtggcggaggatctgaattccagatcgtgctgacacagagccctgccatcatgtccgcttctcccggcgagaaagtgaccatgacatgtagcgccagcagcagcgtgtccttcatgcactggtatcagcagaagtccggcacaagccccaagcggtggatctacgataccagcacactggcctctggcgtgccagccagatttggcggatctggcagcggcacatcttacagcctgaccatcagcagcatggaagccgaagatgccgccacctactactgccagcagtggtccagcaatcccctgacatttggagccggcaccaagctggaactgaagagactcgaggacctgaagaacgtgttcccacctgaggtggccgtgttcgagcctagcaaggccgagatcgcccacacccagaaagccaccctcgtgtgcctggctaccggcttctaccccgaccatgtggaactgtcttggtgggtcaacggcaaagaggtgcacagcggcgtgtgtaccgacccccagccactgaaagaacagcccgccctgaacgacagccggtactgcctgagcagcagactgagagtgtccgccaccttctggcagaacccccggaaccacttcagatgccaggtgcagttctacggcctgagcgagaacgacgagtggacccaggacagagccaagcccgtgacccagatcgtgtctgccgaagcctggggcagagccgattgcggcatcaccagcgccagctaccaccagggcgtgctgagcgccaccatcctgtacgagatcctgctgggcaaggccaccctgtacgccgtgctggtgtctgccctggtgctgatggctatggtcaagcggaaggacagccggggaagggccaagcgatctggatctggagcaacaaacttctcactactcaaacaagcaggtgacgtggaggagaatcccgggcctactagtatggactggatttggcgcatccttttccttgtcggcgctgctaccggcgcgcattccttcgaacaagttcagctgcaacagagcggccctgagctggttaagcctggcgcttctgtgcggatctcttgcaaggccagcggctacaccttcaccagctactacatccactgggtcaagcagcggcctggacagggactcgaatggatcggctggatctaccccggcaacctgaacaccaagtacaacgagaagttcaagggcaaagccacactgaccgccgacaagagcagcagcacagcctacatgcagctgagcagcctgacaagcgaggacagcgccgtgtacttctgcgccagatacgactggtacttcgacgtgtggggagccggaaccaccgtgacagtttcttctacgcgtatccagaaccctgatcctgccgtgtaccagctgcgggatagcaagagcagcgacaagagcgtgtgtctgttcaccgacttcgacagccagaccaacgtgtcccagagcaaggactccgacgtgtacatcaccgataagtgcgtgctggacatgcggagcatggacttcaagagcaactccgccgtggcctggtccaacaagtccgatttcgcctgcgccaacgccttcaacaacagcattatccccgaggacacattcttcccaagcagcgacgtgccctgcgacgtgaagctggtggaaaagagcttcgagacagacaccaacctgaacttccagaacctgagcgtgatcggcttcagaatcctgctgctgaaagtggccggctttaacctgctgatgaccctgcggctgtggtccagctaa

SEQ ID NO: 39021 - DNA, 2265 bp, synthetic construct
  source 1..2265: mol_type = other DNA
atggccttaccagtgaccgccttgctcctgccgctggccttgctgctccacgccgccaggccgcagatcgtgctgacacagagccctgccatcatgtccgcttctcccggcgagaaagtgaccatgacatgtagcgccagcagcagcgtgtccttcatgcactggtatcagcagaagtccggcacaagccccaagcggtggatctacgataccagcacactggcctctggcgtgccagccagatttggcggatctggcagcggcacatcttacagcctgaccatcagcagcatggaagccgaagatgccgccacctactactgccagcagtggtccagcaatcccctgacatttggagccggcaccaagctggaactgaagagactcgaggacctgaagaacgtgttcccacctgaggtggccgtgttcgagcctagcgaggccgagatcagccacacccagaaagccaccctcgtgtgcctggctaccggcttctaccccgaccatgtggaactgtcttggtgggtcaacggcaaagaggtgcacagcggcgtgtgtaccgacccccagccactgaaagaacagcccgccctgaacgacagccggtactgcctgagcagcagactgagagtgtccgccaccttctggcagaacccccggaaccacttcagatgccaggtgcagttctacggcctgagcgagaacgacgagtggacccaggacagagccaagcccgtgacccagatcgtgtctgccgaagcctggggcagagccgattgcggctttaccagcgagagctaccagcagggcgtgctgagcgccaccatcctgtacgagatcctgctgggcaaggccaccctgtacgccgtgctggtgtctgccctggtgctgatggctatggtcaagcggaaggacagccggggaagggccaagcgatctggatctggagcaacaaacttctcactactcaaacaagcaggtgacgtggaggagaatcccgggcctactagtaccatggactggatttggcgcatccttttccttgtcggcgctgctaccggcgcccattccgggcccgaagtgcaactggttgaatccggtggcggcctggtgcaacccggcggatctctcagacttagctgtgccgcctccggcagaaccttcacaatgggatggtacaggcaggctccagggaaagagagagagttcgtcgccgccatctctctgtctcccacactggcctactacgccgactctgtgaaaggccggttcaccatctccagagataatagcaagaacaccgtggtgctgcaaatgaactctctgagagccgaggatacagccctgtactattgtgccgctgaccggaagtccgtgatgagcatcagacccgattactggggacagggcacactggtcacagtgtctagtggatccggcggcggaggatctggcggaggcggatctgggggcggaggctctttcgaacaagttcagctgcaacagagcggccctgagctggttaagcctggcgcttctgtgcggatctcttgcaaggccagcggctacaccttcaccagctactacatccactgggtcaagcagcggcctggacagggactcgaatggatcggctggatctaccccggcaacctgaacaccaagtacaacgagaagttcaagggcaaagccacactgaccgccgacaagagcagcagcacagcctacatgcagctgagcagcctgacaagcgaggacagcgccgtgtacttctgcgccagatacgactggtacttcgacgtgtggggagccggaaccaccgtgacagtttcttctacgcgtatccagaaccctgatcctgccgtgtaccagctgcgggatagcaagagcagcgacaagagcgtgtgtctgttcaccgacttcgacagccagaccaacgtgtcccagagcaaggactccgacgtgtacatcaccgataagtgcgtgctggacatgcggagcatggacttcaagagcaactccgccgtggcctggtccaacaagtccgatttcgcctgcgccaacgccttcaacaacagcattatccccgaggacacattcttcccaagccccgagagcagctgcgacgtgaagctggtggaaaagagcttcgagacagacaccaacctgaacttccagaacctgagcgtgatcggcttcagaatcctgctgctgaaagtggccggctttaacctgctgatgaccctgcggctgtggtccagctaa

SEQ ID NO: 39022 - DNA, 2283 bp, synthetic construct
  source 1..2283: mol_type = other DNA
atggccttaccagtgaccgccttgctcctgccgctggccttgctgctccacgccgccaggccgcagatcgtgctgacacagagccctgccatcatgtccgcttctcccggcgagaaagtgaccatgacatgtagcgccagcagcagcgtgtccttcatgcactggtatcagcagaagtccggcacaagccccaagcggtggatctacgataccagcacactggcctctggcgtgccagccagatttggcggatctggcagcggcacatcttacagcctgaccatcagcagcatggaagccgaagatgccgccacctactactgccagcagtggtccagcaatcccctgacatttggagccggcaccaagctggaactgaagagactcgaggacctgaagaacgtgttcccacctgaggtggccgtgttcgagcctagcgaggccgagatcagccacacccagaaagccaccctcgtgtgcctggctaccggcttctaccccgaccatgtggaactgtcttggtgggtcaacggcaaagaggtgcacagcggcgtgtgtaccgacccccagccactgaaagaacagcccgccctgaacgacagccggtactgcctgagcagcagactgagagtgtccgccaccttctggcagaacccccggaaccacttcagatgccaggtgcagttctacggcctgagcgagaacgacgagtggacccaggacagagccaagcccgtgacccagatcgtgtctgccgaagcctggggcagagccgattgcggctttaccagcgagagctaccagcagggcgtgctgagcgccaccatcctgtacgagatcctgctgggcaaggccaccctgtacgccgtgctggtgtctgccctggtgctgatggctatggtcaagcggaaggacagccggggaagggccaagcgatctggatctggagcaacaaacttctcactactcaaacaagcaggtgacgtggaggagaatcccgggcctactagtaccatggactggatttggcgcatccttttccttgtcggcgctgctaccggcgcccattccgggccccaggtgcagctggttgaatctggcggaggactggttcagcctggcggatctctgagactgtcttgtgccgccagcggcaacatcaacagcagaaactgcatgggctggttcagacaggcccctggcaagggaagagaaggcgtggcagctatcggccaagtgaccggcagaacctactacgtggacagcgtgaagggcagattcaccatcagcctggacaacagcaagaacaccctgtacctccagatgaacagcctgagagccgaggacaccgccgtgtactattgtgctgctgcccctggctgtctgctgtctgcacttagaagcgccgactacagaaactggggccagggcacactggtcaccgtttcttctggatccggcggcggaggatctggcggaggcggatctgggggcggaggctctttcgaacaagttcagctgcaacagagcggccctgagctggttaagcctggcgcttctgtgcggatctcttgcaaggccagcggctacaccttcaccagctactacatccactgggtcaagcagcggcctggacagggactcgaatggatcggctggatctaccccggcaacctgaacaccaagtacaacgagaagttcaagggcaaagccacactgaccgccgacaagagcagcagcacagcctacatgcagctgagcagcctgacaagcgaggacagcgccgtgtacttctgcgccagatacgactggtacttcgacgtgtggggagccggaaccaccgtgacagtttcttctacgcgtatccagaaccctgatcctgccgtgtaccagctgcgggatagcaagagcagcgacaagagcgtgtgtctgttcaccgacttcgacagccagaccaacgtgtcccagagcaaggactccgacgtgtacatcaccgataagtgcgtgctggacatgcggagcatggacttcaagagcaactccgccgtggcctggtccaacaagtccgatttcgcctgcgccaacgccttcaacaacagcattatccccgaggacacattcttcccaagccccgagagcagctgcgacgtgaagctggtggaaaagagcttcgagacagacaccaacctgaacttccagaacctgagcgtgatcggcttcagaatcctgctgctgaaagtggccggctttaacctgctgatgaccctgcggctgtggtccagc

SEQ ID NO: 39023 - DNA, 2286 bp, synthetic construct
  source 1..2286: mol_type = other DNA
atggccttaccagtgaccgccttgctcctgccgctggccttgctgctccacgccgccaggccgcagatcgtgctgacacagagccctgccatcatgtccgcttctcccggcgagaaagtgaccatgacatgtagcgccagcagcagcgtgtccttcatgcactggtatcagcagaagtccggcacaagccccaagcggtggatctacgataccagcacactggcctctggcgtgccagccagatttggcggatctggcagcggcacatcttacagcctgaccatcagcagcatggaagccgaagatgccgccacctactactgccagcagtggtccagcaatcccctgacatttggagccggcaccaagctggaactgaagagactcgaggacctgaagaacgtgttcccacctgaggtggccgtgttcgagcctagcgaggccgagatcagccacacccagaaagccaccctcgtgtgcctggctaccggcttctaccccgaccatgtggaactgtcttggtgggtcaacggcaaagaggtgcacagcggcgtgtgtaccgacccccagccactgaaagaacagcccgccctgaacgacagccggtactgcctgagcagcagactgagagtgtccgccaccttctggcagaacccccggaaccacttcagatgccaggtgcagttctacggcctgagcgagaacgacgagtggacccaggacagagccaagcccgtgacccagatcgtgtctgccgaagcctggggcagagccgattgcggctttaccagcgagagctaccagcagggcgtgctgagcgccaccatcctgtacgagatcctgctgggcaaggccaccctgtacgccgtgctggtgtctgccctggtgctgatggctatggtcaagcggaaggacagccggggaagggccaagcgatctggatctggagcaacaaacttctcactactcaaacaagcaggtgacgtggaggagaatcccgggcctactagtaccatggactggatttggcgcatccttttccttgtcggcgctgctaccggcgcccattccgggccccaggtgcagctggttgaatctggcggaggatctgttcaggctggcggctctctgagactgtcttgtggcgcttccggcaacatcagcagcagaaactgcatgggctggttcagacaggcccctggcaaagagagagaaggcgttgccgccatcggacaagtgaccggcagatcctactacgtggacagcgtgaagggcagattcaccatcagcctggacaacgccaagaacaccctgtacctccagatgaacacactgaagcccgaggacaccgccatgtactactgtgctgctgcccctggctgtctgctgtctgcacttagaagcgccgactacagaaactggggccagggaacccaagtgacagtgtctagtggatccggcggcggaggatctggcggaggcggatctgggggcggaggctctttcgaacaagttcagctgcaacagagcggccctgagctggttaagcctggcgcttctgtgcggatctcttgcaaggccagcggctacaccttcaccagctactacatccactgggtcaagcagcggcctggacagggactcgaatggatcggctggatctaccccggcaacctgaacaccaagtacaacgagaagttcaagggcaaagccacactgaccgccgacaagagcagcagcacagcctacatgcagctgagcagcctgacaagcgaggacagcgccgtgtacttctgcgccagatacgactggtacttcgacgtgtggggagccggaaccaccgtgacagtttcttctacgcgtatccagaaccctgatcctgccgtgtaccagctgcgggatagcaagagcagcgacaagagcgtgtgtctgttcaccgacttcgacagccagaccaacgtgtcccagagcaaggactccgacgtgtacatcaccgataagtgcgtgctggacatgcggagcatggacttcaagagcaactccgccgtggcctggtccaacaagtccgatttcgcctgcgccaacgccttcaacaacagcattatccccgaggacacattcttcccaagccccgagagcagctgcgacgtgaagctggtggaaaagagcttcgagacagacaccaacctgaacttccagaacctgagcgtgatcggcttcagaatcctgctgctgaaagtggccggctttaacctgctgatgaccctgcggctgtggtccagctaa

SEQ ID NO: 39024 - DNA, 2709 bp, synthetic construct
  source 1..2709: mol_type = other DNA
atggccttaccagtgaccgccttgctcctgccgctggccttgctgctccacgccgccaggccggaagtgcagctggttgaatctggcggaggactggttcaggctggcggatctctgagactgtcttgtgccgccagcggcagaacctttagcatgggctggtttagacaggcccctggcaaagagagagagttcgtcgccgccatcacatactctggcggcagcccttactacgccgactctgtgaagggcagattcaccatcagccgggacaacgccaagaacaccgtgtacctccagatgaacagcctgaagcctgaggacaccgccgtgtactactgcgccgccaatccaacatacggcagcgactggaacgccgagaattggggccagggaacccaagtgacagtgtctagcggtaccggcggaggcggatctggcggcggaggtagcggtggcggaggatctgaattccagatcgtgctgacacagagccctgccatcatgtccgcttctcccggcgagaaagtgaccatgacatgtagcgccagcagcagcgtgtccttcatgcactggtatcagcagaagtccggcacaagccccaagcggtggatctacgataccagcacactggcctctggcgtgccagccagatttggcggatctggcagcggcacatcttacagcctgaccatcagcagcatggaagccgaagatgccgccacctactactgccagcagtggtccagcaatcccctgacatttggagccggcaccaagctggaactgaagagactcgagatccagaaccctgatcctgccgtgtaccagctgcgggatagcaagagcagcgacaagagcgtgtgtctgttcaccgacttcgacagccagaccaacgtgtcccagagcaaggactccgacgtgtacatcaccgataagtgcgtgctggacatgcggagcatggacttcaagagcaactccgccgtggcctggtccaacaagtccgatttcgcctgcgccaacgccttcaacaacagcattatccccgaggacacattcttcccaagcagcgacgtgccctgcgacgtgaagctggtggaaaagagcttcgagacagacaccaacctgaacttccagaacctgagcgtgatcggcttcagaatcctgctgctgaaagtggccggctttaacctgctgatgaccctgcggctgtggtccagccgcgccaagagaagcggatctggcgtgaagcagaccctgaatttcgacctgctgaagctggctggcgacgtggaatccaacccaggccctactagtaccatggactggatttggcgcatccttttccttgtcggcgctgctaccggcgcccattccgggccccaggtgcagctggttgaatctggcggaggatctgttcaggctggcggctctctgagactgtcttgtggcgcttccggcaacatcagcagcagaaactgcatgggctggttcagacaggcccctggcaaagagagagaaggcgttgccgccatcggacaagtgaccggcagatcctactacgtggacagcgtgaagggcagattcaccatcagcctggacaacgccaagaacaccctgtacctccagatgaacacactgaagcccgaggacaccgccatgtactactgtgctgctgcccctggctgtctgctgtctgcacttagaagcgccgactacagaaactggggccagggaacccaagtgacagtgtctagtggatccggcggcggaggatctggcggaggcggatctgggggcggaggctctttcgaacaagttcagctgcaacagagcggccctgagctggttaagcctggcgcttctgtgcggatctcttgcaaggccagcggctacaccttcaccagctactacatccactgggtcaagcagcggcctggacagggactcgaatggatcggctggatctaccccggcaacctgaacaccaagtacaacgagaagttcaagggcaaagccacactgaccgccgacaagagcagcagcacagcctacatgcagctgagcagcctgacaagcgaggacagcgccgtgtacttctgcgccagatacgactggtacttcgacgtgtggggagccggaaccaccgtgacagtttcttctacgcgtgaggacctgaagaacgtgttcccacctgaggtggccgtgttcgagcctagcaaggccgagatcgcccacacccagaaagccaccctcgtgtgcctggctaccggcttctaccccgaccatgtggaactgtcttggtgggtcaacggcaaagaggtgcacagcggcgtgtgtaccgacccccagccactgaaagaacagcccgccctgaacgacagccggtactgcctgagcagcagactgagagtgtccgccaccttctggcagaacccccggaaccacttcagatgccaggtgcagttctacggcctgagcgagaacgacgagtggacccaggacagagccaagcccgtgacccagatcgtgtctgccgaagcctggggcagagccgattgcggcatcaccagcgccagctaccaccagggcgtgctgagcgccaccatcctgtacgagatcctgctgggcaaggccaccctgtacgccgtgctggtgtctgccctggtgctgatggctatggtcaagcggaaggacagccggggataa

SEQ ID NO: 39025 - DNA, 2700 bp, synthetic construct
  source 1..2700: mol_type = other DNA
atggccttaccagtgaccgccttgctcctgccgctggccttgctgctccacgccgccaggccgcaggtgcagctggttgaatctggcggaggatctgttcaggctggcggctctctgagactgtcttgtggcgcttccggcaacatcagcagcagaaactgcatgggctggttcagacaggcccctggcaaagagagagaaggcgttgccgccatcggacaagtgaccggcagatcctactacgtggacagcgtgaagggcagattcaccatcagcctggacaacgccaagaacaccctgtacctccagatgaacacactgaagcccgaggacaccgccatgtactactgtgctgctgcccctggctgtctgctgtctgcacttagaagcgccgactacagaaactggggccagggaacccaagtgacagtgtctagtggtaccggcggaggcggatctggcggcggaggtagcggtggcggaggatctgaattccagatcgtgctgacacagagccctgccatcatgtccgcttctcccggcgagaaagtgaccatgacatgtagcgccagcagcagcgtgtccttcatgcactggtatcagcagaagtccggcacaagccccaagcggtggatctacgataccagcacactggcctctggcgtgccagccagatttggcggatctggcagcggcacatcttacagcctgaccatcagcagcatggaagccgaagatgccgccacctactactgccagcagtggtccagcaatcccctgacatttggagccggcaccaagctggaactgaagagactcgaggacctgaagaacgtgttcccacctgaggtggccgtgttcgagcctagcgaggccgagatcagccacacccagaaagccaccctcgtgtgcctggctaccggcttctaccccgaccatgtggaactgtcttggtgggtcaacggcaaagaggtgcacagcggcgtgtgtaccgacccccagccactgaaagaacagcccgccctgaacgacagccggtactgcctgagcagcagactgagagtgtccgccaccttctggcagaacccccggaaccacttcagatgccaggtgcagttctacggcctgagcgagaacgacgagtggacccaggacagagccaagcccgtgacccagatcgtgtctgccgaagcctggggcagagccgattgcggctttaccagcgagagctaccagcagggcgtgctgagcgccaccatcctgtacgagatcctgctgggcaaggccaccctgtacgccgtgctggtgtctgccctggtgctgatggctatggtcaagcggaaggacagccggggaagggccaagcgatctggatctggagcaacaaacttctcactactcaaacaagcaggtgacgtggaggagaatcccgggcctactagtgccaccatggactggatttggcgcatccttttccttgtcggcgctgctaccggcgcccattccgggcccgaagtgcaactggttgaatccggtggcggcctggtgcaagcaggcggatctctcagacttagctgtgccgcctccggcagaaccttcacaatgggatggtttaggcaggctccagggaaagagagagagttcgtcgccgccatctctctgtctcccacactggcctactacgccgactctgtgaaaggccggttcaccatctccagagataatgccaagaacaccgtggtgctgcaaatgaactctctgaaacccgaggatacagccctgtactattgtgccgctgaccggaagtccgtgatgagcatcagacccgattactggggacagggcacacaagtcacagtgtcctctggatccggcggcggaggatctggcggaggcggatctgggggcggaggctctttcgaacaagttcagctgcaacagagcggccctgagctggttaagcctggcgcttctgtgcggatctcttgcaaggccagcggctacaccttcaccagctactacatccactgggtcaagcagcggcctggacagggactcgaatggatcggctggatctaccccggcaacctgaacaccaagtacaacgagaagttcaagggcaaagccacactgaccgccgacaagagcagcagcacagcctacatgcagctgagcagcctgacaagcgaggacagcgccgtgtacttctgcgccagatacgactggtacttcgacgtgtggggagccggaaccaccgtgacagtttcttctacgcgtatccagaaccctgatcctgccgtgtaccagctgcgggatagcaagagcagcgacaagagcgtgtgtctgttcaccgacttcgacagccagaccaacgtgtcccagagcaaggactccgacgtgtacatcaccgataagtgcgtgctggacatgcggagcatggacttcaagagcaactccgccgtggcctggtccaacaagtccgatttcgcctgcgccaacgccttcaacaacagcattatccccgaggacacattcttcccaagccccgagagcagctgcgacgtgaagctggtggaaaagagcttcgagacagacaccaacctgaacttccagaacctgagcgtgatcggcttcagaatcctgctgctgaaagtggccggctttaacctgctgatgaccctgcggctgtggtccagctaa

SEQ ID NO: 39026 - DNA, 2289 bp, synthetic construct
  source 1..2289: mol_type = other DNA
atggccttaccagtgaccgccttgctcctgccgctggccttgctgctccacgccgccaggccgcaggtgcagctggttgaatctggcggaggatctgttcaggctggcggctctctgagactgtcttgtggcgcttccggcaacatcagcagcagaaactgcatgggctggttcagacaggcccctggcaaagagagagaaggcgttgccgccatcggacaagtgaccggcagatcctactacgtggacagcgtgaagggcagattcaccatcagcctggacaacgccaagaacaccctgtacctccagatgaacacactgaagcccgaggacaccgccatgtactactgtgctgctgcccctggctgtctgctgtctgcacttagaagcgccgactacagaaactggggccagggaacccaagtgacagtgtctagtggtaccggcggaggcggatctggcggcggaggtagcggtggcggaggatctgaattccagatcgtgctgacacagagccctgccatcatgtccgcttctcccggcgagaaagtgaccatgacatgtagcgccagcagcagcgtgtccttcatgcactggtatcagcagaagtccggcacaagccccaagcggtggatctacgataccagcacactggcctctggcgtgccagccagatttggcggatctggcagcggcacatcttacagcctgaccatcagcagcatggaagccgaagatgccgccacctactactgccagcagtggtccagcaatcccctgacatttggagccggcaccaagctggaactgaagagactcgaggacctgaagaacgtgttcccacctgaggtggccgtgttcgagcctagcgaggccgagatcagccacacccagaaagccaccctcgtgtgcctggctaccggcttctaccccgaccatgtggaactgtcttggtgggtcaacggcaaagaggtgcacagcggcgtgtgtaccgacccccagccactgaaagaacagcccgccctgaacgacagccggtactgcctgagcagcagactgagagtgtccgccaccttctggcagaacccccggaaccacttcagatgccaggtgcagttctacggcctgagcgagaacgacgagtggacccaggacagagccaagcccgtgacccagatcgtgtctgccgaagcctggggcagagccgattgcggctttaccagcgagagctaccagcagggcgtgctgagcgccaccatcctgtacgagatcctgctgggcaaggccaccctgtacgccgtgctggtgtctgccctggtgctgatggctatggtcaagcggaaggacagccggggaagggccaagcgatctggatctggagcaacaaacttctcactactcaaacaagcaggtgacgtggaggagaatcccgggcctactagtgccaccatggactggatttggcgcatccttttccttgtcggcgctgctaccggcgcccattccttcgaacaagttcagctgcaacagagcggccctgagctggttaagcctggcgcttctgtgcggatctcttgcaaggccagcggctacaccttcaccagctactacatccactgggtcaagcagcggcctggacagggactcgaatggatcggctggatctaccccggcaacctgaacaccaagtacaacgagaagttcaagggcaaagccacactgaccgccgacaagagcagcagcacagcctacatgcagctgagcagcctgacaagcgaggacagcgccgtgtacttctgcgccagatacgactggtacttcgacgtgtggggagccggaaccaccgtgacagtttcttctacgcgtatccagaaccctgatcctgccgtgtaccagctgcgggatagcaagagcagcgacaagagcgtgtgtctgttcaccgacttcgacagccagaccaacgtgtcccagagcaaggactccgacgtgtacatcaccgataagtgcgtgctggacatgcggagcatggacttcaagagcaactccgccgtggcctggtccaacaagtccgatttcgcctgcgccaacgccttcaacaacagcattatccccgaggacacattcttcccaagccccgagagcagctgcgacgtgaagctggtggaaaagagcttcgagacagacaccaacctgaacttccagaacctgagcgtgatcggcttcagaatcctgctgctgaaagtggccggctttaacctgctgatgaccctgcggctgtggtccagctaa

SEQ ID NO: 39027 - DNA, 2289 bp, synthetic construct
  source 1..2289: mol_type = other DNA
atggccttaccagtgaccgccttgctcctgccgctggccttgctgctccacgccgccaggccgcaagttcagctggtggaaagcggtggtggcgttgtgcaacctggtggaagtctgaggctgagctgtgccgcttctggcctgagctttagcacctacactgtggcctggttcaggcaggctcccggaaagggtcttgaaggcgtggccgccattccttacaccagccagcacatggtgtacacagacagcgtcagaggccggttcaccatcagcagagacaactccaagaatacgctctatctccagatgaactctctgcgcgccgaagatacagccgtgtattactgcgccaccgacagacggcctggcacctctatgctggctatcaacggctacaacagatggggacagggaaccaccgtgaccgtgtcatctggtaccggcggaggcggatctggcggcggaggtagcggtggcggaggatctgaattccagatcgtgctgacacagagccctgccatcatgtccgcttctcccggcgagaaagtgaccatgacatgtagcgccagcagcagcgtgtccttcatgcactggtatcagcagaagtccggcacaagccccaagcggtggatctacgataccagcacactggcctctggcgtgccagccagatttggcggatctggcagcggcacatcttacagcctgaccatcagcagcatggaagccgaagatgccgccacctactactgccagcagtggtccagcaatcccctgacatttggagccggcaccaagctggaactgaagagactcgaggacctgaagaacgtgttcccacctgaggtggccgtgttcgagcctagcgaggccgagatcagccacacccagaaagccaccctcgtgtgcctggctaccggcttctaccccgaccatgtggaactgtcttggtgggtcaacggcaaagaggtgcacagcggcgtgtgtaccgacccccagccactgaaagaacagcccgccctgaacgacagccggtactgcctgagcagcagactgagagtgtccgccaccttctggcagaacccccggaaccacttcagatgccaggtgcagttctacggcctgagcgagaacgacgagtggacccaggacagagccaagcccgtgacccagatcgtgtctgccgaagcctggggcagagccgattgcggctttaccagcgagagctaccagcagggcgtgctgagcgccaccatcctgtacgagatcctgctgggcaaggccaccctgtacgccgtgctggtgtctgccctggtgctgatggctatggtcaagcggaaggacagccggggaagggccaagcgatctggatctggagcaacaaacttctcactactcaaacaagcaggtgacgtggaggagaatcccgggcctactagtgccaccatggactggatttggcgcatccttttccttgtcggcgctgctaccggcgcccattccttcgaacaagttcagctgcaacagagcggccctgagctggttaagcctggcgcttctgtgcggatctcttgcaaggccagcggctacaccttcaccagctactacatccactgggtcaagcagcggcctggacagggactcgaatggatcggctggatctaccccggcaacctgaacaccaagtacaacgagaagttcaagggcaaagccacactgaccgccgacaagagcagcagcacagcctacatgcagctgagcagcctgacaagcgaggacagcgccgtgtacttctgcgccagatacgactggtacttcgacgtgtggggagccggaaccaccgtgacagtttcttctacgcgtatccagaaccctgatcctgccgtgtaccagctgcgggatagcaagagcagcgacaagagcgtgtgtctgttcaccgacttcgacagccagaccaacgtgtcccagagcaaggactccgacgtgtacatcaccgataagtgcgtgctggacatgcggagcatggacttcaagagcaactccgccgtggcctggtccaacaagtccgatttcgcctgcgccaacgccttcaacaacagcattatccccgaggacacattcttcccaagccccgagagcagctgcgacgtgaagctggtggaaaagagcttcgagacagacaccaacctgaacttccagaacctgagcgtgatcggcttcagaatcctgctgctgaaagtggccggctttaacctgctgatgaccctgcggctgtggtccagctaa

SEQ ID NO: 39028 - DNA, 2286 bp, synthetic construct
  source 1..2286: mol_type = other DNA
atggccttaccagtgaccgccttgctcctgccgctggccttgctgctccacgccgccaggccgcagatcgtgctgacacagagccctgccatcatgtccgcttctcccggcgagaaagtgaccatgacatgtagcgccagcagcagcgtgtccttcatgcactggtatcagcagaagtccggcacaagccccaagcggtggatctacgataccagcacactggcctctggcgtgccagccagatttggcggatctggcagcggcacatcttacagcctgaccatcagcagcatggaagccgaagatgccgccacctactactgccagcagtggtccagcaatcccctgacatttggagccggcaccaagctggaactgaagagactcgaggacctgaagaacgtgttcccacctgaggtggccgtgttcgagcctagcgaggccgagatcagccacacccagaaagccaccctcgtgtgcctggctaccggcttctaccccgaccatgtggaactgtcttggtgggtcaacggcaaagaggtgcacagcggcgtgtgtaccgacccccagccactgaaagaacagcccgccctgaacgacagccggtactgcctgagcagcagactgagagtgtccgccaccttctggcagaacccccggaaccacttcagatgccaggtgcagttctacggcctgagcgagaacgacgagtggacccaggacagagccaagcccgtgacccagatcgtgtctgccgaagcctggggcagagccgattgcggctttaccagcgagagctaccagcagggcgtgctgagcgccaccatcctgtacgagatcctgctgggcaaggccaccctgtacgccgtgctggtgtctgccctggtgctgatggctatggtcaagcggaaggacagccggggaagggccaagcgatctggatctggagcaacaaacttctcactactcaaacaagcaggtgacgtggaggagaatcccgggcctactagtaccatggactggatttggcgcatccttttccttgtcggcgctgctaccggcgcccattccgggccccaagttcagctggtggaaagcggtggtggcgttgtgcaacctggtggaagtctgaggctgagctgtgccgcttctggcctgagctttagcacctacactgtggcctggttcaggcaggctcccggaaagggtcttgaaggcgtggccgccattccttacaccagccagcacatggtgtacacagacagcgtcagaggccggttcaccatcagcagagacaactccaagaatacgctctatctccagatgaactctctgcgcgccgaagatacagccgtgtattactgcgccaccgacagacggcctggcacctctatgctggctatcaacggctacaacagatggggacagggaaccaccgtgaccgtgtcatctggatccggcggcggaggatctggcggaggcggatctgggggcggaggctctttcgaacaagttcagctgcaacagagcggccctgagctggttaagcctggcgcttctgtgcggatctcttgcaaggccagcggctacaccttcaccagctactacatccactgggtcaagcagcggcctggacagggactcgaatggatcggctggatctaccccggcaacctgaacaccaagtacaacgagaagttcaagggcaaagccacactgaccgccgacaagagcagcagcacagcctacatgcagctgagcagcctgacaagcgaggacagcgccgtgtacttctgcgccagatacgactggtacttcgacgtgtggggagccggaaccaccgtgacagtttcttctacgcgtatccagaaccctgatcctgccgtgtaccagctgcgggatagcaagagcagcgacaagagcgtgtgtctgttcaccgacttcgacagccagaccaacgtgtcccagagcaaggactccgacgtgtacatcaccgataagtgcgtgctggacatgcggagcatggacttcaagagcaactccgccgtggcctggtccaacaagtccgatttcgcctgcgccaacgccttcaacaacagcattatccccgaggacacattcttcccaagccccgagagcagctgcgacgtgaagctggtggaaaagagcttcgagacagacaccaacctgaacttccagaacctgagcgtgatcggcttcagaatcctgctgctgaaagtggccggctttaacctgctgatgaccctgcggctgtggtccagctaa

SEQ ID NO: 39029 - DNA, 2292 bp, synthetic construct
  source 1..2292: mol_type = other DNA
atggccttaccagtgaccgccttgctcctgccgctggccttgctgctccacgccgccaggccgcagatcgtgctgacacagagccctgccatcatgtccgcttctcccggcgagaaagtgaccatgacatgtagcgccagcagcagcgtgtccttcatgcactggtatcagcagaagtccggcacaagccccaagcggtggatctacgataccagcacactggcctctggcgtgccagccagatttggcggatctggcagcggcacatcttacagcctgaccatcagcagcatggaagccgaagatgccgccacctactactgccagcagtggtccagcaatcccctgacatttggagccggcaccaagctggaactgaagagactcgaggacctgaagaacgtgttcccacctgaggtggccgtgttcgagcctagcgaggccgagatcagccacacccagaaagccaccctcgtgtgcctggctaccggcttctaccccgaccatgtggaactgtcttggtgggtcaacggcaaagaggtgcacagcggcgtgtgtaccgacccccagccactgaaagaacagcccgccctgaacgacagccggtactgcctgagcagcagactgagagtgtccgccaccttctggcagaacccccggaaccacttcagatgccaggtgcagttctacggcctgagcgagaacgacgagtggacccaggacagagccaagcccgtgacccagatcgtgtctgccgaagcctggggcagagccgattgcggctttaccagcgagagctaccagcagggcgtgctgagcgccaccatcctgtacgagatcctgctgggcaaggccaccctgtacgccgtgctggtgtctgccctggtgctgatggctatggtcaagcggaaggacagccggggaagggccaagcgatctggatctggagcaacaaacttctcactactcaaacaagcaggtgacgtggaggagaatcccgggcctactagtaccatggactggatttggcgcatccttttccttgtcggcgctgctaccggcgcccattccgggcccgaggtgcagctggttgaatctggcggaggatctgttcaggctggcggctctctgagactgtcttgtgccgccagcggctacacctacagcatcaactgcatgggctggttcagacaggcccctggcaaagagagagaaggcgttgccgccatctctaccggcggaggcagaaccgattaccgggattctgtgaagggcagattcaccatcagccaggacaacgccaagaacaccgtgtacctccagatgaacagcctgaagcctgaggacaccgccatgtactactgtgccggcaagaccacctatcctggctacggatgtggcctgggcagaagcgcctacaattattggggccagggcacccaagtgaccgtgtcatctggatccggcggcggaggatctggcggaggcggatctgggggcggaggctctttcgaacaagttcagctgcaacagagcggccctgagctggttaagcctggcgcttctgtgcggatctcttgcaaggccagcggctacaccttcaccagctactacatccactgggtcaagcagcggcctggacagggactcgaatggatcggctggatctaccccggcaacctgaacaccaagtacaacgagaagttcaagggcaaagccacactgaccgccgacaagagcagcagcacagcctacatgcagctgagcagcctgacaagcgaggacagcgccgtgtacttctgcgccagatacgactggtacttcgacgtgtggggagccggaaccaccgtgacagtttcttctacgcgtatccagaaccctgatcctgccgtgtaccagctgcgggatagcaagagcagcgacaagagcgtgtgtctgttcaccgacttcgacagccagaccaacgtgtcccagagcaaggactccgacgtgtacatcaccgataagtgcgtgctggacatgcggagcatggacttcaagagcaactccgccgtggcctggtccaacaagtccgatttcgcctgcgccaacgccttcaacaacagcattatccccgaggacacattcttcccaagccccgagagcagctgcgacgtgaagctggtggaaaagagcttcgagacagacaccaacctgaacttccagaacctgagcgtgatcggcttcagaatcctgctgctgaaagtggccggctttaacctgctgatgaccctgcggctgtggtccagctaa

SEQ ID NO: 39030 - DNA, 1848 bp, synthetic construct
  source 1..1848: mol_type = other DNA
atggccttaccagtgaccgccttgctcctgccgctggccttgctgctccacgccgccaggccgcagatcgtgctgacacagagccctgccatcatgtccgcttctcccggcgagaaagtgaccatgacatgtagcgccagcagcagcgtgtccttcatgcactggtatcagcagaagtccggcacaagccccaagcggtggatctacgataccagcacactggcctctggcgtgccagccagatttggcggatctggcagcggcacatcttacagcctgaccatcagcagcatggaagccgaagatgccgccacctactactgccagcagtggtccagcaatcccctgacatttggagccggcaccaagctggaactgaagagactcgaggacctgaagcacgtgttcccacctgaggtggccgtgttcgagcctagcgacgccgagatctggcacacccagaaagccaccctcgtgtgcctggctaccggcttctaccccgaccatgtggaactgtcttggtgggtcaacggcaaagaggtgcacagcggcgtgtctaccgacccccagccactgaaagaacagcccgccctgaacgacagccggtactgcctgagcagcagactgagagtgtccgccaccttctggcagaacccccggaaccacttcagatgccaggtgcagttctacggcctgagcgagaacgacgagtggacccaggacagagccaagcccgtgacccagatcgtgtctgccgaagcctggggcagagccgattgcggctttaccagcgagagctaccagcagggcgtgctgagcgccaccatcctgtacgagatcctgctgggcaaggccaccctgtacgccgtgctggtgtctgccctggtgctgatggctatggtcaagcggaaggacagccggggaagggccaagcgatctggatctggagcaacaaacttctcactactcaaacaagcaggtgacgtggaggagaatcccgggcctactagtatggactggatttggcgcatccttttccttgtcggcgctgctaccggcgcgcattccttcgaacaagttcagctgcaacagagcggccctgagctggttaagcctggcgcttctgtgcggatctcttgcaaggccagcggctacaccttcaccagctactacatccactgggtcaagcagcggcctggacagggactcgaatggatcggctggatctaccccggcaacctgaacaccaagtacaacgagaagttcaagggcaaagccacactgaccgccgacaagagcagcagcacagcctacatgcagctgagcagcctgacaagcgaggacagcgccgtgtacttctgcgccagatacgactggtacttcgacgtgtggggagccggaaccaccgtgacagtttcttctacgcgtatccagaaccctgatcctgccgtgtaccagctgcgggatagcaagagcagcgacaagagcgtgtgtctgttcaccgacttcgacagccagaccaacgtgtcccagagcaaggactccgacgtgtacatcaccgataagaccgtgctggacatgcggagcatggacttcaagagcaactccgccgtggcctggtccagcaagtccgatttcgcctgcgccaacgccttcaacaacagcattatccccgaggacacattcttcccaagccccgagatggcctgcgacgtgaagctggtggaaaagagcttcgagacagacaccaacctgaacttccagaacctgctcgtgatctggctgagaatcctgctgctgaaagtggccggctttaacctgctgatgaccctgcggctgtggtccagc

SEQ ID NO: 39031 - DNA, 1848 bp, synthetic construct
  source 1..1848: mol_type = other DNA
atggccttaccagtgaccgccttgctcctgccgctggccttgctgctccacgccgccaggccgcagatcgtgctgacacagagccctgccatcatgtccgcttctcccggcgagaaagtgaccatgacatgtagcgccagcagcagcgtgtccttcatgcactggtatcagcagaagtccggcacaagccccaagcggtggatctacgataccagcacactggcctctggcgtgccagccagatttggcggatctggcagcggcacatcttacagcctgaccatcagcagcatggaagccgaagatgccgccacctactactgccagcagtggtccagcaatcccctgacatttggagccggcaccaagctggaactgaagagactcgaggacctgaagcacgtgttcccacctgaggtggccgtgttcgagcctagcgacgccgagatctggcacacccagaaagccaccctcgtgtgcctggctaccggcttctaccccgaccatgtggaactgtcttggtgggtcaacggcaaagaggtgcacagcggcgtgtctaccgacccccagccactgaaagaacagcccgccctgaacgacagccggtactgcctgagcagcagactgagagtgtccgccaccttctggcagaacccccggaaccacttcagatgccaggtgcagttctacggcctgagcgagaacgacgagtggacccaggacagagccaagcccgtgacccagatcgtgtctgccgaagcctggggcagagccgattgcggctttaccagcgagagctaccagcagggcgtgctgagcgccaccatcctgtacgagatcctgctgggcaaggccaccctgtacgccgtgctggtgtctgccctggtgctgatggctatggtcaagcggaaggacagccggggaagggccaagcgatctggatctggagcaacaaacttctcactactcaaacaagcaggtgacgtggaggagaatcccgggcctactagtatggactggatttggcgcatccttttccttgtcggcgctgctaccggcgcgcattccttcgaacaagttcagctgcaacagagcggccctgagctggttaagcctggcgcttctgtgcggatctcttgcaaggccagcggctacaccttcaccagctactacatccactgggtcaagcagcggcctggacagggactcgaatggatcggctggatctaccccggcaacctgaacaccaagtacaacgagaagttcaagggcaaagccacactgaccgccgacaagagcagcagcacagcctacatgcagctgagcagcctgacaagcgaggacagcgccgtgtacttctgcgccagatacgactggtacttcgacgtgtggggagccggaaccaccgtgacagtttcttctacgcgtatccagaaccctgatcctgccgtgtaccagctgcgggatagcaagagcagcgacaagagcgtgtgtctgttcaccgacttcgacagccagaccaacgtgtcccagagcaaggactccgacgtgtacatcaccgataagaccgtgctggacatgcggagcatggacttcaagagcaactccgccgtggcctggtccaccaagtccgatttcgcctgcgccaacgccttcaacaacagcattatccccgaggacacattcttcccaagccccgaggtggtgtgcgacgtgaagctggtggaaaagagcttcgagacagacaccaacctgaacttccagaacctggtggtgatcggcgccagaatcctgctgctgaaagtggccggctttaacctgctgatgaccctgcggctgtggtccagc

SEQ ID NO: 39032 - DNA, 1848 bp, synthetic construct
  source 1..1848: mol_type = other DNA
atggccttaccagtgaccgccttgctcctgccgctggccttgctgctccacgccgccaggccgcagatcgtgctgacacagagccctgccatcatgtccgcttctcccggcgagaaagtgaccatgacatgtagcgccagcagcagcgtgtccttcatgcactggtatcagcagaagtccggcacaagccccaagcggtggatctacgataccagcacactggcctctggcgtgccagccagatttggcggatctggcagcggcacatcttacagcctgaccatcagcagcatggaagccgaagatgccgccacctactactgccagcagtggtccagcaatcccctgacatttggagccggcaccaagctggaactgaagagactcgaggacctgaagaacgtgttcccacctgaggtggccgtgttcgagcctagcaaggccgagatcagcagaacccagaaagccaccctcgtgtgcctggctaccggcttctaccctcctcatgtggaactgtcttggtgggtcaacggcaaagaggtgcacgacggcgtgtgtaccgacccccagccactgaaagaacagcccgccctgaacgacagccggtactgcctgagcagcagactgagagtgtccgccaccttctggcagaacccccggaaccacttcagatgccaggtgcagttctacggcctgagcgagaacgacgagtggacccaggacagagccaagcccgtgacccagatcgtgtctgccgaagcctggggcagagccgattgcggctttaccagcgagagctaccagcagggcgtgctgagcgccaccatcctgtacgagatcctgctgggcaaggccaccctgtacgccgtgctggtgtctgccctggtgctgatggctatggtcaagcggaaggacagccggggaagggccaagcgatctggatctggagcaacaaacttctcactactcaaacaagcaggtgacgtggaggagaatcccgggcctactagtatggactggatttggcgcatccttttccttgtcggcgctgctaccggcgcgcattccttcgaacaagttcagctgcaacagagcggccctgagctggttaagcctggcgcttctgtgcggatctcttgcaaggccagcggctacaccttcaccagctactacatccactgggtcaagcagcggcctggacagggactcgaatggatcggctggatctaccccggcaacctgaacaccaagtacaacgagaagttcaagggcaaagccacactgaccgccgacaagagcagcagcacagcctacatgcagctgagcagcctgacaagcgaggacagcgccgtgtacttctgcgccagatacgactggtacttcgacgtgtggggagccggaaccaccgtgacagtttcttctacgcgtatccagaaccctgatcctgccgtgtaccagctgcgggatagcaagagcagcgacaagttcgtgtgtctgttcaccgacttcgacagccagatcaacgtgtcccagagcaaggactccgacgtgtacatcaccgataagtgcgtgctggacatgcggagcatggacttcaagagcaactccgccgtggcctggtccaacaagtccgatttcacctgcgccaacgccttcaacaacagcattatccccgaggacacattcttcccaagccccgagagcagctgcgacgtgaagctggtggaaaagagcttcgagacagacaccaacctgaacttccagaacctgagcgtgatcggcttcagaatcctgctgctgaaagtggccggctttaacctgctgatgaccctgcggctgtggtccagc

SEQ ID NO: 39033 - DNA, 2274 bp, synthetic construct
  source 1..2274: mol_type = other DNA
atggccttaccagtgaccgccttgctcctgccgctggccttgctgctccacgccgccaggccgcagatcgtgctgacacagagccctgccatcatgtccgcttctcccggcgagaaagtgaccatgacatgtagcgccagcagcagcgtgtccttcatgcactggtatcagcagaagtccggcacaagccccaagcggtggatctacgataccagcacactggcctctggcgtgccagccagatttggcggatctggcagcggcacatcttacagcctgaccatcagcagcatggaagccgaagatgccgccacctactactgccagcagtggtccagcaatcccctgacatttggagccggcaccaagctggaactgaagagactcgaggacctgaagaacgtgttcccacctgaggtggccgtgttcgagcctagcgaggccgagatcagccacacccagaaagccaccctcgtgtgcctggctaccggcttctaccccgaccatgtggaactgtcttggtgggtcaacggcaaagaggtgcacagcggcgtgtgtaccgacccccagccactgaaagaacagcccgccctgaacgacagccggtactgcctgagcagcagactgagagtgtccgccaccttctggcagaacccccggaaccacttcagatgccaggtgcagttctacggcctgagcgagaacgacgagtggacccaggacagagccaagcccgtgacccagatcgtgtctgccgaagcctggggcagagccgattgcggctttaccagcgagagctaccagcagggcgtgctgagcgccaccatcctgtacgagatcctgctgggcaaggccaccctgtacgccgtgctggtgtctgccctggtgctgatggctatggtcaagcggaaggacagccggggaagggccaagcgatctggatctggagcaacaaacttctcactactcaaacaagcaggtgacgtggaggagaatcccgggcctactagtaccatggactggatttggcgcatccttttccttgtcggcgctgctaccggcgcccattccgggccccaggtgcagctccaagaaagcggacccggactggttaagccctctcagaccctgtctctgacctgcacagttagcggagccagcattaccacaggcgagtattattggaattggtttcggcagccaccaggcaaggggcttgagtggatgggtgctattgctgcctctggcagcaccacctactctcccagctttgagagcagaacctccatcagccgggacacctccaaaaaccagttctctctgaagctgtcctccgtgaccgctgctgacaccgccgtctattattgtggccggtctttcggcgtggcagctgtgaccacaggacagaacagaggccagggaacacttgtgaccgtgtcctctggatccggcggcggaggatctggcggaggcggatctgggggcggaggctctttcgaacaagttcagctgcaacagagcggccctgagctggttaagcctggcgcttctgtgcggatctcttgcaaggccagcggctacaccttcaccagctactacatccactgggtcaagcagcggcctggacagggactcgaatggatcggctggatctaccccggcaacctgaacaccaagtacaacgagaagttcaagggcaaagccacactgaccgccgacaagagcagcagcacagcctacatgcagctgagcagcctgacaagcgaggacagcgccgtgtacttctgcgccagatacgactggtacttcgacgtgtggggagccggaaccaccgtgacagtttcttctacgcgtatccagaaccctgatcctgccgtgtaccagctgcgggatagcaagagcagcgacaagagcgtgtgtctgttcaccgacttcgacagccagaccaacgtgtcccagagcaaggactccgacgtgtacatcaccgataagtgcgtgctggacatgcggagcatggacttcaagagcaactccgccgtggcctggtccaacaagtccgatttcgcctgcgccaacgccttcaacaacagcattatccccgaggacacattcttcccaagccccgagagcagctgcgacgtgaagctggtggaaaagagcttcgagacagacaccaacctgaacttccagaacctgagcgtgatcggcttcagaatcctgctgctgaaagtggccggctttaacctgctgatgaccctgcggctgtggtccagc

SEQ ID NO: 39034 - DNA, 2697 bp, synthetic construct
  source 1..2697: mol_type = other DNA
atggccttaccagtgaccgccttgctcctgccgctggccttgctgctccacgccgccaggccgcaggttcagctgcaagagtctggccctggcctggtcaagcctagccaaacactgagcctgacctgtaccgtgtctggcggctctatcaccaccggcgagttctactggaactggttcagacagcctcctggcaaaggactggaatggatgggagccattgccgccagcggcagcacaacatacagccctagcttcgagagccggaccagcatcagcagagacaccagcaagaatcagttcagcctgaagctgagcagcgtgacagccgccgatacagccgtgtattactgcggcagatcctttggagtggccgccgtgacaaccggccagaatagaggacagggcaccctggtcacagtgtctagcggtaccggcggaggcggatctggcggcggaggtagcggtggcggaggatctgaattccagatcgtgctgacacagagccctgccatcatgtccgcttctcccggcgagaaagtgaccatgacatgtagcgccagcagcagcgtgtccttcatgcactggtatcagcagaagtccggcacaagccccaagcggtggatctacgataccagcacactggcctctggcgtgccagccagatttggcggatctggcagcggcacatcttacagcctgaccatcagcagcatggaagccgaagatgccgccacctactactgccagcagtggtccagcaatcccctgacatttggagccggcaccaagctggaactgaagagactcgagatccagaaccctgatcctgccgtgtaccagctgcgggatagcaagagcagcgacaagagcgtgtgtctgttcaccgacttcgacagccagaccaacgtgtcccagagcaaggactccgacgtgtacatcaccgataagtgcgtgctggacatgcggagcatggacttcaagagcaactccgccgtggcctggtccaacaagtccgatttcgcctgcgccaacgccttcaacaacagcattatccccgaggacacattcttcccaagcagcgacgtgccctgcgacgtgaagctggtggaaaagagcttcgagacagacaccaacctgaacttccagaacctgagcgtgatcggcttcagaatcctgctgctgaaagtggccggctttaacctgctgatgaccctgcggctgtggtccagccgcgccaagagaagcggatctggcgtgaagcagaccctgaatttcgacctgctgaagctggctggcgacgtggaatccaacccaggccctactagtaccatggactggatttggcgcatccttttccttgtcggcgctgctaccggcgcccattccgggcccgaagtgcaactggttgaatccggtggcggcctggtgcaacccggcggatctctcagacttagctgtgccgcctccggcagaaccttcacaatgggatggtacaggcaggctccagggaaagagagagagttcgtcgccgccatctctctgtctcccacactggcctactacgccgactctgtgaaaggccggttcaccatctccagagataatagcaagaacaccgtggtgctgcaaatgaactctctgagagccgaggatacagccctgtactattgtgccgctgaccggaagtccgtgatgagcatcagacccgattactggggacagggcacactggtcacagtgtctagtggatccggcggcggaggatctggcggaggcggatctgggggcggaggctctttcgaacaagttcagctgcaacagagcggccctgagctggttaagcctggcgcttctgtgcggatctcttgcaaggccagcggctacaccttcaccagctactacatccactgggtcaagcagcggcctggacagggactcgaatggatcggctggatctaccccggcaacctgaacaccaagtacaacgagaagttcaagggcaaagccacactgaccgccgacaagagcagcagcacagcctacatgcagctgagcagcctgacaagcgaggacagcgccgtgtacttctgcgccagatacgactggtacttcgacgtgtggggagccggaaccaccgtgacagtttcttctacgcgtgaggacctgaagaacgtgttcccacctgaggtggccgtgttcgagcctagcaaggccgagatcgcccacacccagaaagccaccctcgtgtgcctggctaccggcttctaccccgaccatgtggaactgtcttggtgggtcaacggcaaagaggtgcacagcggcgtgtgtaccgacccccagccactgaaagaacagcccgccctgaacgacagccggtactgcctgagcagcagactgagagtgtccgccaccttctggcagaacccccggaaccacttcagatgccaggtgcagttctacggcctgagcgagaacgacgagtggacccaggacagagccaagcccgtgacccagatcgtgtctgccgaagcctggggcagagccgattgcggcatcaccagcgccagctaccaccagggcgtgctgagcgccaccatcctgtacgagatcctgctgggcaaggccaccctgtacgccgtgctggtgtctgccctggtgctgatggctatggtcaagcggaaggacagccgggga

SEQ ID NO: 39035 - DNA, 2286 bp, synthetic construct
  source 1..2286: mol_type = other DNA
atggccttaccagtgaccgccttgctcctgccgctggccttgctgctccacgccgccaggccgcaggttcagctgcaagagtctggccctggcctggtcaagcctagccaaacactgagcctgacctgtaccgtgtctggcggctctatcaccaccggcgagttctactggaactggttcagacagcctcctggcaaaggactggaatggatgggagccattgccgccagcggcagcacaacatacagccctagcttcgagagccggaccagcatcagcagagacaccagcaagaatcagttcagcctgaagctgagcagcgtgacagccgccgatacagccgtgtattactgcggcagatcctttggagtggccgccgtgacaaccggccagaatagaggacagggcaccctggtcacagtgtctagcggtaccggcggaggcggatctggcggcggaggtagcggtggcggaggatctgaattccagatcgtgctgacacagagccctgccatcatgtccgcttctcccggcgagaaagtgaccatgacatgtagcgccagcagcagcgtgtccttcatgcactggtatcagcagaagtccggcacaagccccaagcggtggatctacgataccagcacactggcctctggcgtgccagccagatttggcggatctggcagcggcacatcttacagcctgaccatcagcagcatggaagccgaagatgccgccacctactactgccagcagtggtccagcaatcccctgacatttggagccggcaccaagctggaactgaagagactcgagatccagaaccctgatcctgccgtgtaccagctgcgggatagcaagagcagcgacaagagcgtgtgtctgttcaccgacttcgacagccagaccaacgtgtcccagagcaaggactccgacgtgtacatcaccgataagtgcgtgctggacatgcggagcatggacttcaagagcaactccgccgtggcctggtccaacaagtccgatttcgcctgcgccaacgccttcaacaacagcattatccccgaggacacattcttcccaagcagcgacgtgccctgcgacgtgaagctggtggaaaagagcttcgagacagacaccaacctgaacttccagaacctgagcgtgatcggcttcagaatcctgctgctgaaagtggccggctttaacctgctgatgaccctgcggctgtggtccagccgcgccaagagaagcggatctggcgtgaagcagaccctgaatttcgacctgctgaagctggctggcgacgtggaatccaacccaggccctactagtaccatggactggatttggcgcatccttttccttgtcggcgctgctaccggcgcccattccttcgaacaagttcagctgcaacagagcggccctgagctggttaagcctggcgcttctgtgcggatctcttgcaaggccagcggctacaccttcaccagctactacatccactgggtcaagcagcggcctggacagggactcgaatggatcggctggatctaccccggcaacctgaacaccaagtacaacgagaagttcaagggcaaagccacactgaccgccgacaagagcagcagcacagcctacatgcagctgagcagcctgacaagcgaggacagcgccgtgtacttctgcgccagatacgactggtacttcgacgtgtggggagccggaaccaccgtgacagtttcttctacgcgtgaggacctgaagaacgtgttcccacctgaggtggccgtgttcgagcctagcaaggccgagatcgcccacacccagaaagccaccctcgtgtgcctggctaccggcttctaccccgaccatgtggaactgtcttggtgggtcaacggcaaagaggtgcacagcggcgtgtgtaccgacccccagccactgaaagaacagcccgccctgaacgacagccggtactgcctgagcagcagactgagagtgtccgccaccttctggcagaacccccggaaccacttcagatgccaggtgcagttctacggcctgagcgagaacgacgagtggacccaggacagagccaagcccgtgacccagatcgtgtctgccgaagcctggggcagagccgattgcggcatcaccagcgccagctaccaccagggcgtgctgagcgccaccatcctgtacgagatcctgctgggcaaggccaccctgtacgccgtgctggtgtctgccctggtgctgatggctatggtcaagcggaaggacagccgggga

SEQ ID NO: 39036 - DNA, 2685 bp, synthetic construct
  source 1..2685: mol_type = other DNA
atggccttaccagtgaccgccttgctcctgccgctggccttgctgctccacgccgccaggccggaagtgcagctggttgaatctggcggaggactggttcaggctggcggatctctgagactgtcttgtgccgccagcggcagaacctttagcatgggctggtttagacaggcccctggcaaagagagagagttcgtcgccgccatcacatactctggcggcagcccttactacgccgactctgtgaagggcagattcaccatcagccgggacaacgccaagaacaccgtgtacctccagatgaacagcctgaagcctgaggacaccgccgtgtactactgcgccgccaatccaacatacggcagcgactggaacgccgagaattggggccagggaacccaagtgacagtgtctagcggtaccggcggaggcggatctggcggcggaggtagcggtggcggaggatctgaattccagatcgtgctgacacagagccctgccatcatgtccgcttctcccggcgagaaagtgaccatgacatgtagcgccagcagcagcgtgtccttcatgcactggtatcagcagaagtccggcacaagccccaagcggtggatctacgataccagcacactggcctctggcgtgccagccagatttggcggatctggcagcggcacatcttacagcctgaccatcagcagcatggaagccgaagatgccgccacctactactgccagcagtggtccagcaatcccctgacatttggagccggcaccaagctggaactgaagagactcgaggacctgaagaacgtgttcccacctgaggtggccgtgttcgagcctagcgaggccgagatcagccacacccagaaagccaccctcgtgtgcctggctaccggcttctaccccgaccatgtggaactgtcttggtgggtcaacggcaaagaggtgcacagcggcgtgtgtaccgacccccagccactgaaagaacagcccgccctgaacgacagccggtactgcctgagcagcagactgagagtgtccgccaccttctggcagaacccccggaaccacttcagatgccaggtgcagttctacggcctgagcgagaacgacgagtggacccaggacagagccaagcccgtgacccagatcgtgtctgccgaagcctggggcagagccgattgcggctttaccagcgagagctaccagcagggcgtgctgagcgccaccatcctgtacgagatcctgctgggcaaggccaccctgtacgccgtgctggtgtctgccctggtgctgatggctatggtcaagcggaaggacagccggggaagggccaagcgatctggatctggagcaacaaacttctcactactcaaacaagcaggtgacgtggaggagaatcccgggcctactagtaccatggactggatttggcgcatccttttccttgtcggcgctgctaccggcgcccattccgggccccaggtgcagctccaagaaagcggacccggactggttaagccctctcagaccctgtctctgacctgcacagttagcggagccagcattaccacaggcgagtattattggaattggtttcggcagccaccaggcaaggggcttgagtggatgggtgctattgctgcctctggcagcaccacctactctcccagctttgagagcagaacctccatcagccgggacacctccaaaaaccagttctctctgaagctgtcctccgtgaccgctgctgacaccgccgtctattattgtggccggtctttcggcgtggcagctgtgaccacaggacagaacagaggccagggaacacttgtgaccgtgtcctctggatccggcggcggaggatctggcggaggcggatctgggggcggaggctctttcgaacaagttcagctgcaacagagcggccctgagctggttaagcctggcgcttctgtgcggatctcttgcaaggccagcggctacaccttcaccagctactacatccactgggtcaagcagcggcctggacagggactcgaatggatcggctggatctaccccggcaacctgaacaccaagtacaacgagaagttcaagggcaaagccacactgaccgccgacaagagcagcagcacagcctacatgcagctgagcagcctgacaagcgaggacagcgccgtgtacttctgcgccagatacgactggtacttcgacgtgtggggagccggaaccaccgtgacagtttcttctacgcgtatccagaaccctgatcctgccgtgtaccagctgcgggatagcaagagcagcgacaagagcgtgtgtctgttcaccgacttcgacagccagaccaacgtgtcccagagcaaggactccgacgtgtacatcaccgataagtgcgtgctggacatgcggagcatggacttcaagagcaactccgccgtggcctggtccaacaagtccgatttcgcctgcgccaacgccttcaacaacagcattatccccgaggacacattcttcccaagccccgagagcagctgcgacgtgaagctggtggaaaagagcttcgagacagacaccaacctgaacttccagaacctgagcgtgatcggcttcagaatcctgctgctgaaagtggccggctttaacctgctgatgaccctgcggctgtggtccagc

SEQ ID NO: 39037 - DNA, 2706 bp, synthetic construct
  source 1..2706: mol_type = other DNA
atggccttaccagtgaccgccttgctcctgccgctggccttgctgctccacgccgccaggccggaagtgcagctggttgaatctggcggaggactggttcaggctggcggatctctgagactgtcttgtgccgccagcggcagaacctttagcatgggctggtttagacaggcccctggcaaagagagagagttcgtcgccgccatcacatactctggcggcagcccttactacgccgactctgtgaagggcagattcaccatcagccgggacaacgccaagaacaccgtgtacctccagatgaacagcctgaagcctgaggacaccgccgtgtactactgcgccgccaatccaacatacggcagcgactggaacgccgagaattggggccagggaacccaagtgacagtgtctagcggtaccggcggaggcggatctggcggcggaggtagcggtggcggaggatctgaattccagatcgtgctgacacagagccctgccatcatgtccgcttctcccggcgagaaagtgaccatgacatgtagcgccagcagcagcgtgtccttcatgcactggtatcagcagaagtccggcacaagccccaagcggtggatctacgataccagcacactggcctctggcgtgccagccagatttggcggatctggcagcggcacatcttacagcctgaccatcagcagcatggaagccgaagatgccgccacctactactgccagcagtggtccagcaatcccctgacatttggagccggcaccaagctggaactgaagagactcgagatccagaaccctgatcctgccgtgtaccagctgcgggatagcaagagcagcgacaagagcgtgtgtctgttcaccgacttcgacagccagaccaacgtgtcccagagcaaggactccgacgtgtacatcaccgataagtgcgtgctggacatgcggagcatggacttcaagagcaactccgccgtggcctggtccaacaagtccgatttcgcctgcgccaacgccttcaacaacagcattatccccgaggacacattcttcccaagcagcgacgtgccctgcgacgtgaagctggtggaaaagagcttcgagacagacaccaacctgaacttccagaacctgagcgtgatcggcttcagaatcctgctgctgaaagtggccggctttaacctgctgatgaccctgcggctgtggtccagccgcgccaagagaagcggatctggcgtgaagcagaccctgaatttcgacctgctgaagctggctggcgacgtggaatccaacccaggccctactagtaccatggactggatttggcgcatccttttccttgtcggcgctgctaccggcgcccattccgggccccaggtgcagctggttgaatctggcggaggactggttcagcctggcggatctctgagactgtcttgtgccgccagcggcaacatcaacagcagaaactgcatgggctggttcagacaggcccctggcaagggaagagaaggcgtggcagctatcggccaagtgaccggcagaacctactacgtggacagcgtgaagggcagattcaccatcagcctggacaacagcaagaacaccctgtacctccagatgaacagcctgagagccgaggacaccgccgtgtactattgtgctgctgcccctggctgtctgctgtctgcacttagaagcgccgactacagaaactggggccagggcacactggtcaccgtttcttctggatccggcggcggaggatctggcggaggcggatctgggggcggaggctctttcgaacaagttcagctgcaacagagcggccctgagctggttaagcctggcgcttctgtgcggatctcttgcaaggccagcggctacaccttcaccagctactacatccactgggtcaagcagcggcctggacagggactcgaatggatcggctggatctaccccggcaacctgaacaccaagtacaacgagaagttcaagggcaaagccacactgaccgccgacaagagcagcagcacagcctacatgcagctgagcagcctgacaagcgaggacagcgccgtgtacttctgcgccagatacgactggtacttcgacgtgtggggagccggaaccaccgtgacagtttcttctacgcgtgaggacctgaagaacgtgttcccacctgaggtggccgtgttcgagcctagcaaggccgagatcgcccacacccagaaagccaccctcgtgtgcctggctaccggcttctaccccgaccatgtggaactgtcttggtgggtcaacggcaaagaggtgcacagcggcgtgtgtaccgacccccagccactgaaagaacagcccgccctgaacgacagccggtactgcctgagcagcagactgagagtgtccgccaccttctggcagaacccccggaaccacttcagatgccaggtgcagttctacggcctgagcgagaacgacgagtggacccaggacagagccaagcccgtgacccagatcgtgtctgccgaagcctggggcagagccgattgcggcatcaccagcgccagctaccaccagggcgtgctgagcgccaccatcctgtacgagatcctgctgggcaaggccaccctgtacgccgtgctggtgtctgccctggtgctgatggctatggtcaagcggaaggacagccgggga

SEQ ID NO: 39038 - DNA, 2694 bp, synthetic construct
  source 1..2694: mol_type = other DNA
atggccttaccagtgaccgccttgctcctgccgctggccttgctgctccacgccgccaggccggaagtgcagctggttgaatctggcggaggactggttcaggctggcggatctctgagactgtcttgtgccgccagcggcagaacctttagcatgggctggtttagacaggcccctggcaaagagagagagttcgtcgccgccatcacatactctggcggcagcccttactacgccgactctgtgaagggcagattcaccatcagccgggacaacgccaagaacaccgtgtacctccagatgaacagcctgaagcctgaggacaccgccgtgtactactgcgccgccaatccaacatacggcagcgactggaacgccgagaattggggccagggaacccaagtgacagtgtctagcggtaccggcggaggcggatctggcggcggaggtagcggtggcggaggatctgaattccagatcgtgctgacacagagccctgccatcatgtccgcttctcccggcgagaaagtgaccatgacatgtagcgccagcagcagcgtgtccttcatgcactggtatcagcagaagtccggcacaagccccaagcggtggatctacgataccagcacactggcctctggcgtgccagccagatttggcggatctggcagcggcacatcttacagcctgaccatcagcagcatggaagccgaagatgccgccacctactactgccagcagtggtccagcaatcccctgacatttggagccggcaccaagctggaactgaagagactcgaggacctgaagaacgtgttcccacctgaggtggccgtgttcgagcctagcgaggccgagatcagccacacccagaaagccaccctcgtgtgcctggctaccggcttctaccccgaccatgtggaactgtcttggtgggtcaacggcaaagaggtgcacagcggcgtgtgtaccgacccccagccactgaaagaacagcccgccctgaacgacagccggtactgcctgagcagcagactgagagtgtccgccaccttctggcagaacccccggaaccacttcagatgccaggtgcagttctacggcctgagcgagaacgacgagtggacccaggacagagccaagcccgtgacccagatcgtgtctgccgaagcctggggcagagccgattgcggctttaccagcgagagctaccagcagggcgtgctgagcgccaccatcctgtacgagatcctgctgggcaaggccaccctgtacgccgtgctggtgtctgccctggtgctgatggctatggtcaagcggaaggacagccggggaagggccaagcgatctggatctggagcaacaaacttctcactactcaaacaagcaggtgacgtggaggagaatcccgggcctactagtaccatggactggatttggcgcatccttttccttgtcggcgctgctaccggcgcccattccgggccccaggtgcagctggttgaatctggcggaggactggttcagcctggcggatctctgagactgtcttgtgccgccagcggcaacatcaacagcagaaactgcatgggctggttcagacaggcccctggcaagggaagagaaggcgtggcagctatcggccaagtgaccggcagaacctactacgtggacagcgtgaagggcagattcaccatcagcctggacaacagcaagaacaccctgtacctccagatgaacagcctgagagccgaggacaccgccgtgtactattgtgctgctgcccctggctgtctgctgtctgcacttagaagcgccgactacagaaactggggccagggcacactggtcaccgtttcttctggatccggcggcggaggatctggcggaggcggatctgggggcggaggctctttcgaacaagttcagctgcaacagagcggccctgagctggttaagcctggcgcttctgtgcggatctcttgcaaggccagcggctacaccttcaccagctactacatccactgggtcaagcagcggcctggacagggactcgaatggatcggctggatctaccccggcaacctgaacaccaagtacaacgagaagttcaagggcaaagccacactgaccgccgacaagagcagcagcacagcctacatgcagctgagcagcctgacaagcgaggacagcgccgtgtacttctgcgccagatacgactggtacttcgacgtgtggggagccggaaccaccgtgacagtttcttctacgcgtatccagaaccctgatcctgccgtgtaccagctgcgggatagcaagagcagcgacaagagcgtgtgtctgttcaccgacttcgacagccagaccaacgtgtcccagagcaaggactccgacgtgtacatcaccgataagtgcgtgctggacatgcggagcatggacttcaagagcaactccgccgtggcctggtccaacaagtccgatttcgcctgcgccaacgccttcaacaacagcattatccccgaggacacattcttcccaagccccgagagcagctgcgacgtgaagctggtggaaaagagcttcgagacagacaccaacctgaacttccagaacctgagcgtgatcggcttcagaatcctgctgctgaaagtggccggctttaacctgctgatgaccctgcggctgtggtccagc

SEQ ID NO: 39039 - DNA, 2694 bp, synthetic construct
  source 1..2694: mol_type = other DNA
atggccttaccagtgaccgccttgctcctgccgctggccttgctgctccacgccgccaggccggaagtgcaactggttgaatccggtggcggcctggtgcaagcaggcggatctctcagacttagctgtgccgcctccggcagaaccttcacaatgggatggtttaggcaggctccagggaaagagagagagttcgtcgccgccatctctctgtctcccacactggcctactacgccgactctgtgaaaggccggttcaccatctccagagataatgccaagaacaccgtggtgctgcaaatgaactctctgaaacccgaggatacagccctgtactattgtgccgctgaccggaagtccgtgatgagcatcagacccgattactggggacagggcacacaagtcacagtgtcctctggtaccggcggaggcggatctggcggcggaggtagcggtggcggaggatctgaattccagatcgtgctgacacagagccctgccatcatgtccgcttctcccggcgagaaagtgaccatgacatgtagcgccagcagcagcgtgtccttcatgcactggtatcagcagaagtccggcacaagccccaagcggtggatctacgataccagcacactggcctctggcgtgccagccagatttggcggatctggcagcggcacatcttacagcctgaccatcagcagcatggaagccgaagatgccgccacctactactgccagcagtggtccagcaatcccctgacatttggagccggcaccaagctggaactgaagagactcgaggacctgaagaacgtgttcccacctgaggtggccgtgttcgagcctagcgaggccgagatcagccacacccagaaagccaccctcgtgtgcctggctaccggcttctaccccgaccatgtggaactgtcttggtgggtcaacggcaaagaggtgcacagcggcgtgtgtaccgacccccagccactgaaagaacagcccgccctgaacgacagccggtactgcctgagcagcagactgagagtgtccgccaccttctggcagaacccccggaaccacttcagatgccaggtgcagttctacggcctgagcgagaacgacgagtggacccaggacagagccaagcccgtgacccagatcgtgtctgccgaagcctggggcagagccgattgcggctttaccagcgagagctaccagcagggcgtgctgagcgccaccatcctgtacgagatcctgctgggcaaggccaccctgtacgccgtgctggtgtctgccctggtgctgatggctatggtcaagcggaaggacagccggggaagggccaagcgatctggatctggagcaacaaacttctcactactcaaacaagcaggtgacgtggaggagaatcccgggcctactagtaccatggactggatttggcgcatccttttccttgtcggcgctgctaccggcgcccattccgggccccaggtgcagctggttgaatctggcggaggactggttcagcctggcggatctctgagactgtcttgtgccgccagcggcaacatcaacagcagaaactgcatgggctggttcagacaggcccctggcaagggaagagaaggcgtggcagctatcggccaagtgaccggcagaacctactacgtggacagcgtgaagggcagattcaccatcagcctggacaacagcaagaacaccctgtacctccagatgaacagcctgagagccgaggacaccgccgtgtactattgtgctgctgcccctggctgtctgctgtctgcacttagaagcgccgactacagaaactggggccagggcacactggtcaccgtttcttctggatccggcggcggaggatctggcggaggcggatctgggggcggaggctctttcgaacaagttcagctgcaacagagcggccctgagctggttaagcctggcgcttctgtgcggatctcttgcaaggccagcggctacaccttcaccagctactacatccactgggtcaagcagcggcctggacagggactcgaatggatcggctggatctaccccggcaacctgaacaccaagtacaacgagaagttcaagggcaaagccacactgaccgccgacaagagcagcagcacagcctacatgcagctgagcagcctgacaagcgaggacagcgccgtgtacttctgcgccagatacgactggtacttcgacgtgtggggagccggaaccaccgtgacagtttcttctacgcgtatccagaaccctgatcctgccgtgtaccagctgcgggatagcaagagcagcgacaagagcgtgtgtctgttcaccgacttcgacagccagaccaacgtgtcccagagcaaggactccgacgtgtacatcaccgataagtgcgtgctggacatgcggagcatggacttcaagagcaactccgccgtggcctggtccaacaagtccgatttcgcctgcgccaacgccttcaacaacagcattatccccgaggacacattcttcccaagccccgagagcagctgcgacgtgaagctggtggaaaagagcttcgagacagacaccaacctgaacttccagaacctgagcgtgatcggcttcagaatcctgctgctgaaagtggccggctttaacctgctgatgaccctgcggctgtggtccagc

SEQ ID NO: 39040 - DNA, 2706 bp, synthetic construct
  source 1..2706: mol_type = other DNA
atggccttaccagtgaccgccttgctcctgccgctggccttgctgctccacgccgccaggccgcaggttcagctgcaagagtctggccctggcctggtcaagcctagccaaacactgagcctgacctgtaccgtgtctggcggctctatcaccaccggcgagttctactggaactggttcagacagcctcctggcaaaggactggaatggatgggagccattgccgccagcggcagcacaacatacagccctagcttcgagagccggaccagcatcagcagagacaccagcaagaatcagttcagcctgaagctgagcagcgtgacagccgccgatacagccgtgtattactgcggcagatcctttggagtggccgccgtgacaaccggccagaatagaggacagggcaccctggtcacagtgtctagcggtaccggcggaggcggatctggcggcggaggtagcggtggcggaggatctgaattccagatcgtgctgacacagagccctgccatcatgtccgcttctcccggcgagaaagtgaccatgacatgtagcgccagcagcagcgtgtccttcatgcactggtatcagcagaagtccggcacaagccccaagcggtggatctacgataccagcacactggcctctggcgtgccagccagatttggcggatctggcagcggcacatcttacagcctgaccatcagcagcatggaagccgaagatgccgccacctactactgccagcagtggtccagcaatcccctgacatttggagccggcaccaagctggaactgaagagactcgaggacctgaagaacgtgttcccacctgaggtggccgtgttcgagcctagcgaggccgagatcagccacacccagaaagccaccctcgtgtgcctggctaccggcttctaccccgaccatgtggaactgtcttggtgggtcaacggcaaagaggtgcacagcggcgtgtgtaccgacccccagccactgaaagaacagcccgccctgaacgacagccggtactgcctgagcagcagactgagagtgtccgccaccttctggcagaacccccggaaccacttcagatgccaggtgcagttctacggcctgagcgagaacgacgagtggacccaggacagagccaagcccgtgacccagatcgtgtctgccgaagcctggggcagagccgattgcggctttaccagcgagagctaccagcagggcgtgctgagcgccaccatcctgtacgagatcctgctgggcaaggccaccctgtacgccgtgctggtgtctgccctggtgctgatggctatggtcaagcggaaggacagccggggaagggccaagcgatctggatctggagcaacaaacttctcactactcaaacaagcaggtgacgtggaggagaatcccgggcctactagtaccatggactggatttggcgcatccttttccttgtcggcgctgctaccggcgcccattccgggccccaggtgcagctggttgaatctggcggaggactggttcagcctggcggatctctgagactgtcttgtgccgccagcggcaacatcaacagcagaaactgcatgggctggttcagacaggcccctggcaagggaagagaaggcgtggcagctatcggccaagtgaccggcagaacctactacgtggacagcgtgaagggcagattcaccatcagcctggacaacagcaagaacaccctgtacctccagatgaacagcctgagagccgaggacaccgccgtgtactattgtgctgctgcccctggctgtctgctgtctgcacttagaagcgccgactacagaaactggggccagggcacactggtcaccgtttcttctggatccggcggcggaggatctggcggaggcggatctgggggcggaggctctttcgaacaagttcagctgcaacagagcggccctgagctggttaagcctggcgcttctgtgcggatctcttgcaaggccagcggctacaccttcaccagctactacatccactgggtcaagcagcggcctggacagggactcgaatggatcggctggatctaccccggcaacctgaacaccaagtacaacgagaagttcaagggcaaagccacactgaccgccgacaagagcagcagcacagcctacatgcagctgagcagcctgacaagcgaggacagcgccgtgtacttctgcgccagatacgactggtacttcgacgtgtggggagccggaaccaccgtgacagtttcttctacgcgtatccagaaccctgatcctgccgtgtaccagctgcgggatagcaagagcagcgacaagagcgtgtgtctgttcaccgacttcgacagccagaccaacgtgtcccagagcaaggactccgacgtgtacatcaccgataagtgcgtgctggacatgcggagcatggacttcaagagcaactccgccgtggcctggtccaacaagtccgatttcgcctgcgccaacgccttcaacaacagcattatccccgaggacacattcttcccaagccccgagagcagctgcgacgtgaagctggtggaaaagagcttcgagacagacaccaacctgaacttccagaacctgagcgtgatcggcttcagaatcctgctgctgaaagtggccggctttaacctgctgatgaccctgcggctgtggtccagc

SEQ ID NO: 39041 - DNA, 1461 bp, synthetic construct
  source 1..1461: mol_type = other DNA
atggccttaccagtgaccgccttgctcctgccgctggccttgctgctccacgccgccaggccggacatccagatgacacagagccctagcagcctgtctgccagcgtgggagacagagtgaccatcacctgtagagccagccagagcatcagcagctacctgaactggtatcagcagaagcccggcaaggcccctaaactgctgatctatgccgccagctctctccagagcggagtgcctagcagattttctggcagcggctccggcaccgatttcaccctgacaatatccagcctccagcctgaggacttcgccacctactactgccagcagagctacagcacccctctgacctttggacagggcaccaaggtggaaatcaagggcggaggcggaagtggaggcggaggatctggcggcggaggctctgaggtgcagctggttgaatctggcggaggactggttcagcctggcggatctctgagactgtcttgtgctgccagcggcttcaccttcagctcctacgccatgagctgggtccgacaggctcctggcaaaggactggaatgggtgtccgccatctctggctcaggcggcagcacatattacgccgactctgtgaagggcagattcaccatcagccgggacaacagcaagaacaccctgtacctccagatgaactccctgagagccgaggacaccgccgtgtactattgtgccagactgggctaccccaccaccacactgctgccctttgattattggggccagggcaccctggtcaccgtttcttctacgcgtaaaattgaagttatgtatcctcctccttacctagacaatgagaagagcaatggaaccattatccatgtgaaagggaaacacctttgtccaagtcccctatttcccggaccttctaagcccttttgggtgctggtggtggttgggggagtcctggcttgctatagcttgctagtaacagtggcctttattattttctgggtgaggagtaagaggagcaggctcctgcacagtgactacatgaacatgactccacgccgccccggacccacccgcaagcattaccagccctatgccccaccacgcgacttcgcagcctatcgctccagagtgaagttcagcaggagcgcagacgcccccgcgtaccagcagggccagaaccagctctataacgagctcaatctaggacgaagagaggagtacgatgttttggacaagagacgtggccgggaccctgagatggggggaaagccgagaaggaagaaccctcaggaaggcctgtacaatgaactgcagaaagataagatggcggaggcctacagtgagattgggatgaaaggcgagcgccggaggggcaaggggcacgatggcctttaccagggtctcagtacagccaccaaggacacctacgacgcccttcacatgcaggccctgccccctcgc

SEQ ID NO: 39042 - DNA, 1479 bp, synthetic construct
  source 1..1479: mol_type = other DNA
atggccttaccagtgaccgccttgctcctgccgctggccttgctgctccacgccgccaggccggacatccagatgacacagagccctagcagcctgtctgccagcgtgggagacagagtgaccatcacctgtagagccagccagagcatcagcagctacctgaactggtatcagcagaagcccggcaaggcccctaaactgctgatctatgccgccagctctctccagagcggagtgcctagcagattttctggcagcggctccggcaccgatttcaccctgacaatatccagcctccagcctgaggacttcgccacctactactgccagcagagctacagcacccctctgacctttggacagggcaccaaggtggaaatcaagggcggaggcggaagtggaggcggaggatctggcggcggaggctctgaggtgcagctggttgaatctggcggaggactggttcagcctggcggatctctgagactgtcttgtgctgccagcggcttcaccttcagctcctacgccatgagctgggtccgacaggctcctggcaaaggactggaatgggtgtccgccatctctggctcaggcggcagcacatattacgccgactctgtgaagggcagattcaccatcagccgggacaacagcaagaacaccctgtacctccagatgaactccctgagagccgaggacaccgccgtgtactattgtgccagactgggctaccccaccaccacactgctgccctttgattattggggccagggcaccctggtcaccgtttcttctacgcgtgcgaagcccaccacgacgccagcgccgcgaccaccaacaccggcgcccaccatcgcgtcgcagcccctgtccctgcgcccagaggcgtgccggccagcggcggggggcgcagtgcacacgagggggctggacttcgcctgtgacatctacatctgggcgcccttggccgggacttgtggggtccttctcctgtcactggttatcaccctttactgcaaacggggcagaaagaaactcctgtatatattcaaacaaccatttatgagaccagtacaaactactcaagaggaagatggctgtagctgccgatttccagaagaagaagaaggaggatgtgaactgagagtgaagttcagcaggagcgcagacgcccccgcgtaccagcagggccagaaccagctctataacgagctgaatctaggacgaagagaggagtacgatgttttggacaagagacgtggccgggaccctgagatggggggaaagccgagaaggaagaaccctcaggaaggcctgtacaatgaactgcagaaagataagatggcggaggcctacagtgagattgggatgaaaggcgagcgccggaggggcaaggggcacgatggcctttaccagggtctcagtacagccaccaaggacacctacgacgcccttcacatgcaggccctgccccctcgc

SEQ ID NO: 39043 - DNA, 1479 bp, synthetic construct
  source 1..1479: mol_type = other DNA
atggccttaccagtgaccgccttgctcctgccgctggccttgctgctccacgccgccaggccggaggtgcagctggttgaatctggcggaggactggttcagcctggcggatctctgagactgtcttgtgctgccagcggcttcaccttcagctcctacgccatgagctgggtccgacaggctcctggcaaaggactggaatgggtgtccgccatctctggctcaggcggcagcacatattacgccgactctgtgaagggcagattcaccatcagccgggacaacagcaagaacaccctgtacctccagatgaactccctgagagccgaggacaccgccgtgtactattgtgccagactgggctaccccaccaccacactgctgccctttgattattggggccagggcaccctggtcaccgtttcttctggcggaggcggaagtggaggcggaggatctggcggcggaggctctgacatccagatgacacagagccctagcagcctgtctgccagcgtgggagacagagtgaccatcacctgtagagccagccagagcatcagcagctacctgaactggtatcagcagaagcccggcaaggcccctaaactgctgatctatgccgccagctctctccagagcggagtgcctagcagattttctggcagcggctccggcaccgatttcaccctgacaatatccagcctccagcctgaggacttcgccacctactactgccagcagagctacagcacccctctgacctttggacagggcaccaaggtggaaatcaagacgcgtgcgaagcccaccacgacgccagcgccgcgaccaccaacaccggcgcccaccatcgcgtcgcagcccctgtccctgcgcccagaggcgtgccggccagcggcggggggcgcagtgcacacgagggggctggacttcgcctgtgacatctacatctgggcgcccttggccgggacttgtggggtccttctcctgtcactggttatcaccctttactgcaaacggggcagaaagaaactcctgtatatattcaaacaaccatttatgagaccagtacaaactactcaagaggaagatggctgtagctgccgatttccagaagaagaagaaggaggatgtgaactgagagtgaagttcagcaggagcgcagacgcccccgcgtaccagcagggccagaaccagctctataacgagctgaatctaggacgaagagaggagtacgatgttttggacaagagacgtggccgggaccctgagatggggggaaagccgagaaggaagaaccctcaggaaggcctgtacaatgaactgcagaaagataagatggcggaggcctacagtgagattgggatgaaaggcgagcgccggaggggcaaggggcacgatggcctttaccagggtctcagtacagccaccaaggacacctacgacgcccttcacatgcaggccctgccccctcgc

SEQ ID NO: 39044 - DNA, 1878 bp, synthetic construct
  source 1..1878: mol_type = other DNA
atggccttaccagtgaccgccttgctcctgccgctggccttgctgctccacgccgccaggccggacatccagatgacacagagccctagcagcctgtctgccagcgtgggagacagagtgaccatcacctgtagagccagccagagcatcagcagctacctgaactggtatcagcagaagcccggcaaggcccctaaactgctgatctatgccgccagctctctccagagcggagtgcctagcagattttctggcagcggctccggcaccgatttcaccctgacaatatccagcctccagcctgaggacttcgccacctactactgccagcagagctacagcacccctctgacctttggacagggcaccaaggtggaaatcaagctcgagatccagaaccctgatcctgccgtgtaccagctgcgggatagcaagagcagcgacaagagcgtgtgtctgttcaccgacttcgacagccagaccaacgtgtcccagagcaaggactccgacgtgtacatcaccgataagtgcgtgctggacatgcggagcatggacttcaagagcaactccgccgtggcctggtccaacaagtccgatttcgcctgcgccaacgccttcaacaacagcattatccccgaggacacattcttcccaagcagcgacgtgccctgcgacgtgaagctggtggaaaagagcttcgagacagacaccaacctgaacttccagaacctgagcgtgatcggcttcagaatcctgctgctgaaagtggccggctttaacctgctgatgaccctgcggctgtggtccagccgcgccaagagaagcggatctggcgtgaagcagaccctgaatttcgacctgctgaagctggctggcgacgtggaatccaacccaggccctactagtatggactggatttggcgcatccttttccttgtcggcgctgctaccggcgcgcattccttcgaagaggtgcagctggttgaatctggcggaggactggttcagcctggcggatctctgagactgtcttgtgctgccagcggcttcaccttcagctcctacgccatgagctgggtccgacaggctcctggcaaaggactggaatgggtgtccgccatctctggctcaggcggcagcacatattacgccgactctgtgaagggcagattcaccatcagccgggacaacagcaagaacaccctgtacctccagatgaactccctgagagccgaggacaccgccgtgtactattgtgccagactgggctaccccaccaccacactgctgccctttgattattggggccagggcaccctggtcaccgtttcttctacgcgtgaggacctgaagaacgtgttcccacctgaggtggccgtgttcgagcctagcaaggccgagatcgcccacacccagaaagccaccctcgtgtgcctggctaccggcttctaccccgaccatgtggaactgtcttggtgggtcaacggcaaagaggtgcacagcggcgtgtgtaccgacccccagccactgaaagaacagcccgccctgaacgacagccggtactgcctgagcagcagactgagagtgtccgccaccttctggcagaacccccggaaccacttcagatgccaggtgcagttctacggcctgagcgagaacgacgagtggacccaggacagagccaagcccgtgacccagatcgtgtctgccgaagcctggggcagagccgattgcggcatcaccagcgccagctaccaccagggcgtgctgagcgccaccatcctgtacgagatcctgctgggcaaggccaccctgtacgccgtgctggtgtctgccctggtgctgatggctatggtcaagcggaaggacagccgggga

SEQ ID NO: 39045 - DNA, 1866 bp, synthetic construct
  source 1..1866: mol_type = other DNA
atggccttaccagtgaccgccttgctcctgccgctggccttgctgctccacgccgccaggccggacatccagatgacacagagccctagcagcctgtctgccagcgtgggagacagagtgaccatcacctgtagagccagccagagcatcagcagctacctgaactggtatcagcagaagcccggcaaggcccctaaactgctgatctatgccgccagctctctccagagcggagtgcctagcagattttctggcagcggctccggcaccgatttcaccctgacaatatccagcctccagcctgaggacttcgccacctactactgccagcagagctacagcacccctctgacctttggacagggcaccaaggtggaaatcaagctcgaggacctgaagaacgtgttcccacctgaggtggccgtgttcgagcctagcaaggccgagatcgcccacacccagaaagccaccctcgtgtgcctggctaccggcttctaccccgaccatgtggaactgtcttggtgggtcaacggcaaagaggtgcacagcggcgtgtgtaccgacccccagccactgaaagaacagcccgccctgaacgacagccggtactgcctgagcagcagactgagagtgtccgccaccttctggcagaacccccggaaccacttcagatgccaggtgcagttctacggcctgagcgagaacgacgagtggacccaggacagagccaagcccgtgacccagatcgtgtctgccgaagcctggggcagagccgattgcggcatcaccagcgccagctaccaccagggcgtgctgagcgccaccatcctgtacgagatcctgctgggcaaggccaccctgtacgccgtgctggtgtctgccctggtgctgatggctatggtcaagcggaaggacagccggggaagggccaagcgatctggatctggagcaacaaacttctcactactcaaacaagcaggtgacgtggaggagaatcccgggcctactagtatggactggatttggcgcatccttttccttgtcggcgctgctaccggcgcgcattccttcgaagaggtgcagctggttgaatctggcggaggactggttcagcctggcggatctctgagactgtcttgtgctgccagcggcttcaccttcagctcctacgccatgagctgggtccgacaggctcctggcaaaggactggaatgggtgtccgccatctctggctcaggcggcagcacatattacgccgactctgtgaagggcagattcaccatcagccgggacaacagcaagaacaccctgtacctccagatgaactccctgagagccgaggacaccgccgtgtactattgtgccagactgggctaccccaccaccacactgctgccctttgattattggggccagggcaccctggtcaccgtttcttctacgcgtatccagaaccctgatcctgccgtgtaccagctgcgggatagcaagagcagcgacaagagcgtgtgtctgttcaccgacttcgacagccagaccaacgtgtcccagagcaaggactccgacgtgtacatcaccgataagtgcgtgctggacatgcggagcatggacttcaagagcaactccgccgtggcctggtccaacaagtccgatttcgcctgcgccaacgccttcaacaacagcattatccccgaggacacattcttcccaagcagcgacgtgccctgcgacgtgaagctggtggaaaagagcttcgagacagacaccaacctgaacttccagaacctgagcgtgatcggcttcagaatcctgctgctgaaagtggccggctttaacctgctgatgaccctgcggctgtggtccagc

SEQ ID NO: 39046 - DNA, 1866 bp, synthetic construct
  source 1..1866: mol_type = other DNA
atggccttaccagtgaccgccttgctcctgccgctggccttgctgctccacgccgccaggccggacatccagatgacacagagccctagcagcctgtctgccagcgtgggagacagagtgaccatcacctgtagagccagccagagcatcagcagctacctgaactggtatcagcagaagcccggcaaggcccctaaactgctgatctatgccgccagctctctccagagcggagtgcctagcagattttctggcagcggctccggcaccgatttcaccctgacaatatccagcctccagcctgaggacttcgccacctactactgccagcagagctacagcacccctctgacctttggacagggcaccaaggtggaaatcaagctcgaggacctgaagaacgtgttcccacctgaggtggccgtgttcgagcctagcgaggccgagatcagccacacccagaaagccaccctcgtgtgcctggctaccggcttctaccccgaccatgtggaactgtcttggtgggtcaacggcaaagaggtgcacagcggcgtgtgtaccgacccccagccactgaaagaacagcccgccctgaacgacagccggtactgcctgagcagcagactgagagtgtccgccaccttctggcagaacccccggaaccacttcagatgccaggtgcagttctacggcctgagcgagaacgacgagtggacccaggacagagccaagcccgtgacccagatcgtgtctgccgaagcctggggcagagccgattgcggctttaccagcgagagctaccagcagggcgtgctgagcgccaccatcctgtacgagatcctgctgggcaaggccaccctgtacgccgtgctggtgtctgccctggtgctgatggctatggtcaagcggaaggacagccggggaagggccaagcgatctggatctggagcaacaaacttctcactactcaaacaagcaggtgacgtggaggagaatcccgggcctactagtatggactggatttggcgcatccttttccttgtcggcgctgctaccggcgcgcattccttcgaagaggtgcagctggttgaatctggcggaggactggttcagcctggcggatctctgagactgtcttgtgctgccagcggcttcaccttcagctcctacgccatgagctgggtccgacaggctcctggcaaaggactggaatgggtgtccgccatctctggctcaggcggcagcacatattacgccgactctgtgaagggcagattcaccatcagccgggacaacagcaagaacaccctgtacctccagatgaactccctgagagccgaggacaccgccgtgtactattgtgccagactgggctaccccaccaccacactgctgccctttgattattggggccagggcaccctggtcaccgtttcttctacgcgtatccagaaccctgatcctgccgtgtaccagctgcgggatagcaagagcagcgacaagagcgtgtgtctgttcaccgacttcgacagccagaccaacgtgtcccagagcaaggactccgacgtgtacatcaccgataagtgcgtgctggacatgcggagcatggacttcaagagcaactccgccgtggcctggtccaacaagtccgatttcgcctgcgccaacgccttcaacaacagcattatccccgaggacacattcttcccaagccccgagagcagctgcgacgtgaagctggtggaaaagagcttcgagacagacaccaacctgaacttccagaacctgagcgtgatcggcttcagaatcctgctgctgaaagtggccggctttaacctgctgatgaccctgcggctgtggtccagc

SEQ ID NO: 39047 - DNA, 1878 bp, synthetic construct
  source 1..1878: mol_type = other DNA
atggccttaccagtgaccgccttgctcctgccgctggccttgctgctccacgccgccaggccggacatccagatgacacagagccctagcagcctgtctgccagcgtgggagacagagtgaccatcacctgtagagccagccagagcatcagcagctacctgaactggtatcagcagaagcccggcaaggcccctaaactgctgatctatgccgccagctctctccagagcggagtgcctagcagattttctggcagcggctccggcaccgatttcaccctgacaatatccagcctccagcctgaggacttcgccacctactactgccagcagagctacagcacccctctgacctttggacagggcaccaaggtggaaatcaagctcgagatccagaaccctgatcctgccgtgtaccagctgcgggatagcaagagcagcgacaagagcgtgtgtctgttcaccgacttcgacagccagaccaacgtgtcccagagcaaggactccgacgtgtacatcaccgataagtgcgtgctggacatgcggagcatggacttcaagagcaactccgccgtggcctggtccaacaagtccgatttcgcctgcgccaacgccttcaacaacagcattatccccgaggacacattcttcccaagccccgagagcagctgcgacgtgaagctggtggaaaagagcttcgagacagacaccaacctgaacttccagaacctgagcgtgatcggcttcagaatcctgctgctgaaagtggccggctttaacctgctgatgaccctgcggctgtggtccagccgcgccaagagaagcggatctggcgtgaagcagaccctgaatttcgacctgctgaagctggctggcgacgtggaatccaacccaggccctactagtatggactggatttggcgcatccttttccttgtcggcgctgctaccggcgcgcattccttcgaagaggtgcagctggttgaatctggcggaggactggttcagcctggcggatctctgagactgtcttgtgctgccagcggcttcaccttcagctcctacgccatgagctgggtccgacaggctcctggcaaaggactggaatgggtgtccgccatctctggctcaggcggcagcacatattacgccgactctgtgaagggcagattcaccatcagccgggacaacagcaagaacaccctgtacctccagatgaactccctgagagccgaggacaccgccgtgtactattgtgccagactgggctaccccaccaccacactgctgccctttgattattggggccagggcaccctggtcaccgtttcttctacgcgtgaggacctgaagaacgtgttcccacctgaggtggccgtgttcgagcctagcgaggccgagatcagccacacccagaaagccaccctcgtgtgcctggctaccggcttctaccccgaccatgtggaactgtcttggtgggtcaacggcaaagaggtgcacagcggcgtgtgtaccgacccccagccactgaaagaacagcccgccctgaacgacagccggtactgcctgagcagcagactgagagtgtccgccaccttctggcagaacccccggaaccacttcagatgccaggtgcagttctacggcctgagcgagaacgacgagtggacccaggacagagccaagcccgtgacccagatcgtgtctgccgaagcctggggcagagccgattgcggctttaccagcgagagctaccagcagggcgtgctgagcgccaccatcctgtacgagatcctgctgggcaaggccaccctgtacgccgtgctggtgtctgccctggtgctgatggctatggtcaagcggaaggacagccgggga

SEQ ID NO: 39048 - DNA, 1914 bp, synthetic construct
  source 1..1914: mol_type = other DNA
atggccttaccagtgaccgccttgctcctgccgctggccttgctgctccacgccgccaggccgctcgaggaggacctgaagaacgtgttcccacctgaggtggccgtgttcgagcctagcaaggccgagatcgcccacacccagaaagccaccctcgtgtgcctggctaccggcttctaccccgaccatgtggaactgtcttggtgggtcaacggcaaagaggtgcacagcggcgtgtgtaccgacccccagccactgaaagaacagcccgccctgaacgacagccggtactgcctgagcagcagactgagagtgtccgccaccttctggcagaacccccggaaccacttcagatgccaggtgcagttctacggcctgagcgagaacgacgagtggacccaggacagagccaagcccgtgacccagatcgtgtctgccgaagcctggggcagagccgattgcggcatcaccagcgccagctaccaccagggcgtgctgagcgccaccatcctgtacgagatcctgctgggcaaggccaccctgtacgccgtgctggtgtctgccctggtgctgatggctatggtcaagcggaaggacagccggggaagggccaagcgatctggatctggagcaacaaacttctcactactcaaacaagcaggtgacgtggaggagaatcccgggcctactagcatggccttaccagtgaccgccttgctcctgccgctggccttgctgctccacgccgccaggccggacatccagatgacacagagccctagcagcctgtctgccagcgtgggagacagagtgaccatcacctgtagagccagccagagcatcagcagctacctgaactggtatcagcagaagcccggcaaggcccctaaactgctgatctatgccgccagctctctccagagcggagtgcctagcagattttctggcagcggctccggcaccgatttcaccctgacaatatccagcctccagcctgaggacttcgccacctactactgccagcagagctacagcacccctctgacctttggacagggcaccaaggtggaaatcaagggcggaggcggaagtggaggcggaggatctggcggcggaggctctgaggtgcagctggttgaatctggcggaggactggttcagcctggcggatctctgagactgtcttgtgctgccagcggcttcaccttcagctcctacgccatgagctgggtccgacaggctcctggcaaaggactggaatgggtgtccgccatctctggctcaggcggcagcacatattacgccgactctgtgaagggcagattcaccatcagccgggacaacagcaagaacaccctgtacctccagatgaactccctgagagccgaggacaccgccgtgtactattgtgccagactgggctaccccaccaccacactgctgccctttgattattggggccagggcaccctggtcaccgtttcttctacgcgtatccagaaccctgatcctgccgtgtaccagctgcgggatagcaagagcagcgacaagagcgtgtgtctgttcaccgacttcgacagccagaccaacgtgtcccagagcaaggactccgacgtgtacatcaccgataagtgcgtgctggacatgcggagcatggacttcaagagcaactccgccgtggcctggtccaacaagtccgatttcgcctgcgccaacgccttcaacaacagcattatccccgaggacacattcttcccaagcagcgacgtgccctgcgacgtgaagctggtggaaaagagcttcgagacagacaccaacctgaacttccagaacctgagcgtgatcggcttcagaatcctgctgctgaaagtggccggctttaacctgctgatgaccctgcggctgtggtccagc

SEQ ID NO: 39049 - DNA, 1935 bp, synthetic construct
  source 1..1935: mol_type = other DNA
atggccttaccagtgaccgccttgctcctgccgctggccttgctgctccacgccgccaggccgctcgagggctccggcgatcgccctgatcctgccgtgtaccagctgcgggatagcaagagcagcgacaagagcgtgtgtctgttcaccgacttcgacagccagaccaacgtgtcccagagcaaggactccgacgtgtacatcaccgataagtgcgtgctggacatgcggagcatggacttcaagagcaactccgccgtggcctggtccaacaagtccgatttcgcctgcgccaacgccttcaacaacagcattatccccgaggacacattcttcccaagccccgagagcagctgcgacgtgaagctggtggaaaagagcttcgagacagacaccaacctgaacttccagaacctgagcgtgatcggcttcagaatcctgctgctgaaagtggccggctttaacctgctgatgaccctgcggctgtggtccagctctagtcgcgccaagagaagcggatctggcgtgaagcagaccctgaatttcgacctgctgaagctggctggcgacgtggaatccaacccaggccccactagcatggccttaccagtgaccgccttgctcctgccgctggccttgctgctccacgccgccaggccggacatccagatgacacagagccctagcagcctgtctgccagcgtgggagacagagtgaccatcacctgtagagccagccagagcatcagcagctacctgaactggtatcagcagaagcccggcaaggcccctaaactgctgatctatgccgccagctctctccagagcggagtgcctagcagattttctggcagcggctccggcaccgatttcaccctgacaatatccagcctccagcctgaggacttcgccacctactactgccagcagagctacagcacccctctgacctttggacagggcaccaaggtggaaatcaagggcggaggcggaagtggaggcggaggatctggcggcggaggctctgaggtgcagctggttgaatctggcggaggactggttcagcctggcggatctctgagactgtcttgtgctgccagcggcttcaccttcagctcctacgccatgagctgggtccgacaggctcctggcaaaggactggaatgggtgtccgccatctctggctcaggcggcagcacatattacgccgactctgtgaagggcagattcaccatcagccgggacaacagcaagaacaccctgtacctccagatgaactccctgagagccgaggacaccgccgtgtactattgtgccagactgggctaccccaccaccacactgctgccctttgattattggggccagggcaccctggtcaccgtttcttctacgcgtgaggacctgaagaacgtgttcccacctgaggtggccgtgttcgagcctagcgaggccgagatcagccacacccagaaagccaccctcgtgtgcctggctaccggcttctaccccgaccatgtggaactgtcttggtgggtcaacggcaaagaggtgcacagcggcgtgtgtaccgacccccagccactgaaagaacagcccgccctgaacgacagccggtactgcctgagcagcagactgagagtgtccgccaccttctggcagaacccccggaaccacttcagatgccaggtgcagttctacggcctgagcgagaacgacgagtggacccaggacagagccaagcccgtgacccagatcgtgtctgccgaagcctggggcagagccgattgcggctttaccagcgagagctaccagcagggcgtgctgagcgccaccatcctgtacgagatcctgctgggcaaggccaccctgtacgccgtgctggtgtctgccctggtgctgatggctatggtcaagcggaaggacagccgggga

SEQ ID NO: 39050 - DNA, 1866 bp, synthetic construct
  source 1..1866: mol_type = other DNA
atggccttaccagtgaccgccttgctcctgccgctggccttgctgctccacgccgccaggccggacatccagatgacacagagccctagcagcctgtctgccagcgtgggagacagagtgaccatcacctgtagagccagccagagcatcagcagctacctgaactggtatcagcagaagcccggcaaggcccctaaactgctgatctatgccgccagctctctccagagcggagtgcctagcagattttctggcagcggctccggcaccgatttcaccctgacaatatccagcctccagcctgaggacttcgccacctactactgccagcagagctacagcacccctctgacctttggacagggcaccaaggtggaaatcaagctcgaggacctgaagaacgtgttcccacctgaggtggccgtgttcgagcctagcgaggccgagatcagccacacccagaaagccaccctcgtgtgcctggctaccggcttctaccccgaccatgtggaactgtcttggtgggtcaacggcaaagaggtgcacagcggcgtgtctaccgacccccagccactgaaagaacagcccgccctgaacgacagccggtactgcctgagcagcagactgagagtgtccgccaccttctggcagaacccccggaaccacttcagatgccaggtgcagttctacggcctgagcgagaacgacgagtggacccaggacagagccaagcccgtgacccagatcgtgtctgccgaagcctggggcagagccgattgcggctttaccagcgagagctaccagcagggcgtgctgagcgccaccatcctgtacgagatcctgctgggcaaggccaccctgtacgccgtgctggtgtctgccctggtgctgatggctatggtcaagcggaaggacagccggggaagggccaagcgatctggatctggagcaacaaacttctcactactcaaacaagcaggtgacgtggaggagaatcccgggcctactagtatggactggatttggcgcatccttttccttgtcggcgctgctaccggcgcgcattccttcgaagaggtgcagctggttgaatctggcggaggactggttcagcctggcggatctctgagactgtcttgtgctgccagcggcttcaccttcagctcctacgccatgagctgggtccgacaggctcctggcaaaggactggaatgggtgtccgccatctctggctcaggcggcagcacatattacgccgactctgtgaagggcagattcaccatcagccgggacaacagcaagaacaccctgtacctccagatgaactccctgagagccgaggacaccgccgtgtactattgtgccagactgggctaccccaccaccacactgctgccctttgattattggggccagggcaccctggtcaccgtttcttctacgcgtatccagaaccctgatcctgccgtgtaccagctgcgggatagcaagagcagcgacaagagcgtgtgtctgttcaccgacttcgacagccagaccaacgtgtcccagagcaaggactccgacgtgtacatcaccgataagaccgtgctggacatgcggagcatggacttcaagagcaactccgccgtggcctggtccaacaagtccgatttcgcctgcgccaacgccttcaacaacagcattatccccgaggacacattcttcccaagccccgagagcagctgcgacgtgaagctggtggaaaagagcttcgagacagacaccaacctgaacttccagaacctgagcgtgatcggcttcagaatcctgctgctgaaagtggccggctttaacctgctgatgaccctgcggctgtggtccagc

SEQ ID NO: 39051 - DNA, 1890 bp, synthetic construct
  source 1..1890: mol_type = other DNA
atggccttaccagtgaccgccttgctcctgccgctggccttgctgctccacgccgccaggccggacatccagatgacacagagccctagcagcctgtctgccagcgtgggagacagagtgaccatcacctgtagagccagccagagcatcagcagctacctgaactggtatcagcagaagcccggcaaggcccctaaactgctgatctatgccgccagctctctccagagcggagtgcctagcagattttctggcagcggctccggcaccgatttcaccctgacaatatccagcctccagcctgaggacttcgccacctactactgccagcagagctacagcacccctctgacctttggacagggcaccaaggtggaaatcaagctcgaggacaagcagctggacgccgacgtgtcccccaagcctaccatcttcctgccctctatcgccgagacaaagctccagaaggccggcacctacctgtgcctgctggaaaagttcttcccagatgtgattaagatccactggcaggaaaagaagtccaacaccatcctgggcagccaggaaggcaacaccatgaagaccaacgacacctacatgaagttcagctggctgaccgtgcccgagaagtccctggacaaagaacacagatgcatcgtgcggcacgaaaacaacaagaacggcgtggaccaggaaatcatcttcccacccatcaagaccgatgtgattacaatggaccccaaggacaactgctccaaggacgccaacgataccctgctgctccagctgaccaacaccagcgcctactacatgtacttgttgctgctgctgaagtccgtggtgtacttcgccatcatcacatgctgcctgctgcggagaaccgccttctgctgcaacggcgagaagtctagggccaagcgatctggatctggagcaacaaacttctcactactcaaacaagcaggtgacgtggaggagaatcccgggcctactagtatggactggatttggcgcatccttttccttgtcggcgctgctaccggcgcgcattccttcgaagaggtgcagctggttgaatctggcggaggactggttcagcctggcggatctctgagactgtcttgtgctgccagcggcttcaccttcagctcctacgccatgagctgggtccgacaggctcctggcaaaggactggaatgggtgtccgccatctctggctcaggcggcagcacatattacgccgactctgtgaagggcagattcaccatcagccgggacaacagcaagaacaccctgtacctccagatgaactccctgagagccgaggacaccgccgtgtactattgtgccagactgggctaccccaccaccacactgctgccctttgattattggggccagggcaccctggtcaccgtttcttctacgcgtagccagcctcacaccaagcccagcgtgttcgtgatgaagaacggcaccaacgtggcctgcctcgtgaaagagttctaccccaaggacatcaggatcaacctggtgtccagcaagaagatcaccgagttcgaccccgccatcgtgatctcccccagcggcaagtacaacgccgtgaagctggggaagtacgaggacagcaacagcgtgacctgctccgtgcagcacgacaacaagaccgtgcacagcaccgactttgaagtgaaaaccgactccaccgaccacgtgaagcccaaagagacagagaacaccaagcagcccagcaagagctgccacaagcccaaggccatcgtgcacaccgagaaagtgaacatgatgagcctgaccgtgctgggcctgcggatgctgttcgccaaaaccgtggccgtgaacttcctgctgaccgccaagctgttcttcctc

SEQ ID NO: 39052 - DNA, 1890 bp, synthetic construct
  source 1..1890: mol_type = other DNA
atggccttaccagtgaccgccttgctcctgccgctggccttgctgctccacgccgccaggccggacatccagatgacacagagccctagcagcctgtctgccagcgtgggagacagagtgaccatcacctgtagagccagccagagcatcagcagctacctgaactggtatcagcagaagcccggcaaggcccctaaactgctgatctatgccgccagctctctccagagcggagtgcctagcagattttctggcagcggctccggcaccgatttcaccctgacaatatccagcctccagcctgaggacttcgccacctactactgccagcagagctacagcacccctctgacctttggacagggcaccaaggtggaaatcaagctcgagagccagcctcacaccaagcccagcgtgttcgtgatgaagaacggcaccaacgtggcctgcctcgtgaaagagttctaccccaaggacatcaggatcaacctggtgtccagcaagaagatcaccgagttcgaccccgccatcgtgatctcccccagcggcaagtacaacgccgtgaagctggggaagtacgaggacagcaacagcgtgacctgctccgtgcagcacgacaacaagaccgtgcacagcaccgactttgaagtgaaaaccgactccaccgaccacgtgaagcccaaagagacagagaacaccaagcagcccagcaagagctgccacaagcccaaggccatcgtgcacaccgagaaagtgaacatgatgagcctgaccgtgctgggcctgcggatgctgttcgccaaaaccgtggccgtgaacttcctgctgaccgccaagctgttcttcctcagggccaagcgatctggatctggagcaacaaacttctcactactcaaacaagcaggtgacgtggaggagaatcccgggcctactagtatggactggatttggcgcatccttttccttgtcggcgctgctaccggcgcgcattccttcgaagaggtgcagctggttgaatctggcggaggactggttcagcctggcggatctctgagactgtcttgtgctgccagcggcttcaccttcagctcctacgccatgagctgggtccgacaggctcctggcaaaggactggaatgggtgtccgccatctctggctcaggcggcagcacatattacgccgactctgtgaagggcagattcaccatcagccgggacaacagcaagaacaccctgtacctccagatgaactccctgagagccgaggacaccgccgtgtactattgtgccagactgggctaccccaccaccacactgctgccctttgattattggggccagggcaccctggtcaccgtttcttctacgcgtgacaagcagctggacgccgacgtgtcccccaagcctaccatcttcctgccctctatcgccgagacaaagctccagaaggccggcacctacctgtgcctgctggaaaagttcttcccagatgtgattaagatccactggcaggaaaagaagtccaacaccatcctgggcagccaggaaggcaacaccatgaagaccaacgacacctacatgaagttcagctggctgaccgtgcccgagaagtccctggacaaagaacacagatgcatcgtgcggcacgaaaacaacaagaacggcgtggaccaggaaatcatcttcccacccatcaagaccgatgtgattacaatggaccccaaggacaactgctccaaggacgccaacgataccctgctgctccagctgaccaacaccagcgcctactacatgtacttgttgctgctgctgaagtccgtggtgtacttcgccatcatcacatgctgcctgctgcggagaaccgccttctgctgcaacggcgagaagtct

SEQ ID NO: 39053 - DNA, 1935 bp, synthetic construct
  source 1..1935: mol_type = other DNA
atggccttaccagtgaccgccttgctcctgccgctggccttgctgctccacgccgccaggccgctcgaggacaagcagctggacgccgacgtgtcccccaagcctaccatcttcctgccctctatcgccgagacaaagctccagaaggccggcacctacctgtgcctgctggaaaagttcttcccagatgtgattaagatccactggcaggaaaagaagtccaacaccatcctgggcagccaggaaggcaacaccatgaagaccaacgacacctacatgaagttcagctggctgaccgtgcccgagaagtccctggacaaagaacacagatgcatcgtgcggcacgaaaacaacaagaacggcgtggaccaggaaatcatcttcccacccatcaagaccgatgtgattacaatggaccccaaggacaactgctccaaggacgccaacgataccctgctgctccagctgaccaacaccagcgcctactacatgtacttgttgctgctgctgaagtccgtggtgtacttcgccatcatcacatgctgcctgctgcggagaaccgccttctgctgcaacggcgagaagtctagggccaagcgatctggatctggagcaacaaacttctcactactcaaacaagcaggtgacgtggaggagaatcccgggcctactagcatggccttaccagtgaccgccttgctcctgccgctggccttgctgctccacgccgccaggccggacatccagatgacacagagccctagcagcctgtctgccagcgtgggagacagagtgaccatcacctgtagagccagccagagcatcagcagctacctgaactggtatcagcagaagcccggcaaggcccctaaactgctgatctatgccgccagctctctccagagcggagtgcctagcagattttctggcagcggctccggcaccgatttcaccctgacaatatccagcctccagcctgaggacttcgccacctactactgccagcagagctacagcacccctctgacctttggacagggcaccaaggtggaaatcaagggcggaggcggaagtggaggcggaggatctggcggcggaggctctgaggtgcagctggttgaatctggcggaggactggttcagcctggcggatctctgagactgtcttgtgctgccagcggcttcaccttcagctcctacgccatgagctgggtccgacaggctcctggcaaaggactggaatgggtgtccgccatctctggctcaggcggcagcacatattacgccgactctgtgaagggcagattcaccatcagccgggacaacagcaagaacaccctgtacctccagatgaactccctgagagccgaggacaccgccgtgtactattgtgccagactgggctaccccaccaccacactgctgccctttgattattggggccagggcaccctggtcaccgtttcttctacgcgtagccagcctcacaccaagcccagcgtgttcgtgatgaagaacggcaccaacgtggcctgcctcgtgaaagagttctaccccaaggacatcaggatcaacctggtgtccagcaagaagatcaccgagttcgaccccgccatcgtgatctcccccagcggcaagtacaacgccgtgaagctggggaagtacgaggacagcaacagcgtgacctgctccgtgcagcacgacaacaagaccgtgcacagcaccgactttgaagtgaaaaccgactccaccgaccacgtgaagcccaaagagacagagaacaccaagcagcccagcaagagctgccacaagcccaaggccatcgtgcacaccgagaaagtgaacatgatgagcctgaccgtgctgggcctgcggatgctgttcgccaaaaccgtggccgtgaacttcctgctgaccgccaagctgttcttcctc

SEQ ID NO: 39054 - DNA, 2397 bp, synthetic construct
  source 1..2397: mol_type = other DNA
atggccttaccagtgaccgccttgctcctgccgctggccttgctgctccacgccgccaggccggacatccagatgacacagagccctagcagcctgtctgccagcgtgggagacagagtgaccatcacctgtagagccagccagagcatcagcagctacctgaactggtatcagcagaagcccggcaaggcccctaaactgctgatctatgccgccagctctctccagagcggagtgcctagcagattttctggcagcggctccggcaccgatttcaccctgacaatatccagcctccagcctgaggacttcgccacctactactgccagcagagctacagcacccctctgacctttggacagggcaccaaggtggaaatcaagggacagcctaaggccaatcctaccgtgacactgttccctccaagcagcgaagaactccaggccaacaaggccacacttgtgtgcctgatctccgacttctaccctggggctgtgacagtggcttggaaggccgatggatctcctgtgaaagccggcgtggaaaccaccaagccatccaagcagagcaacaacaaatacgccgccagctcctacctgagcctgacacctgagcagtggaagtcccacagatcctacagctgccaagtgacccacgaaggcagcaccgtggaaaagacagtggcccctacagagtgcagcggatcccagagcttcggcctgctggaccccaagctgtgctacctgctggatggcatcctgttcatctacggcgtgatcctgaccgccctgttcctgagagtgaagttcagcagaagcgccgacgcccctgcctaccagcagggacagaaccaactgtacaacgagctgaacctgggcagacgggaagagtacgacgtgctggacaagcggagaggcagggaccctgagatgggcggaaagccccagcggagaaagaacccccaggaaggactgtataacgaactccagaaagacaagatggccgaagcctacagcgagatcggcatgaagggcgagcggagaagaggcaagggccacgatggcctgtaccagggcctgagcaccgccaccaaggacacctatgacgccctgcacatgcaggccctgcctccaagaagggccaagcgatctggatctggagcaacaaacttctcactactcaaacaagcaggtgacgtggaggagaatcccgggcctactagtatggactggatttggcgcatccttttccttgtcggcgctgctaccggcgcgcattccttcgaagaggtgcagctggttgaatctggcggaggactggttcagcctggcggatctctgagactgtcttgtgctgccagcggcttcaccttcagctcctacgccatgagctgggtccgacaggctcctggcaaaggactggaatgggtgtccgccatctctggctcaggcggcagcacatattacgccgactctgtgaagggcagattcaccatcagccgggacaacagcaagaacaccctgtacctccagatgaactccctgagagccgaggacaccgccgtgtactattgtgccagactgggctaccccaccaccacactgctgccctttgattattggggccagggcaccctggtcaccgtttcttctgcctctacaaagggaccctccgtgtttcctctggctcccagcagcaagtctacaagcggaggaacagccgctctgggctgcctggtcaaggattactttcccgagcctgtgaccgtgtcctggaatagcggagcactgacaagcggcgtgcacacctttccagccgtgctgcaaagcagcggcctgtactctctgagcagcgtggtcacagtgcctagctctagcctgggcacccagacctacatctgcaatgtgaaccacaagcctagcaacaccaaggtggacaagagagtggaacccaagagctgtggtacccagagttttgggttgttggaccctaaattgtgctatctgttggacggaatcctgttcatttacggagtgatcctgaccgcattgttcctgcgggttaagttttccagatccgcagacgcacccgcttaccaacaagggcagaaccaactctacaatgaacttaatttggggcggagggaagagtacgacgttctggacaaaaggaggggacgagatcccgagatgggcggaaagcctcagcgaaggaagaatccgcaagaggggctttataacgaactccagaaagataaaatggcagaagcctatagtgagattgggatgaagggagaaaggaggaggggtaaaggtcacgatgggttgtaccaaggattgagcacagccactaaagatacctatgatgcgctccacatgcaggccctgccgccaaga

SEQ ID NO: 39055 - DNA, 2454 bp, synthetic construct
  source 1..2454: mol_type = other DNA
atggccttaccagtgaccgccttgctcctgccgctggccttgctgctccacgccgccaggccggacatccagatgacacagagccctagcagcctgtctgccagcgtgggagacagagtgaccatcacctgtagagccagccagagcatcagcagctacctgaactggtatcagcagaagcccggcaaggcccctaaactgctgatctatgccgccagctctctccagagcggagtgcctagcagattttctggcagcggctccggcaccgatttcaccctgacaatatccagcctccagcctgaggacttcgccacctactactgccagcagagctacagcacccctctgacctttggacagggcaccaaggtggaaatcaagctcgaggacctgaagaacgtgttcccacctgaggtggccgtgttcgagcctagcgaggccgagatcagccacacccagaaagccaccctcgtgtgcctggctaccggcttctaccccgaccatgtggaactgtcttggtgggtcaacggcaaagaggtgcacagcggcgtgtctaccgacccccagccactgaaagaacagcccgccctgaacgacagccggtactgcctgagcagcagactgagagtgtccgccaccttctggcagaacccccggaaccacttcagatgccaggtgcagttctacggcctgagcgagaacgacgagtggacccaggacagagccaagcccgtgacccagatcgtgtctgccgaagcctggggcagagccgattgcggatcccagagcttcggcctgctggaccccaagctgtgctacctgctggatggcatcctgttcatctacggcgtgatcctgaccgccctgttcctgagagtgaagttcagcagaagcgccgacgcccctgcctaccagcagggacagaaccaactgtacaacgagctgaacctgggcagacgggaagagtacgacgtgctggacaagcggagaggcagggaccctgagatgggcggaaagccccagcggagaaagaacccccaggaaggactgtataacgaactccagaaagacaagatggccgaagcctacagcgagatcggcatgaagggcgagcggagaagaggcaagggccacgatggcctgtaccagggcctgagcaccgccaccaaggacacctatgacgccctgcacatgcaggccctgcctccaagaagggccaagcgatctggatctggagcaacaaacttctcactactcaaacaagcaggtgacgtggaggagaatcccgggcctactagtatggactggatttggcgcatccttttccttgtcggcgctgctaccggcgcgcattccttcgaagaggtgcagctggttgaatctggcggaggactggttcagcctggcggatctctgagactgtcttgtgctgccagcggcttcaccttcagctcctacgccatgagctgggtccgacaggctcctggcaaaggactggaatgggtgtccgccatctctggctcaggcggcagcacatattacgccgactctgtgaagggcagattcaccatcagccgggacaacagcaagaacaccctgtacctccagatgaactccctgagagccgaggacaccgccgtgtactattgtgccagactgggctaccccaccaccacactgctgccctttgattattggggccagggcaccctggtcaccgtttcttctacgcgtatccagaaccctgatcctgccgtgtaccagctgcgggatagcaagagcagcgacaagagcgtgtgtctgttcaccgacttcgacagccagaccaacgtgtcccagagcaaggactccgacgtgtacatcaccgataagaccgtgctggacatgcggagcatggacttcaagagcaactccgccgtggcctggtccaacaagtccgatttcgcctgcgccaacgccttcaacaacagcattatccccgaggacacattcttcccaagccccgagagcagctgcggtacccagagttttgggttgttggaccctaaattgtgctatctgttggacggaatcctgttcatttacggagtgatcctgaccgcattgttcctgcgggttaagttttccagatccgcagacgcacccgcttaccaacaagggcagaaccaactctacaatgaacttaatttggggcggagggaagagtacgacgttctggacaaaaggaggggacgagatcccgagatgggcggaaagcctcagcgaaggaagaatccgcaagaggggctttataacgaactccagaaagataaaatggcagaagcctatagtgagattgggatgaagggagaaaggaggaggggtaaaggtcacgatgggttgtaccaaggattgagcacagccactaaagatacctatgatgcgctccacatgcaggccctgccgccaaga

SEQ ID NO: 39056 - DNA, 2580 bp, synthetic construct
  source 1..2580: mol_type = other DNA
atggccttaccagtgaccgccttgctcctgccgctggccttgctgctccacgccgccaggccggacatccagatgacacagagccctagcagcctgtctgccagcgtgggagacagagtgaccatcacctgtagagccagccagagcatcagcagctacctgaactggtatcagcagaagcccggcaaggcccctaaactgctgatctatgccgccagctctctccagagcggagtgcctagcagattttctggcagcggctccggcaccgatttcaccctgacaatatccagcctccagcctgaggacttcgccacctactactgccagcagagctacagcacccctctgacctttggacagggcaccaaggtggaaatcaagctcgaggaggacctgaagaacgtgttcccacctgaggtggccgtgttcgagcctagcgaggccgagatcagccacacccagaaagccaccctcgtgtgcctggctaccggcttctaccccgaccatgtggaactgtcttggtgggtcaacggcaaagaggtgcacagcggcgtgtctaccgacccccagccactgaaagaacagcccgccctgaacgacagccggtactgcctgagcagcagactgagagtgtccgccaccttctggcagaacccccggaaccacttcagatgccaggtgcagttctacggcctgagcgagaacgacgagtggacccaggacagagccaagcccgtgacccagatcgtgtctgccgaagcctggggcagagccgattgcggatcccagagcttcggcctgctggaccccaagctgtgctacctgctggatggcatcctgttcatctacggcgtgatcctgaccgccctgttcctgagagtgaagttcagcagaagcgccgacgcccctgcctaccagcagggacagaaccaactgtacaacgagctgaacctgggcagacgggaagagtacgacgtgctggacaagcggagaggcagggaccctgagatgggcggaaagccccagcggagaaagaacccccaggaaggactgtataacgaactccagaaagacaagatggccgaagcctacagcgagatcggcatgaagggcgagcggagaagaggcaagggccacgatggcctgtaccagggcctgagcaccgccaccaaggacacctatgacgccctgcacatgcaggccctgcctccaagaagggccaagcgatctggatctggagcaacaaacttctcactactcaaacaagcaggtgacgtggaggagaatcccgggcctactagtatggactggatttggcgcatccttttccttgtcggcgctgctaccggcgcgcattccttcgaagaggtgcagctggttgaatctggcggaggactggttcagcctggcggatctctgagactgtcttgtgctgccagcggcttcaccttcagctcctacgccatgagctgggtccgacaggctcctggcaaaggactggaatgggtgtccgccatctctggctcaggcggcagcacatattacgccgactctgtgaagggcagattcaccatcagccgggacaacagcaagaacaccctgtacctccagatgaactccctgagagccgaggacaccgccgtgtactattgtgccagactgggctaccccaccaccacactgctgccctttgattattggggccagggcaccctggtcaccgtttcttctacgcgtatccagaaccctgatcctgccgtgtaccagctgcgggatagcaagagcagcgacaagagcgtgtgtctgttcaccgacttcgacagccagaccaacgtgtcccagagcaaggactccgacgtgtacatcaccgataagaccgtgctggacatgcggagcatggacttcaagagcaactccgccgtggcctggtccaacaagtccgatttcgcctgcgccaacgccttcaacaacagcattatccccgaggacacattcttcccaagccccgagagcagctgcggtacccagagttttgggttgttggaccctaaattgtgctatctgttggacggaatcctgttcatttacggagtgatcctgaccgcattgttcctgaggagcaagcggtcacggctgctccacagcgattacatgaatatgacaccacgaagaccgggtcctactcgcaaacactaccaaccctacgcacctccccgcgactttgcagcgtaccgatctcgggttaagttttccagatccgcagacgcacccgcttaccaacaagggcagaaccaactctacaatgaacttaatttggggcggagggaagagtacgacgttctggacaaaaggaggggacgagatcccgagatgggcggaaagcctcagcgaaggaagaatccgcaagaggggctttataacgaactccagaaagataaaatggcagaagcctatagtgagattgggatgaagggagaaaggaggaggggtaaaggtcacgatgggttgtaccaaggattgagcacagccactaaagatacctatgatgcgctccacatgcaggccctgccgccaaga

SEQ ID NO: 39057 - DNA, 2709 bp, synthetic construct
  source 1..2709: mol_type = other DNA
atggccttaccagtgaccgccttgctcctgccgctggccttgctgctccacgccgccaggccggacatccagatgacacagagccctagcagcctgtctgccagcgtgggagacagagtgaccatcacctgtagagccagccagagcatcagcagctacctgaactggtatcagcagaagcccggcaaggcccctaaactgctgatctatgccgccagctctctccagagcggagtgcctagcagattttctggcagcggctccggcaccgatttcaccctgacaatatccagcctccagcctgaggacttcgccacctactactgccagcagagctacagcacccctctgacctttggacagggcaccaaggtggaaatcaagctcgaggaggacctgaagaacgtgttcccacctgaggtggccgtgttcgagcctagcgaggccgagatcagccacacccagaaagccaccctcgtgtgcctggctaccggcttctaccccgaccatgtggaactgtcttggtgggtcaacggcaaagaggtgcacagcggcgtgtctaccgacccccagccactgaaagaacagcccgccctgaacgacagccggtactgcctgagcagcagactgagagtgtccgccaccttctggcagaacccccggaaccacttcagatgccaggtgcagttctacggcctgagcgagaacgacgagtggacccaggacagagccaagcccgtgacccagatcgtgtctgccgaagcctggggcagagccgattgcggatcccagagcttcggcctgctggaccccaagctgtgctacctgctggatggcatcctgttcatctacggcgtgatcctgaccgccctgttcctgaaacggggcagaaagaaactcctgtatatattcaaacaaccatttatgagaccagtacaaactactcaagaggaagatggctgtagctgccgatttccagaagaagaagaaggaggatgtgaactgagagtgaagttcagcagaagcgccgacgcccctgcctaccagcagggacagaaccaactgtacaacgagctgaacctgggcagacgggaagagtacgacgtgctggacaagcggagaggcagggaccctgagatgggcggaaagccccagcggagaaagaacccccaggaaggactgtataacgaactccagaaagacaagatggccgaagcctacagcgagatcggcatgaagggcgagcggagaagaggcaagggccacgatggcctgtaccagggcctgagcaccgccaccaaggacacctatgacgccctgcacatgcaggccctgcctccaagaagggccaagcgatctggatctggagcaacaaacttctcactactcaaacaagcaggtgacgtggaggagaatcccgggcctactagtatggactggatttggcgcatccttttccttgtcggcgctgctaccggcgcgcattccttcgaagaggtgcagctggttgaatctggcggaggactggttcagcctggcggatctctgagactgtcttgtgctgccagcggcttcaccttcagctcctacgccatgagctgggtccgacaggctcctggcaaaggactggaatgggtgtccgccatctctggctcaggcggcagcacatattacgccgactctgtgaagggcagattcaccatcagccgggacaacagcaagaacaccctgtacctccagatgaactccctgagagccgaggacaccgccgtgtactattgtgccagactgggctaccccaccaccacactgctgccctttgattattggggccagggcaccctggtcaccgtttcttctacgcgtatccagaaccctgatcctgccgtgtaccagctgcgggatagcaagagcagcgacaagagcgtgtgtctgttcaccgacttcgacagccagaccaacgtgtcccagagcaaggactccgacgtgtacatcaccgataagaccgtgctggacatgcggagcatggacttcaagagcaactccgccgtggcctggtccaacaagtccgatttcgcctgcgccaacgccttcaacaacagcattatccccgaggacacattcttcccaagccccgagagcagctgcggtacccagagttttgggttgttggaccctaaattgtgctatctgttggacggaatcctgttcatttacggagtgatcctgaccgcattgttcctgaagagaggccggaagaagctgctgtacatcttcaagcagcctttcatgcggcccgtgcagaccacccaggaagaggacggctgctcctgccggttccccgaggaagaagaaggcggctgcgagctgcgggttaagttttccagatccgcagacgcacccgcttaccaacaagggcagaaccaactctacaatgaacttaatttggggcggagggaagagtacgacgttctggacaaaaggaggggacgagatcccgagatgggcggaaagcctcagcgaaggaagaatccgcaagaggggctttataacgaactccagaaagataaaatggcagaagcctatagtgagattgggatgaagggagaaaggaggaggggtaaaggtcacgatgggttgtaccaaggattgagcacagccactaaagatacctatgatgcgctccacatgcaggccctgccgccaaga

SEQ ID NO: 39058 - DNA, 1770 bp, synthetic construct
  source 1..1770: mol_type = other DNA
atggccttaccagtgaccgccttgctcctgccgctggccttgctgctccacgccgccaggccggacatccagatgacacagagccctagcagcctgtctgccagcgtgggagacagagtgaccatcacctgtagagccagccagagcatcagcagctacctgaactggtatcagcagaagcccggcaaggcccctaaactgctgatctatgccgccagctctctccagagcggagtgcctagcagattttctggcagcggctccggcaccgatttcaccctgacaatatccagcctccagcctgaggacttcgccacctactactgccagcagagctacagcacccctctgacctttggacagggcaccaaggtggaaatcaagctcgagcagagcttcggcctgctggaccccaagctgtgctacctgctggatggcatcctgttcatctacggcgtgatcctgaccgccctgttcctgagagtgaagttcagcagaagcgccgacgcccctgcctaccagcagggacagaaccaactgtacaacgagctgaacctgggcagacgggaagagtacgacgtgctggacaagcggagaggcagggaccctgagatgggcggaaagccccagcggagaaagaacccccaggaaggactgtataacgaactccagaaagacaagatggccgaagcctacagcgagatcggcatgaagggcgagcggagaagaggcaagggccacgatggcctgtaccagggcctgagcaccgccaccaaggacacctatgacgccctgcacatgcaggccctgcctccaagaagggccaagcgatctggatctggagcaacaaacttctcactactcaaacaagcaggtgacgtggaggagaatcccgggcctactagtatggactggatttggcgcatccttttccttgtcggcgctgctaccggcgcgcattccttcgaagaggtgcagctggttgaatctggcggaggactggttcagcctggcggatctctgagactgtcttgtgctgccagcggcttcaccttcagctcctacgccatgagctgggtccgacaggctcctggcaaaggactggaatgggtgtccgccatctctggctcaggcggcagcacatattacgccgactctgtgaagggcagattcaccatcagccgggacaacagcaagaacaccctgtacctccagatgaactccctgagagccgaggacaccgccgtgtactattgtgccagactgggctaccccaccaccacactgctgccctttgattattggggccagggcaccctggtcaccgtttcttctacgcgtcagagttttgggttgttggaccctaaattgtgctatctgttggacggaatcctgttcatttacggagtgatcctgaccgcattgttcctgcgggttaagttttccagatccgcagacgcacccgcttaccaacaagggcagaaccaactctacaatgaacttaatttggggcggagggaagagtacgacgttctggacaaaaggaggggacgagatcccgagatgggcggaaagcctcagcgaaggaagaatccgcaagaggggctttataacgaactccagaaagataaaatggcagaagcctatagtgagattgggatgaagggagaaaggaggaggggtaaaggtcacgatgggttgtaccaaggattgagcacagccactaaagatacctatgatgcgctccacatgcaggccctgccgccaaga

SEQ ID NO: 39059 - DNA, 1944 bp, synthetic construct
  source 1..1944: mol_type = other DNA
atggccttaccagtgaccgccttgctcctgccgctggccttgctgctccacgccgccaggccggacatccagatgacacagagccctagcagcctgtctgccagcgtgggagacagagtgaccatcacctgtagagccagccagagcatcagcagctacctgaactggtatcagcagaagcccggcaaggcccctaaactgctgatctatgccgccagctctctccagagcggagtgcctagcagattttctggcagcggctccggcaccgatttcaccctgacaatatccagcctccagcctgaggacttcgccacctactactgccagcagagctacagcacccctctgacctttggacagggcaccaaggtggaaatcaagctcgagggacagcctaaggccaatcctaccgtgacactgttccctccaagcagcgaagaactccaggccaacaaggccacacttgtgtgcctgatctccgacttctaccctggggctgtgacagtggcttggaaggccgatggatctcctgtgaaagccggcgtggaaaccaccaagccatccaagcagagcaacaacaaatacgccgccagctcctacctgagcctgacacctgagcagtggaagtcccacagatcctacagctgccaagtgacccacgaaggcagcaccgtggaaaagacagtggcccctacagagtgcagccccatcaagaccgatgtgattacaatggaccccaaggacaactgctccaaggacgccaacgataccctgctgctccagctgaccaacaccagcgcctactacatgtacttgttgctgctgctgaagtccgtggtgtacttcgccatcatcacatgctgcctgctgcggagaaccgccttctgctgcaacggcgagaagtctagggccaagcgatctggatctggagcaacaaacttctcactactcaaacaagcaggtgacgtggaggagaatcccgggcctactagtatggactggatttggcgcatccttttccttgtcggcgctgctaccggcgcgcattccttcgaagaggtgcagctggttgaatctggcggaggactggttcagcctggcggatctctgagactgtcttgtgctgccagcggcttcaccttcagctcctacgccatgagctgggtccgacaggctcctggcaaaggactggaatgggtgtccgccatctctggctcaggcggcagcacatattacgccgactctgtgaagggcagattcaccatcagccgggacaacagcaagaacaccctgtacctccagatgaactccctgagagccgaggacaccgccgtgtactattgtgccagactgggctaccccaccaccacactgctgccctttgattattggggccagggcaccctggtcaccgtttcttctacgcgtgcctctacaaagggaccctccgtgtttcctctggctcccagcagcaagtctacaagcggaggaacagccgctctgggctgcctggtcaaggattactttcccgagcctgtgaccgtgtcctggaatagcggagcactgacaagcggcgtgcacacctttccagccgtgctgcaaagcagcggcctgtactctctgagcagcgtggtcacagtgcctagctctagcctgggcacccagacctacatctgcaatgtgaaccacaagcctagcaacaccaaggtggacaagagagtggaacccaagagctgtgaagtgaaaaccgactccaccgaccacgtgaagcccaaagagacagagaacaccaagcagcccagcaagagctgccacaagcccaaggccatcgtgcacaccgagaaagtgaacatgatgagcctgaccgtgctgggcctgcggatgctgttcgccaaaaccgtggccgtgaacttcctgctgaccgccaagctgttcttcctc

SEQ ID NO: 39060 - DNA, 1878 bp, synthetic construct
  source 1..1878: mol_type = other DNA
atggccttaccagtgaccgccttgctcctgccgctggccttgctgctccacgccgccaggccggacatccagatgacacagagccctagcagcctgtctgccagcgtgggagacagagtgaccatcacctgtagagccagccagagcatcagcagctacctgaactggtatcagcagaagcccggcaaggcccctaaactgctgatctatgccgccagctctctccagagcggagtgcctagcagattttctggcagcggctccggcaccgatttcaccctgacaatatccagcctccagcctgaggacttcgccacctactactgccagcagagctacagcacccctctgacctttggacagggcaccaaggtggaaatcaagctcgagggacagcctaaggccaatcctaccgtgacactgttccctccaagcagcgaagaactccaggccaacaaggccacacttgtgtgcctgatctccgacttctaccctggggctgtgacagtggcttggaaggccgatggatctcctgtgaaagccggcgtggaaaccaccaagccatccaagcagagcaacaacaaatacgccgccagctcctacctgagcctgacacctgagcagtggaagtcccacagatcctacagctgccaagtgacccacgaaggcagcaccgtggaaaagacagtggcccctacagagtgcagcggcagagccgattgcggcatcaccagcgccagctaccaccagggcgtgctgagcgccaccatcctgtacgagatcctgctgggcaaggccaccctgtacgccgtgctggtgtctgccctggtgctgatggctatggtcaagcggaaggacagccggggaagggccaagcgatctggatctggagcaacaaacttctcactactcaaacaagcaggtgacgtggaggagaatcccgggcctactagtatggactggatttggcgcatccttttccttgtcggcgctgctaccggcgcgcattccttcgaagaggtgcagctggttgaatctggcggaggactggttcagcctggcggatctctgagactgtcttgtgctgccagcggcttcaccttcagctcctacgccatgagctgggtccgacaggctcctggcaaaggactggaatgggtgtccgccatctctggctcaggcggcagcacatattacgccgactctgtgaagggcagattcaccatcagccgggacaacagcaagaacaccctgtacctccagatgaactccctgagagccgaggacaccgccgtgtactattgtgccagactgggctaccccaccaccacactgctgccctttgattattggggccagggcaccctggtcaccgtttcttctacgcgtgcctctacaaagggaccctccgtgtttcctctggctcccagcagcaagtctacaagcggaggaacagccgctctgggctgcctggtcaaggattactttcccgagcctgtgaccgtgtcctggaatagcggagcactgacaagcggcgtgcacacctttccagccgtgctgcaaagcagcggcctgtactctctgagcagcgtggtcacagtgcctagctctagcctgggcacccagacctacatctgcaatgtgaaccacaagcctagcaacaccaaggtggacaagagagtggaacccaagagctgtatccccgaggacacattcttcccaagcagcgacgtgccctgcgacgtgaagctggtggaaaagagcttcgagacagacaccaacctgaacttccagaacctgagcgtgatcggcttcagaatcctgctgctgaaagtggccggctttaacctgctgatgaccctgcggctgtggtccagc

SEQ ID NO: 39061 - DNA, 1878 bp, synthetic construct
  source 1..1878: mol_type = other DNA
atggccttaccagtgaccgccttgctcctgccgctggccttgctgctccacgccgccaggccggacatccagatgacacagagccctagcagcctgtctgccagcgtgggagacagagtgaccatcacctgtagagccagccagagcatcagcagctacctgaactggtatcagcagaagcccggcaaggcccctaaactgctgatctatgccgccagctctctccagagcggagtgcctagcagattttctggcagcggctccggcaccgatttcaccctgacaatatccagcctccagcctgaggacttcgccacctactactgccagcagagctacagcacccctctgacctttggacagggcaccaaggtggaaatcaagctcgagggacagcctaaggccaatcctaccgtgacactgttccctccaagcagcgaagaactccaggccaacaaggccacacttgtgtgcctgatctccgacttctaccctggggctgtgacagtggcttggaaggccgatggatctcctgtgaaagccggcgtggaaaccaccaagccatccaagcagagcaacaacaaatacgccgccagctcctacctgagcctgacacctgagcagtggaagtcccacagatcctacagctgccaagtgacccacgaaggcagcaccgtggaaaagacagtggcccctacagagtgcagcggcagagccgattgcggctttaccagcgagagctaccagcagggcgtgctgagcgccaccatcctgtacgagatcctgctgggcaaggccaccctgtacgccgtgctggtgtctgccctggtgctgatggctatggtcaagcggaaggacagccggggaagggccaagcgatctggatctggagcaacaaacttctcactactcaaacaagcaggtgacgtggaggagaatcccgggcctactagtatggactggatttggcgcatccttttccttgtcggcgctgctaccggcgcgcattccttcgaagaggtgcagctggttgaatctggcggaggactggttcagcctggcggatctctgagactgtcttgtgctgccagcggcttcaccttcagctcctacgccatgagctgggtccgacaggctcctggcaaaggactggaatgggtgtccgccatctctggctcaggcggcagcacatattacgccgactctgtgaagggcagattcaccatcagccgggacaacagcaagaacaccctgtacctccagatgaactccctgagagccgaggacaccgccgtgtactattgtgccagactgggctaccccaccaccacactgctgccctttgattattggggccagggcaccctggtcaccgtttcttctacgcgtgcctctacaaagggaccctccgtgtttcctctggctcccagcagcaagtctacaagcggaggaacagccgctctgggctgcctggtcaaggattactttcccgagcctgtgaccgtgtcctggaatagcggagcactgacaagcggcgtgcacacctttccagccgtgctgcaaagcagcggcctgtactctctgagcagcgtggtcacagtgcctagctctagcctgggcacccagacctacatctgcaatgtgaaccacaagcctagcaacaccaaggtggacaagagagtggaacccaagagctgtatccccgaggacacattcttcccaagccccgagagcagctgcgacgtgaagctggtggaaaagagcttcgagacagacaccaacctgaacttccagaacctgagcgtgatcggcttcagaatcctgctgctgaaagtggccggctttaacctgctgatgaccctgcggctgtggtccagc

SEQ ID NO: 39062 - DNA, 1356 bp, synthetic construct
  source 1..1356: mol_type = other DNA
atggccttaccagtgaccgccttgctcctgccgctggccttgctgctccacgccgccaggccggacatccagatgacacagagccctagcagcctgtctgccagcgtgggagacagagtgaccatcacctgtagagccagccagagcatcagcagctacctgaactggtatcagcagaagcccggcaaggcccctaaactgctgatctatgccgccagctctctccagagcggagtgcctagcagattttctggcagcggctccggcaccgatttcaccctgacaatatccagcctccagcctgaggacttcgccacctactactgccagcagagctacagcacccctctgacctttggacagggcaccaaggtggaaatcaagggcggaggcggaagtggaggcggaggatctggcggcggaggctctgaggtgcagctggttgaatctggcggaggactggttcagcctggcggatctctgagactgtcttgtgctgccagcggcttcaccttcagctcctacgccatgagctgggtccgacaggctcctggcaaaggactggaatgggtgtccgccatctctggctcaggcggcagcacatattacgccgactctgtgaagggcagattcaccatcagccgggacaacagcaagaacaccctgtacctccagatgaactccctgagagccgaggacaccgccgtgtactattgtgccagactgggctaccccaccaccacactgctgccctttgattattggggccagggcaccctggtcaccgtttcttctacgcgtgacggtaacgaggagatgggaggaatcactcaaaccccttacaaagtctcaatttcaggaacaactgttatccttacatgtccccagtatcctggcagcgagatcctttggcagcataacgacaagaatatagggggagatgaagacgataagaatatcggatctgacgaggatcacttgagcctgaaagagttctccgagcttgaacaaagcggatattatgtgtgctatccgcgcgggtcaaagccggaagacgctaacttttacctttatctccgagccagagtgtgcgaaaattgcatggaaatggacgttatgtccgttgctacaatagttatcgtagatatatgcatcacgggtggactgcttctgctggtttattattggtccaagaatagaaaggccaaagctaaacccgtgaccagaggcgctggcgcaggcggaaggcaaaggggacaaaacaaagaacggccaccaccagtgccaaatccagattatgagcctattcggaaaggacagagggacctgtactctggcctgaatcagagaagaatc

SEQ ID NO: 39063 - DNA, 1251 bp, synthetic construct
  source 1..1251: mol_type = other DNA
atggccttaccagtgaccgccttgctcctgccgctggccttgctgctccacgccgccaggccggacatccagatgacacagagccctagcagcctgtctgccagcgtgggagacagagtgaccatcacctgtagagccagccagagcatcagcagctacctgaactggtatcagcagaagcccggcaaggcccctaaactgctgatctatgccgccagctctctccagagcggagtgcctagcagattttctggcagcggctccggcaccgatttcaccctgacaatatccagcctccagcctgaggacttcgccacctactactgccagcagagctacagcacccctctgacctttggacagggcaccaaggtggaaatcaagggcggaggcggaagtggaggcggaggatctggcggcggaggctctgaggtgcagctggttgaatctggcggaggactggttcagcctggcggatctctgagactgtcttgtgctgccagcggcttcaccttcagctcctacgccatgagctgggtccgacaggctcctggcaaaggactggaatgggtgtccgccatctctggctcaggcggcagcacatattacgccgactctgtgaagggcagattcaccatcagccgggacaacagcaagaacaccctgtacctccagatgaactccctgagagccgaggacaccgccgtgtactattgtgccagactgggctaccccaccaccacactgctgccctttgattattggggccagggcaccctggtcaccgtttcttctacgcgtttcaagatccccatcgaggaactggaagatcgggtgttcgtgaactgcaacacctctatcacctgggtggaaggcaccgtgggaacactgctgagcgacatcaccagactggacctcggcaagcggattctggaccctcggggcatctacagatgcaacggcaccgacatctacaaggacaaagaaagcaccgtgcaggtccactacagaatgtgccagtcctgcgtggaactggaccctgctacagtggccggcatcatcgtgaccgatgtgatcgctactctgctgctggctctgggagtgttctgcttcgccggacacgaaacaggcagactgtctggcgctgccgatacacaggccctgctgagaaacgaccaagtgtatcagcccctgcgcgacagagatgatgcccagtattctcacctcggcggcaactgggctagaaacaag

SEQ ID NO: 39064 - DNA, 1281 bp, synthetic construct
  source 1..1281: mol_type = other DNA
atggccttaccagtgaccgccttgctcctgccgctggccttgctgctccacgccgccaggccggacatccagatgacacagagccctagcagcctgtctgccagcgtgggagacagagtgaccatcacctgtagagccagccagagcatcagcagctacctgaactggtatcagcagaagcccggcaaggcccctaaactgctgatctatgccgccagctctctccagagcggagtgcctagcagattttctggcagcggctccggcaccgatttcaccctgacaatatccagcctccagcctgaggacttcgccacctactactgccagcagagctacagcacccctctgacctttggacagggcaccaaggtggaaatcaagggcggaggcggaagtggaggcggaggatctggcggcggaggctctgaggtgcagctggttgaatctggcggaggactggttcagcctggcggatctctgagactgtcttgtgctgccagcggcttcaccttcagctcctacgccatgagctgggtccgacaggctcctggcaaaggactggaatgggtgtccgccatctctggctcaggcggcagcacatattacgccgactctgtgaagggcagattcaccatcagccgggacaacagcaagaacaccctgtacctccagatgaactccctgagagccgaggacaccgccgtgtactattgtgccagactgggctaccccaccaccacactgctgccctttgattattggggccagggcaccctggtcaccgtttcttctacgcgtcagagcatcaagggcaaccacctggtcaaggtgtacgactaccaagaggacggcagcgtgctgctgacatgtgatgccgaggccaagaacatcacctggtttaaggacggcaagatgatcggcttcctgaccgaggacaagaagaagtggaacctgggcagcaacgctaaggaccccagaggcatgtatcagtgcaagggcagccagaacaagagcaagcccctccaggtgtactaccggatgtgccagaactgcatcgagctgaacgccgctaccatcagcggctttctgttcgccgagatcgtgtccatcttcgtgctggccgtgggcgtgtactttatcgctggacaggatggcgtgcggcagagcagagcttccgataagcaaaccctgctgcctaacgaccagctgtaccagcctctgaaggacagagaggacgaccagtacagccacctccagggcaatcagctgagaagaaac

SEQ ID NO: 39065 - DNA, 1230 bp, synthetic construct
  source 1..1230: mol_type = other DNA
atggccttaccagtgaccgccttgctcctgccgctggccttgctgctccacgccgccaggccggacatccagatgacacagagccctagcagcctgtctgccagcgtgggagacagagtgaccatcacctgtagagccagccagagcatcagcagctacctgaactggtatcagcagaagcccggcaaggcccctaaactgctgatctatgccgccagctctctccagagcggagtgcctagcagattttctggcagcggctccggcaccgatttcaccctgacaatatccagcctccagcctgaggacttcgccacctactactgccagcagagctacagcacccctctgacctttggacagggcaccaaggtggaaatcaagggcggaggcggaagtggaggcggaggatctggcggcggaggctctgaggtgcagctggttgaatctggcggaggactggttcagcctggcggatctctgagactgtcttgtgctgccagcggcttcaccttcagctcctacgccatgagctgggtccgacaggctcctggcaaaggactggaatgggtgtccgccatctctggctcaggcggcagcacatattacgccgactctgtgaagggcagattcaccatcagccgggacaacagcaagaacaccctgtacctccagatgaactccctgagagccgaggacaccgccgtgtactattgtgccagactgggctaccccaccaccacactgctgccctttgattattggggccagggcaccctggtcaccgtttcttctacgcgtcagagttttgggttgttggaccctaaattgtgctatctgttggacggaatcctgttcatttacggagtgatcctgaccgcattgttcctgcgggttaagttttccagatccgcagacgcacccgcttaccaacaagggcagaaccaactctacaatgaacttaatttggggcggagggaagagtacgacgttctggacaaaaggaggggacgagatcccgagatgggcggaaagcctcagcgaaggaagaatccgcaagaggggctttataacgaactccagaaagataaaatggcagaagcctatagtgagattgggatgaagggagaaaggaggaggggtaaaggtcacgatgggttgtaccaaggattgagcacagccactaaagatacctatgatgcgctccacatgcaggccctgccgccaaga

SEQ ID NO: 39066 - DNA, 1515 bp, synthetic construct
  source 1..1515: mol_type = other DNA
atggccttaccagtgaccgccttgctcctgccgctggccttgctgctccacgccgccaggccggacatccagatgacacagagccctagcagcctgtctgccagcgtgggagacagagtgaccatcacctgtagagccagccagagcatcagcagctacctgaactggtatcagcagaagcccggcaaggcccctaaactgctgatctatgccgccagctctctccagagcggagtgcctagcagattttctggcagcggctccggcaccgatttcaccctgacaatatccagcctccagcctgaggacttcgccacctactactgccagcagagctacagcacccctctgacctttggacagggcaccaaggtggaaatcaagggcggaggcggaagtggaggcggaggatctggcggcggaggctctgaggtgcagctggttgaatctggcggaggactggttcagcctggcggatctctgagactgtcttgtgctgccagcggcttcaccttcagctcctacgccatgagctgggtccgacaggctcctggcaaaggactggaatgggtgtccgccatctctggctcaggcggcagcacatattacgccgactctgtgaagggcagattcaccatcagccgggacaacagcaagaacaccctgtacctccagatgaactccctgagagccgaggacaccgccgtgtactattgtgccagactgggctaccccaccaccacactgctgccctttgattattggggccagggcaccctggtcaccgtttcttctacgcgtggaatgaggactgaggatcttcccaaagctgtcgtctttctcgaaccccaatggtatcgggtgctcgaaaaagactctgtgacactgaaatgccaaggggcctactctcccgaggacaactccacacagtggtttcataatgagtccctcatcagctctcaggccagctcttatttcattgatgccgctacagtggacgactccggcgagtatcggtgtcagaccaatctgtctacactgtctgaccccgtgcagcttgaggtccacattggatggttgctcttgcaagccccacgctgggttttcaaagaggaagatccaatccatctgcggtgccacagctggaaaaacaccgctctccacaaagtcacatacctgcaaaatggcaaaggacgcaaatacttccatcacaattccgatttttacattccgaaggctaccctgaaagacagcggcagctatttctgccggggactcgtcggctccaagaatgtgtcctccgaaaccgtgaatatcacgattacccaaggactggctgtgcctacaatctctagcttctttccgcctggataccaagtctccttctgtcttgtgatggtcctcctgtttgctgtggacacaggactgtacttttccgtgaaaacgaacatccgcagctccacacgcgattggaaagatcacaagtttaaatggcgcaaagatccccaggacaag

SEQ ID NO: 39067 - DNA, 1440 bp, synthetic construct
  source 1..1440: mol_type = other DNA
atggccttaccagtgaccgccttgctcctgccgctggccttgctgctccacgccgccaggccggacatccagatgacacagagccctagcagcctgtctgccagcgtgggagacagagtgaccatcacctgtagagccagccagagcatcagcagctacctgaactggtatcagcagaagcccggcaaggcccctaaactgctgatctatgccgccagctctctccagagcggagtgcctagcagattttctggcagcggctccggcaccgatttcaccctgacaatatccagcctccagcctgaggacttcgccacctactactgccagcagagctacagcacccctctgacctttggacagggcaccaaggtggaaatcaagggcggaggcggaagtggaggcggaggatctggcggcggaggctctgaggtgcagctggttgaatctggcggaggactggttcagcctggcggatctctgagactgtcttgtgctgccagcggcttcaccttcagctcctacgccatgagctgggtccgacaggctcctggcaaaggactggaatgggtgtccgccatctctggctcaggcggcagcacatattacgccgactctgtgaagggcagattcaccatcagccgggacaacagcaagaacaccctgtacctccagatgaactccctgagagccgaggacaccgccgtgtactattgtgccagactgggctaccccaccaccacactgctgccctttgattattggggccagggcaccctggtcaccgtttcttctacgcgtggaatgaggactgaggatcttcccaaagctgtcgtctttctcgaaccccaatggtatcgggtgctcgaaaaagactctgtgacactgaaatgccaaggggcctactctcccgaggacaactccacacagtggtttcataatgagtccctcatcagctctcaggccagctcttatttcattgatgccgctacagtggacgactccggcgagtatcggtgtcagaccaatctgtctacactgtctgaccccgtgcagcttgaggtccacattggatggttgctcttgcaagccccacgctgggttttcaaagaggaagatccaatccatctgcggtgccacagctggaaaaacaccgctctccacaaagtcacatacctgcaaaatggcaaaggacgcaaatacttccatcacaattccgatttttacattccgaaggctaccctgaaagacagcggcagctatttctgccggggactcgtcggctccaagaatgtgtcctccgaaaccgtgaatatcacgattacccaaggactggctgtgcctacaatctctagcttctttccgcctggataccaagtctccttctgtcttgtgatggtcctcctgtttgctgtggacacaggactgtacttttccgtg

SEQ ID NO: 39068 - DNA, 1443 bp, synthetic construct
  source 1..1443: mol_type = other DNA
atggccttaccagtgaccgccttgctcctgccgctggccttgctgctccacgccgccaggccggacatccagatgacacagagccctagcagcctgtctgccagcgtgggagacagagtgaccatcacctgtagagccagccagagcatcagcagctacctgaactggtatcagcagaagcccggcaaggcccctaaactgctgatctatgccgccagctctctccagagcggagtgcctagcagattttctggcagcggctccggcaccgatttcaccctgacaatatccagcctccagcctgaggacttcgccacctactactgccagcagagctacagcacccctctgacctttggacagggcaccaaggtggaaatcaagggcggaggcggaagtggaggcggaggatctggcggcggaggctctgaggtgcagctggttgaatctggcggaggactggttcagcctggcggatctctgagactgtcttgtgctgccagcggcttcaccttcagctcctacgccatgagctgggtccgacaggctcctggcaaaggactggaatgggtgtccgccatctctggctcaggcggcagcacatattacgccgactctgtgaagggcagattcaccatcagccgggacaacagcaagaacaccctgtacctccagatgaactccctgagagccgaggacaccgccgtgtactattgtgccagactgggctaccccaccaccacactgctgccctttgattattggggccagggcaccctggtcaccgtttcttctacgcgtggaatgaggactgaggatcttcccaaagctgtcgtctttctcgaaccccaatggtatcgggtgctcgaaaaagactctgtgacactgaaatgccaaggggcctactctcccgaggacaactccacacagtggtttcataatgagtccctcatcagctctcaggccagctcttatttcattgatgccgctacagtggacgactccggcgagtatcggtgtcagaccaatctgtctacactgtctgaccccgtgcagcttgaggtccacattggatggttgctcttgcaagccccacgctgggttttcaaagaggaagatccaatccatctgcggtgccacagctggaaaaacaccgctctccacaaagtcacatacctgcaaaatggcaaaggacgcaaatacttccatcacaattccgatttttacattccgaaggctaccctgaaagacagcggcagctatttctgccggggactcgtcggctccaagaatgtgtcctccgaaaccgtgaatatcacgattacccaaggactggctgtgcctacaatctctagcttctttccgcctggataccaagtctccttctgtcttgtgatggtcctcctgtttgctgtggacacaggactgtacttttccgtgaaa

SEQ ID NO: 39069 - DNA, 2175 bp, synthetic construct
  source 1..2175: mol_type = other DNA
atggccttaccagtgaccgccttgctcctgccgctggccttgctgctccacgccgccaggccggacatccagatgacacagagccctagcagcctgtctgccagcgtgggagacagagtgaccatcacctgtagagccagccagagcatcagcagctacctgaactggtatcagcagaagcccggcaaggcccctaaactgctgatctatgccgccagctctctccagagcggagtgcctagcagattttctggcagcggctccggcaccgatttcaccctgacaatatccagcctccagcctgaggacttcgccacctactactgccagcagagctacagcacccctctgacctttggacagggcaccaaggtggaaatcaagctcgagggacagcctaaggccaatcctaccgtgacactgttccctccaagcagcgaagaactccaggccaacaaggccacacttgtgtgcctgatctccgacttctaccctggggctgtgacagtggcttggaaggccgatggatctcctgtgaaagccggcgtggaaaccaccaagccatccaagcagagcaacaacaaatacgccgccagctcctacctgagcctgacacctgagcagtggaagtcccacagatcctacagctgccaagtgacccacgaaggcagcaccgtggaaaagacagtggcccctacagagtgcagcggatcccagagcttcggcctgctggaccccaagctgtgctacctgctggatggcatcctgttcatctacggcgtgatcctgaccgccctgttcctgagagtgaagttcagcagaagcgccgacgcccctgcctaccagcagggacagaaccaactgtacaacgagctgaacctgggcagacgggaagagtacgacgtgctggacaagcggagaggcagggaccctgagatgggcggaaagccccagcggagaaagaacccccaggaaggactgtataacgaactccagaaagacaagatggccgaagcctacagcgagatcggcatgaagggcgagcggagaagaggcaagggccacgatggcctgtaccagggcctgagcaccgccaccaaggacacctatgacgccctgcacatgcaggccctgcctccaagaagggccaagcgatctggatctggagcaacaaacttctcactactcaaacaagcaggtgacgtggaggagaatcccgggcctactagtatggactggatttggcgcatccttttccttgtcggcgctgctaccggcgcgcattccttcgaagaggtgcagctggttgaatctggcggaggactggttcagcctggcggatctctgagactgtcttgtgctgccagcggcttcaccttcagctcctacgccatgagctgggtccgacaggctcctggcaaaggactggaatgggtgtccgccatctctggctcaggcggcagcacatattacgccgactctgtgaagggcagattcaccatcagccgggacaacagcaagaacaccctgtacctccagatgaactccctgagagccgaggacaccgccgtgtactattgtgccagactgggctaccccaccaccacactgctgccctttgattattggggccagggcaccctggtcaccgtttcttctacgcgtgcctctacaaagggaccctccgtgtttcctctggctcccagcagcaagtctacaagcggaggaacagccgctctgggctgcctggtcaaggattactttcccgagcctgtgaccgtgtcctggaatagcggagcactgacaagcggcgtgcacacctttccagccgtgctgcaaagcagcggcctgtactctctgagcagcgtggtcacagtgcctagctctagcctgggcacccagacctacatctgcaatgtgaaccacaagcctagcaacaccaaggtggacaagagagtggaacccaagagctgtggtaccatcactcaaggtttggcagtgtcaaccatctcatcattctttccacctggctaccaagtgtccttctgcctggtcatggtgctgctgttcgccgtggataccggcctgtacttcagcgtcaagaccaacatccggtccagcaccagagactggaaggaccacaagttcaagtggcggaaggaccctcaggacaag

SEQ ID NO: 39070 - DNA, 2220 bp, synthetic construct
  source 1..2220: mol_type = other DNA
atggccttaccagtgaccgccttgctcctgccgctggccttgctgctccacgccgccaggccggacatccagatgacacagagccctagcagcctgtctgccagcgtgggagacagagtgaccatcacctgtagagccagccagagcatcagcagctacctgaactggtatcagcagaagcccggcaaggcccctaaactgctgatctatgccgccagctctctccagagcggagtgcctagcagattttctggcagcggctccggcaccgatttcaccctgacaatatccagcctccagcctgaggacttcgccacctactactgccagcagagctacagcacccctctgacctttggacagggcaccaaggtggaaatcaagctcgaggacctgaagaacgtgttcccacctgaggtggccgtgttcgagcctagcgaggccgagatcagccacacccagaaagccaccctcgtgtgcctggctaccggcttctaccccgaccatgtggaactgtcttggtgggtcaacggcaaagaggtgcacagcggcgtgtctaccgacccccagccactgaaagaacagcccgccctgaacgacagccggtactgcctgagcagcagactgagagtgtccgccaccttctggcagaacccccggaaccacttcagatgccaggtgcagttctacggcctgagcgagaacgacgagtggacccaggacagagccaagcccgtgacccagatcgtgtctgccgaagcctggggcagagccgattgcggatcccagagcttcggcctgctggaccccaagctgtgctacctgctggatggcatcctgttcatctacggcgtgatcctgaccgccctgttcctgagagtgaagttcagcagaagcgccgacgcccctgcctaccagcagggacagaaccaactgtacaacgagctgaacctgggcagacgggaagagtacgacgtgctggacaagcggagaggcagggaccctgagatgggcggaaagccccagcggagaaagaacccccaggaaggactgtataacgaactccagaaagacaagatggccgaagcctacagcgagatcggcatgaagggcgagcggagaagaggcaagggccacgatggcctgtaccagggcctgagcaccgccaccaaggacacctatgacgccctgcacatgcaggccctgcctccaagaagggccaagcgatctggatctggagcaacaaacttctcactactcaaacaagcaggtgacgtggaggagaatcccgggcctactagtatggactggatttggcgcatccttttccttgtcggcgctgctaccggcgcgcattccttcgaagaggtgcagctggttgaatctggcggaggactggttcagcctggcggatctctgagactgtcttgtgctgccagcggcttcaccttcagctcctacgccatgagctgggtccgacaggctcctggcaaaggactggaatgggtgtccgccatctctggctcaggcggcagcacatattacgccgactctgtgaagggcagattcaccatcagccgggacaacagcaagaacaccctgtacctccagatgaactccctgagagccgaggacaccgccgtgtactattgtgccagactgggctaccccaccaccacactgctgccctttgattattggggccagggcaccctggtcaccgtttcttctacgcgtatccagaaccctgatcctgccgtgtaccagctgcgggatagcaagagcagcgacaagagcgtgtgtctgttcaccgacttcgacagccagaccaacgtgtcccagagcaaggactccgacgtgtacatcaccgataagaccgtgctggacatgcggagcatggacttcaagagcaactccgccgtggcctggtccaacaagtccgatttcgcctgcgccaacgccttcaacaacagcattatccccgaggacacattcttcccaagccccgagagcagctgcggtaccatcactcaaggtttggcagtgtcaaccatctcatcattctttccacctggctaccaagtgtccttctgcctggtcatggtgctgctgttcgccgtggataccggcctgtacttcagcgtcaagaccaacatccggtccagcaccagagactggaaggaccacaagttcaagtggcggaaggaccctcaggacaag

SEQ ID NO: 39071 - DNA, 2145 bp, synthetic construct
  source 1..2145: mol_type = other DNA
atggccttaccagtgaccgccttgctcctgccgctggccttgctgctccacgccgccaggccggacatccagatgacacagagccctagcagcctgtctgccagcgtgggagacagagtgaccatcacctgtagagccagccagagcatcagcagctacctgaactggtatcagcagaagcccggcaaggcccctaaactgctgatctatgccgccagctctctccagagcggagtgcctagcagattttctggcagcggctccggcaccgatttcaccctgacaatatccagcctccagcctgaggacttcgccacctactactgccagcagagctacagcacccctctgacctttggacagggcaccaaggtggaaatcaagctcgaggacctgaagaacgtgttcccacctgaggtggccgtgttcgagcctagcgaggccgagatcagccacacccagaaagccaccctcgtgtgcctggctaccggcttctaccccgaccatgtggaactgtcttggtgggtcaacggcaaagaggtgcacagcggcgtgtctaccgacccccagccactgaaagaacagcccgccctgaacgacagccggtactgcctgagcagcagactgagagtgtccgccaccttctggcagaacccccggaaccacttcagatgccaggtgcagttctacggcctgagcgagaacgacgagtggacccaggacagagccaagcccgtgacccagatcgtgtctgccgaagcctggggcagagccgattgcggatcccagagcttcggcctgctggaccccaagctgtgctacctgctggatggcatcctgttcatctacggcgtgatcctgaccgccctgttcctgagagtgaagttcagcagaagcgccgacgcccctgcctaccagcagggacagaaccaactgtacaacgagctgaacctgggcagacgggaagagtacgacgtgctggacaagcggagaggcagggaccctgagatgggcggaaagccccagcggagaaagaacccccaggaaggactgtataacgaactccagaaagacaagatggccgaagcctacagcgagatcggcatgaagggcgagcggagaagaggcaagggccacgatggcctgtaccagggcctgagcaccgccaccaaggacacctatgacgccctgcacatgcaggccctgcctccaagaagggccaagcgatctggatctggagcaacaaacttctcactactcaaacaagcaggtgacgtggaggagaatcccgggcctactagtatggactggatttggcgcatccttttccttgtcggcgctgctaccggcgcgcattccttcgaagaggtgcagctggttgaatctggcggaggactggttcagcctggcggatctctgagactgtcttgtgctgccagcggcttcaccttcagctcctacgccatgagctgggtccgacaggctcctggcaaaggactggaatgggtgtccgccatctctggctcaggcggcagcacatattacgccgactctgtgaagggcagattcaccatcagccgggacaacagcaagaacaccctgtacctccagatgaactccctgagagccgaggacaccgccgtgtactattgtgccagactgggctaccccaccaccacactgctgccctttgattattggggccagggcaccctggtcaccgtttcttctacgcgtatccagaaccctgatcctgccgtgtaccagctgcgggatagcaagagcagcgacaagagcgtgtgtctgttcaccgacttcgacagccagaccaacgtgtcccagagcaaggactccgacgtgtacatcaccgataagaccgtgctggacatgcggagcatggacttcaagagcaactccgccgtggcctggtccaacaagtccgatttcgcctgcgccaacgccttcaacaacagcattatccccgaggacacattcttcccaagccccgagagcagctgcggtaccatcactcaaggtttggcagtgtcaaccatctcatcattctttccacctggctaccaagtgtccttctgcctggtcatggtgctgctgttcgccgtggataccggcctgtacttcagcgtc

SEQ ID NO: 39072 - DNA, 2148 bp, synthetic construct
  source 1..2148: mol_type = other DNA
atggccttaccagtgaccgccttgctcctgccgctggccttgctgctccacgccgccaggccggacatccagatgacacagagccctagcagcctgtctgccagcgtgggagacagagtgaccatcacctgtagagccagccagagcatcagcagctacctgaactggtatcagcagaagcccggcaaggcccctaaactgctgatctatgccgccagctctctccagagcggagtgcctagcagattttctggcagcggctccggcaccgatttcaccctgacaatatccagcctccagcctgaggacttcgccacctactactgccagcagagctacagcacccctctgacctttggacagggcaccaaggtggaaatcaagctcgaggacctgaagaacgtgttcccacctgaggtggccgtgttcgagcctagcgaggccgagatcagccacacccagaaagccaccctcgtgtgcctggctaccggcttctaccccgaccatgtggaactgtcttggtgggtcaacggcaaagaggtgcacagcggcgtgtctaccgacccccagccactgaaagaacagcccgccctgaacgacagccggtactgcctgagcagcagactgagagtgtccgccaccttctggcagaacccccggaaccacttcagatgccaggtgcagttctacggcctgagcgagaacgacgagtggacccaggacagagccaagcccgtgacccagatcgtgtctgccgaagcctggggcagagccgattgcggatcccagagcttcggcctgctggaccccaagctgtgctacctgctggatggcatcctgttcatctacggcgtgatcctgaccgccctgttcctgagagtgaagttcagcagaagcgccgacgcccctgcctaccagcagggacagaaccaactgtacaacgagctgaacctgggcagacgggaagagtacgacgtgctggacaagcggagaggcagggaccctgagatgggcggaaagccccagcggagaaagaacccccaggaaggactgtataacgaactccagaaagacaagatggccgaagcctacagcgagatcggcatgaagggcgagcggagaagaggcaagggccacgatggcctgtaccagggcctgagcaccgccaccaaggacacctatgacgccctgcacatgcaggccctgcctccaagaagggccaagcgatctggatctggagcaacaaacttctcactactcaaacaagcaggtgacgtggaggagaatcccgggcctactagtatggactggatttggcgcatccttttccttgtcggcgctgctaccggcgcgcattccttcgaagaggtgcagctggttgaatctggcggaggactggttcagcctggcggatctctgagactgtcttgtgctgccagcggcttcaccttcagctcctacgccatgagctgggtccgacaggctcctggcaaaggactggaatgggtgtccgccatctctggctcaggcggcagcacatattacgccgactctgtgaagggcagattcaccatcagccgggacaacagcaagaacaccctgtacctccagatgaactccctgagagccgaggacaccgccgtgtactattgtgccagactgggctaccccaccaccacactgctgccctttgattattggggccagggcaccctggtcaccgtttcttctacgcgtatccagaaccctgatcctgccgtgtaccagctgcgggatagcaagagcagcgacaagagcgtgtgtctgttcaccgacttcgacagccagaccaacgtgtcccagagcaaggactccgacgtgtacatcaccgataagaccgtgctggacatgcggagcatggacttcaagagcaactccgccgtggcctggtccaacaagtccgatttcgcctgcgccaacgccttcaacaacagcattatccccgaggacacattcttcccaagccccgagagcagctgcggtaccatcactcaaggtttggcagtgtcaaccatctcatcattctttccacctggctaccaagtgtccttctgcctggtcatggtgctgctgttcgccgtggataccggcctgtacttcagcgtcaag

SEQ ID NO: 39073 - DNA, 2151 bp, synthetic construct
  source 1..2151: mol_type = other DNA
atggccttaccagtgaccgccttgctcctgccgctggccttgctgctccacgccgccaggccggacatccagatgacacagagccctagcagcctgtctgccagcgtgggagacagagtgaccatcacctgtagagccagccagagcatcagcagctacctgaactggtatcagcagaagcccggcaaggcccctaaactgctgatctatgccgccagctctctccagagcggagtgcctagcagattttctggcagcggctccggcaccgatttcaccctgacaatatccagcctccagcctgaggacttcgccacctactactgccagcagagctacagcacccctctgacctttggacagggcaccaaggtggaaatcaagctcgaggacctgaagaacgtgttcccacctgaggtggccgtgttcgagcctagcgaggccgagatcagccacacccagaaagccaccctcgtgtgcctggctaccggcttctaccccgaccatgtggaactgtcttggtgggtcaacggcaaagaggtgcacagcggcgtgtctaccgacccccagccactgaaagaacagcccgccctgaacgacagccggtactgcctgagcagcagactgagagtgtccgccaccttctggcagaacccccggaaccacttcagatgccaggtgcagttctacggcctgagcgagaacgacgagtggacccaggacagagccaagcccgtgacccagatcgtgtctgccgaagcctggggcagagccgattgcggatcccagagcttcggcctgctggaccccaagctgtgctacctgctggatggcatcctgttcatctacggcgtgatcctgaccgccctgttcctgagagtgaagttcagcagaagcgccgacgcccctgcctaccagcagggacagaaccaactgtacaacgagctgaacctgggcagacgggaagagtacgacgtgctggacaagcggagaggcagggaccctgagatgggcggaaagccccagcggagaaagaacccccaggaaggactgtataacgaactccagaaagacaagatggccgaagcctacagcgagatcggcatgaagggcgagcggagaagaggcaagggccacgatggcctgtaccagggcctgagcaccgccaccaaggacacctatgacgccctgcacatgcaggccctgcctccaagaagggccaagcgatctggatctggagcaacaaacttctcactactcaaacaagcaggtgacgtggaggagaatcccgggcctactagtatggactggatttggcgcatccttttccttgtcggcgctgctaccggcgcgcattccttcgaagaggtgcagctggttgaatctggcggaggactggttcagcctggcggatctctgagactgtcttgtgctgccagcggcttcaccttcagctcctacgccatgagctgggtccgacaggctcctggcaaaggactggaatgggtgtccgccatctctggctcaggcggcagcacatattacgccgactctgtgaagggcagattcaccatcagccgggacaacagcaagaacaccctgtacctccagatgaactccctgagagccgaggacaccgccgtgtactattgtgccagactgggctaccccaccaccacactgctgccctttgattattggggccagggcaccctggtcaccgtttcttctacgcgtatccagaaccctgatcctgccgtgtaccagctgcgggatagcaagagcagcgacaagagcgtgtgtctgttcaccgacttcgacagccagaccaacgtgtcccagagcaaggactccgacgtgtacatcaccgataagaccgtgctggacatgcggagcatggacttcaagagcaactccgccgtggcctggtccaacaagtccgatttcgcctgcgccaacgccttcaacaacagcattatccccgaggacacattcttcccaagccccgagagcagctgcggtaccatcactcaaggtttggcagtgtcaaccatctcatcattctttccacctggctaccaagtgtccttctgcctggtcatggtgctgctgttcgccgtggataccggcctgtacttcagcgtcaagacc

SEQ ID NO: 39074 - DNA, 1962 bp, synthetic construct
  source 1..1962: mol_type = other DNA
atggccttaccagtgaccgccttgctcctgccgctggccttgctgctccacgccgccaggccggacatccagatgacacagagccctagcagcctgtctgccagcgtgggagacagagtgaccatcacctgtagagccagccagagcatcagcagctacctgaactggtatcagcagaagcccggcaaggcccctaaactgctgatctatgccgccagctctctccagagcggagtgcctagcagattttctggcagcggctccggcaccgatttcaccctgacaatatccagcctccagcctgaggacttcgccacctactactgccagcagagctacagcacccctctgacctttggacagggcaccaaggtggaaatcaagctcgagggacagcctaaggccaatcctaccgtgacactgttccctccaagcagcgaagaactccaggccaacaaggccacacttgtgtgcctgatctccgacttctaccctggggctgtgacagtggcttggaaggccgatggatctcctgtgaaagccggcgtggaaaccaccaagccatccaagcagagcaacaacaaatacgccgccagctcctacctgagcctgacacctgagcagtggaagtcccacagatcctacagctgccaagtgacccacgaaggcagcaccgtggaaaagacagtggcccctacagagtgcagcggatccctgggagagcctcagctgtgctatatcctggacgccatcctgtttctgtacggcatcgtgctgaccctgctgtactgccggctgaagatccaagtgcggaaggccgccatcaccagctacgagaaatccgacggcgtgtacaccggcctgagcaccagaaatcaagagacatacgagacactgaagcacgaaaagcctccacaaagggccaagcgatctggatctggagcaacaaacttctcactactcaaacaagcaggtgacgtggaggagaatcccgggcctactagtatggactggatttggcgcatccttttccttgtcggcgctgctaccggcgcgcattccttcgaagaggtgcagctggttgaatctggcggaggactggttcagcctggcggatctctgagactgtcttgtgctgccagcggcttcaccttcagctcctacgccatgagctgggtccgacaggctcctggcaaaggactggaatgggtgtccgccatctctggctcaggcggcagcacatattacgccgactctgtgaagggcagattcaccatcagccgggacaacagcaagaacaccctgtacctccagatgaactccctgagagccgaggacaccgccgtgtactattgtgccagactgggctaccccaccaccacactgctgccctttgattattggggccagggcaccctggtcaccgtttcttctacgcgtgcctctacaaagggaccctccgtgtttcctctggctcccagcagcaagtctacaagcggaggaacagccgctctgggctgcctggtcaaggattactttcccgagcctgtgaccgtgtcctggaatagcggagcactgacaagcggcgtgcacacctttccagccgtgctgcaaagcagcggcctgtactctctgagcagcgtggtcacagtgcctagctctagcctgggcacccagacctacatctgcaatgtgaaccacaagcctagcaacaccaaggtggacaagagagtggaacccaagagctgtggtaccctcggagaaccacagctctgttacattctggatgctatcctgttcctctatgggatcgtcctgacactcctgtattgcagactcaaaattcaagttcgcaaagccgccattacctcttacgagaagagtgatggggtgtacacaggactgtctacccggaatcaagaaacctacgaaaccctcaaacatgagaagccacctcagtaa

SEQ ID NO: 39075 - DNA, 1869 bp, synthetic construct
  source 1..1869: mol_type = other DNA
atggccttaccagtgaccgccttgctcctgccgctggccttgctgctccacgccgccaggccggacatccagatgacacagagccctagcagcctgtctgccagcgtgggagacagagtgaccatcacctgtagagccagccagagcatcagcagctacctgaactggtatcagcagaagcccggcaaggcccctaaactgctgatctatgccgccagctctctccagagcggagtgcctagcagattttctggcagcggctccggcaccgatttcaccctgacaatatccagcctccagcctgaggacttcgccacctactactgccagcagagctacagcacccctctgacctttggacagggcaccaaggtggaaatcaagctcgaggacctgaagaacgtgttcccacctgaggtggccgtgttcgagcctagcgaggccgagatcagccacacccagaaagccaccctcgtgtgcctggctaccggcttctaccccgaccatgtggaactgtcttggtgggtcaacggcaaagaggtgcacagcggcgtgtgtaccgacccccagccactgaaagaacagcccgccctgaacgacagccggtactgcctgagcagcagactgagagtgtccgccaccttctggcagaacccccggaaccacttcagatgccaggtgcagttctacggcctgagcgagaacgacgagtggacccaggacagagccaagcccgtgacccagatcgtgtctgccgaagcctggggcagagccgattgcggctttaccagcgagagctaccagcagggcgtgctgagcgcctactacatgtacttgttgctgctgctgaagtccgtggtgtacttcgccatcatcacatgctgcctgctgcggagaaccgccttctgctgcaacggcgagaagtctagggccaagcgatctggatctggagcaacaaacttctcactactcaaacaagcaggtgacgtggaggagaatcccgggcctactagtatggactggatttggcgcatccttttccttgtcggcgctgctaccggcgcgcattccttcgaagaggtgcagctggttgaatctggcggaggactggttcagcctggcggatctctgagactgtcttgtgctgccagcggcttcaccttcagctcctacgccatgagctgggtccgacaggctcctggcaaaggactggaatgggtgtccgccatctctggctcaggcggcagcacatattacgccgactctgtgaagggcagattcaccatcagccgggacaacagcaagaacaccctgtacctccagatgaactccctgagagccgaggacaccgccgtgtactattgtgccagactgggctaccccaccaccacactgctgccctttgattattggggccagggcaccctggtcaccgtttcttctacgcgtatccagaaccctgatcctgccgtgtaccagctgcgggatagcaagagcagcgacaagagcgtgtgtctgttcaccgacttcgacagccagaccaacgtgtcccagagcaaggactccgacgtgtacatcaccgataagtgcgtgctggacatgcggagcatggacttcaagagcaactccgccgtggcctggtccaacaagtccgatttcgcctgcgccaacgccttcaacaacagcattatccccgaggacacattcttcccaagccccgagagcagctgcgacgtgaagctggtggaaaagagcttcgagacagacaccaacctgaacttccagaacctgagcgtgatcggcttcagaatcctgctgctgaaagtggccggctttaacctgctgatgaccctgcggctgtggtccagc

SEQ ID NO: 39076 - DNA, 1890 bp, synthetic construct
  source 1..1890: mol_type = other DNA
atggccttaccagtgaccgccttgctcctgccgctggccttgctgctccacgccgccaggccggacatccagatgacacagagccctagcagcctgtctgccagcgtgggagacagagtgaccatcacctgtagagccagccagagcatcagcagctacctgaactggtatcagcagaagcccggcaaggcccctaaactgctgatctatgccgccagctctctccagagcggagtgcctagcagattttctggcagcggctccggcaccgatttcaccctgacaatatccagcctccagcctgaggacttcgccacctactactgccagcagagctacagcacccctctgacctttggacagggcaccaaggtggaaatcaagctcgaggacaagcagctggacgccgacgtgtcccccaagcctaccatcttcctgccctctatcgccgagacaaagctccagaaggccggcacctacctgtgcctgctggaaaagttcttcccagatgtgattaagatccactggcaggaaaagaagtccaacaccatcctgggcagccaggaaggcaacaccatgaagaccaacgacacctacatgaagttcagctggctgaccgtgcccgagaagtccctggacaaagaacacagatgcatcgtgcggcacgaaaacaacaagaacggcgtggaccaggaaatcatcttcccacccatcaagaccgatgtgattacaatggaccccaaggacaactgctccaaggacgccaacgataccctgctgctccagctgaccaacaccagcgcctactacatgtacgagatcctgctgggcaaggccaccctgtacgccgtgctggtgtctgccctggtgctgatggctatggtcaagcggaaggacagccggggaagggccaagcgatctggatctggagcaacaaacttctcactactcaaacaagcaggtgacgtggaggagaatcccgggcctactagtatggactggatttggcgcatccttttccttgtcggcgctgctaccggcgcgcattccttcgaagaggtgcagctggttgaatctggcggaggactggttcagcctggcggatctctgagactgtcttgtgctgccagcggcttcaccttcagctcctacgccatgagctgggtccgacaggctcctggcaaaggactggaatgggtgtccgccatctctggctcaggcggcagcacatattacgccgactctgtgaagggcagattcaccatcagccgggacaacagcaagaacaccctgtacctccagatgaactccctgagagccgaggacaccgccgtgtactattgtgccagactgggctaccccaccaccacactgctgccctttgattattggggccagggcaccctggtcaccgtttcttctacgcgtagccagcctcacaccaagcccagcgtgttcgtgatgaagaacggcaccaacgtggcctgcctcgtgaaagagttctaccccaaggacatcaggatcaacctggtgtccagcaagaagatcaccgagttcgaccccgccatcgtgatctcccccagcggcaagtacaacgccgtgaagctggggaagtatgaggacagcaacagcgtgacctgctccgtgcagcacgacaacaagaccgtgcacagcaccgactttgaagtgaaaaccgactccaccgaccacgtgaagcccaaagagacagagaacaccaagcagcccagcaagagctgccacaagcccaaggccatcgtgcacaccgagaaagtgaacatgatgagcctgaccgtgatcggcttcagaatcctgctgctgaaagtggccggctttaacctgctgatgaccctgcggctgtggtccagctaa

SEQ ID NO: 39077 - DNA, 1890 bp, synthetic construct
  source 1..1890: mol_type = other DNA
atggccttaccagtgaccgccttgctcctgccgctggccttgctgctccacgccgccaggccggacatccagatgacacagagccctagcagcctgtctgccagcgtgggagacagagtgaccatcacctgtagagccagccagagcatcagcagctacctgaactggtatcagcagaagcccggcaaggcccctaaactgctgatctatgccgccagctctctccagagcggagtgcctagcagattttctggcagcggctccggcaccgatttcaccctgacaatatccagcctccagcctgaggacttcgccacctactactgccagcagagctacagcacccctctgacctttggacagggcaccaaggtggaaatcaagctcgaggacaagcagctggacgccgacgtgtcccccaagcctaccatcttcctgccctctatcgccgagacaaagctccagaaggccggcacctacctgtgcctgctggaaaagttcttcccagatgtgattaagatccactggcaggaaaagaagtccaacaccatcctgggcagccaggaaggcaacaccatgaagaccaacgacacctacatgaagttcagctggctgaccgtgcccgagaagtccctggacaaagaacacagatgcatcgtgcggcacgaaaacaacaagaacggcgtggaccaggaaatcatcttcccacccatcaagaccgatgtgattacaatggaccccaaggacaactgctccaaggacgccaacgataccctgctgctccagctgaccaacaccagcgccaccatcctgtacgagatcctgctgggcaaggccaccctgtacgccgtgctggtgtctgccctggtgctgatggctatggtcaagcggaaggacagccggggaagggccaagcgatctggatctggagcaacaaacttctcactactcaaacaagcaggtgacgtggaggagaatcccgggcctactagtatggactggatttggcgcatccttttccttgtcggcgctgctaccggcgcgcattccttcgaagaggtgcagctggttgaatctggcggaggactggttcagcctggcggatctctgagactgtcttgtgctgccagcggcttcaccttcagctcctacgccatgagctgggtccgacaggctcctggcaaaggactggaatgggtgtccgccatctctggctcaggcggcagcacatattacgccgactctgtgaagggcagattcaccatcagccgggacaacagcaagaacaccctgtacctccagatgaactccctgagagccgaggacaccgccgtgtactattgtgccagactgggctaccccaccaccacactgctgccctttgattattggggccagggcaccctggtcaccgtttcttctacgcgtagccagcctcacaccaagcccagcgtgttcgtgatgaagaacggcaccaacgtggcctgcctcgtgaaagagttctaccccaaggacatcaggatcaacctggtgtccagcaagaagatcaccgagttcgaccccgccatcgtgatctcccccagcggcaagtacaacgccgtgaagctggggaagtatgaggacagcaacagcgtgacctgctccgtgcagcacgacaacaagaccgtgcacagcaccgactttgaagtgaaaaccgactccaccgaccacgtgaagcccaaagagacagagaacaccaagcagcccagcaagagctgccacaagcccaaggccatcgtgcacaccgagaaagtgaacatgatgagcctgaccgtgatcggcttcagaatcctgctgctgaaagtggccggctttaacctgctgatgaccctgcggctgtggtccagctaa

SEQ ID NO: 39078 - DNA, 1890 bp, synthetic construct
  source 1..1890: mol_type = other DNA
atggccttaccagtgaccgccttgctcctgccgctggccttgctgctccacgccgccaggccggacatccagatgacacagagccctagcagcctgtctgccagcgtgggagacagagtgaccatcacctgtagagccagccagagcatcagcagctacctgaactggtatcagcagaagcccggcaaggcccctaaactgctgatctatgccgccagctctctccagagcggagtgcctagcagattttctggcagcggctccggcaccgatttcaccctgacaatatccagcctccagcctgaggacttcgccacctactactgccagcagagctacagcacccctctgacctttggacagggcaccaaggtggaaatcaagctcgaggacaagcagctggacgccgacgtgtcccccaagcctaccatcttcctgccctctatcgccgagacaaagctccagaaggccggcacctacctgtgcctgctggaaaagttcttcccagatgtgattaagatccactggcaggaaaagaagtccaacaccatcctgggcagccaggaaggcaacaccatgaagaccaacgacacctacatgaagttcagctggctgaccgtgcccgagaagtccctggacaaagaacacagatgcatcgtgcggcacgaaaacaacaagaacggcgtggaccaggaaatcatcttcccacccatcaagaccgatgtgattacaatggaccccaaggacaactgctccaaggacgccaacgataccctgctgctccagctgaccaacaccagcgcctactacatgtacgagatcctgctgggcaaggccaccctgtacgccgtgctggtgtctgccctggtgctgatggctatggtcaagcggaaggacagccggggaagggccaagcgatctggatctggagcaacaaacttctcactactcaaacaagcaggtgacgtggaggagaatcccgggcctactagtatggactggatttggcgcatccttttccttgtcggcgctgctaccggcgcgcattccttcgaagaggtgcagctggttgaatctggcggaggactggttcagcctggcggatctctgagactgtcttgtgctgccagcggcttcaccttcagctcctacgccatgagctgggtccgacaggctcctggcaaaggactggaatgggtgtccgccatctctggctcaggcggcagcacatattacgccgactctgtgaagggcagattcaccatcagccgggacaacagcaagaacaccctgtacctccagatgaactccctgagagccgaggacaccgccgtgtactattgtgccagactgggctaccccaccaccacactgctgccctttgattattggggccagggcaccctggtcaccgtttcttctacgcgtagccagcctcacaccaagcccagcgtgttcgtgatgaagaacggcaccaacgtggcctgcctcgtgaaagagttctaccccaaggacatcaggatcaacctggtgtccagcaagaagatcaccgagttcgaccccgccatcgtgatctcccccagcggcaagtacaacgccgtgaagctggggaagtacgaggacagcaacagcgtgacctgctccgtgcagcacgacaacaagaccgtgcacagcaccgactttgaagtgaaaaccgactccaccgaccacgtgaagcccaaagagacagagaacaccaagcagcccagcaagagctgccacaagcccaaggccatcgtgcacaccgagaaagtgaacatgatgagcctgaccgtgctgggcttcagaatcctgctgctgaaagtggccggctttaacctgctgatgaccctgcggctgtggtccagctaa

SEQ ID NO: 39079 - DNA, 1890 bp, synthetic construct
  source 1..1890: mol_type = other DNA
atggccttaccagtgaccgccttgctcctgccgctggccttgctgctccacgccgccaggccggacatccagatgacacagagccctagcagcctgtctgccagcgtgggagacagagtgaccatcacctgtagagccagccagagcatcagcagctacctgaactggtatcagcagaagcccggcaaggcccctaaactgctgatctatgccgccagctctctccagagcggagtgcctagcagattttctggcagcggctccggcaccgatttcaccctgacaatatccagcctccagcctgaggacttcgccacctactactgccagcagagctacagcacccctctgacctttggacagggcaccaaggtggaaatcaagctcgaggacaagcagctggacgccgacgtgtcccccaagcctaccatcttcctgccctctatcgccgagacaaagctccagaaggccggcacctacctgtgcctgctggaaaagttcttcccagatgtgattaagatccactggcaggaaaagaagtccaacaccatcctgggcagccaggaaggcaacaccatgaagaccaacgacacctacatgaagttcagctggctgaccgtgcccgagaagtccctggacaaagaacacagatgcatcgtgcggcacgaaaacaacaagaacggcgtggaccaggaaatcatcttcccacccatcaagaccgatgtgattacaatggaccccaaggacaactgctccaaggacgccaacgataccctgctgctccagctgaccaacaccagcgccaccatcctgtacgagatcctgctgggcaaggccaccctgtacgccgtgctggtgtctgccctggtgctgatggctatggtcaagcggaaggacagccggggaagggccaagcgatctggatctggagcaacaaacttctcactactcaaacaagcaggtgacgtggaggagaatcccgggcctactagtatggactggatttggcgcatccttttccttgtcggcgctgctaccggcgcgcattccttcgaagaggtgcagctggttgaatctggcggaggactggttcagcctggcggatctctgagactgtcttgtgctgccagcggcttcaccttcagctcctacgccatgagctgggtccgacaggctcctggcaaaggactggaatgggtgtccgccatctctggctcaggcggcagcacatattacgccgactctgtgaagggcagattcaccatcagccgggacaacagcaagaacaccctgtacctccagatgaactccctgagagccgaggacaccgccgtgtactattgtgccagactgggctaccccaccaccacactgctgccctttgattattggggccagggcaccctggtcaccgtttcttctacgcgtagccagcctcacaccaagcccagcgtgttcgtgatgaagaacggcaccaacgtggcctgcctcgtgaaagagttctaccccaaggacatcaggatcaacctggtgtccagcaagaagatcaccgagttcgaccccgccatcgtgatctcccccagcggcaagtacaacgccgtgaagctggggaagtacgaggacagcaacagcgtgacctgctccgtgcagcacgacaacaagaccgtgcacagcaccgactttgaagtgaaaaccgactccaccgaccacgtgaagcccaaagagacagagaacaccaagcagcccagcaagagctgccacaagcccaaggccatcgtgcacaccgagaaagtgaacatgatgagcctgaccgtgctgggcttcagaatcctgctgctgaaagtggccggctttaacctgctgatgaccctgcggctgtggtccagctaa

SEQ ID NO: 39080 - DNA, 1872 bp, synthetic construct
  source 1..1872: mol_type = other DNA
atggccttaccagtgaccgccttgctcctgccgctggccttgctgctccacgccgccaggccggacatccagatgacacagagccctagcagcctgtctgccagcgtgggagacagagtgaccatcacctgtagagccagccagagcatcagcagctacctgaactggtatcagcagaagcccggcaaggcccctaaactgctgatctatgccgccagctctctccagagcggagtgcctagcagattttctggcagcggctccggcaccgatttcaccctgacaatatccagcctccagcctgaggacttcgccacctactactgccagcagagctacagcacccctctgacctttggacagggcaccaaggtggaaatcaagctcgaggacctgaagaacgtgttcccacctgaggtggccgtgttcgagcctagcgaggccgagatcagccacacccagaaagccaccctcgtgtgcctggctaccggcttctaccccgaccatgtggaactgtcttggtgggtcaacggcaaagaggtgcacagcggcgtgtgtaccgacccccagccactgaaagaacagcccgccctgaacgacagccggtactgcctgagcagcagactgagagtgtccgccaccttctggcagaacccccggaaccacttcagatgccaggtgcagttctacggcctgagcgagaacgacgagtggacccaggacagagccaagcccgtgacccagatcgtgtctgccgaagcctggggcagagccgattgcggctttaccagcgagagctaccagcagggcgtgctgagcgccaccatcctgtacttgttgctgctgctgaagtccgtggtgtacttcgccatcatcacatgctgcctgctgcggagaaccgccttctgctgcaacggcgagaagtctagggccaagcgatctggatctggagcaacaaacttctcactactcaaacaagcaggtgacgtggaggagaatcccgggcctactagtatggactggatttggcgcatccttttccttgtcggcgctgctaccggcgcgcattccttcgaagaggtgcagctggttgaatctggcggaggactggttcagcctggcggatctctgagactgtcttgtgctgccagcggcttcaccttcagctcctacgccatgagctgggtccgacaggctcctggcaaaggactggaatgggtgtccgccatctctggctcaggcggcagcacatattacgccgactctgtgaagggcagattcaccatcagccgggacaacagcaagaacaccctgtacctccagatgaactccctgagagccgaggacaccgccgtgtactattgtgccagactgggctaccccaccaccacactgctgccctttgattattggggccagggcaccctggtcaccgtttcttctacgcgtatccagaaccctgatcctgccgtgtaccagctgcgggatagcaagagcagcgacaagagcgtgtgtctgttcaccgacttcgacagccagaccaacgtgtcccagagcaaggactccgacgtgtacatcaccgataagtgcgtgctggacatgcggagcatggacttcaagagcaactccgccgtggcctggtccaacaagtccgatttcgcctgcgccaacgccttcaacaacagcattatccccgaggacacattcttcccaagccccgagagcagctgcgacgtgaagctggtggaaaagagcttcgagacagacaccaacctgaacttccagaacctgagcgtgatcggcctgcggatgctgttcgccaaaaccgtggccgtgaacttcctgctgaccgccaagctgttcttcctctaa

SEQ ID NO: 39081 - DNA, 1959 bp, synthetic construct
  source 1..1959: mol_type = other DNA
atggccttaccagtgaccgccttgctcctgccgctggccttgctgctccacgccgccaggccggacatccagatgacacagagccctagcagcctgtctgccagcgtgggagacagagtgaccatcacctgtagagccagccagagcatcagcagctacctgaactggtatcagcagaagcccggcaaggcccctaaactgctgatctatgccgccagctctctccagagcggagtgcctagcagattttctggcagcggctccggcaccgatttcaccctgacaatatccagcctccagcctgaggacttcgccacctactactgccagcagagctacagcacccctctgacctttggacagggcaccaaggtggaaatcaagctcgaggacctgaagaacgtgttcccacctgaggtggccgtgttcgagcctagcgaggccgagatcagccacacccagaaagccaccctcgtgtgcctggctaccggcttctaccccgaccatgtggaactgtcttggtgggtcaacggcaaagaggtgcacagcggcgtgtctaccgacccccagccactgaaagaacagcccgccctgaacgacagccggtactgcctgagcagcagactgagagtgtccgccaccttctggcagaacccccggaaccacttcagatgccaggtgcagttctacggcctgagcgagaacgacgagtggacccaggacagagccaagcccgtgacccagatcgtgtctgccgaagcctggggcagagccgattgcggatcctccaaggacgccaacgataccctgctgctccagctgaccaacaccagcgcctactacatgtacttgttgctgctgctgaagtccgtggtgtacttcgccatcatcacatgctgcctgctgcggagaaccgccttctgctgcaacggcgagaagtctagggccaagcgatctggatctggagcaacaaacttctcactactcaaacaagcaggtgacgtggaggagaatcccgggcctactagtatggactggatttggcgcatccttttccttgtcggcgctgctaccggcgcgcattccttcgaagaggtgcagctggttgaatctggcggaggactggttcagcctggcggatctctgagactgtcttgtgctgccagcggcttcaccttcagctcctacgccatgagctgggtccgacaggctcctggcaaaggactggaatgggtgtccgccatctctggctcaggcggcagcacatattacgccgactctgtgaagggcagattcaccatcagccgggacaacagcaagaacaccctgtacctccagatgaactccctgagagccgaggacaccgccgtgtactattgtgccagactgggctaccccaccaccacactgctgccctttgattattggggccagggcaccctggtcaccgtttcttctacgcgtatccagaaccctgatcctgccgtgtaccagctgcgggatagcaagagcagcgacaagagcgtgtgtctgttcaccgacttcgacagccagaccaacgtgtcccagagcaaggactccgacgtgtacatcaccgataagaccgtgctggacatgcggagcatggacttcaagagcaactccgccgtggcctggtccaacaagtccgatttcgcctgcgccaacgccttcaacaacagcattatccccgaggacacattcttcccaagccccgagagcagctgcggtaccgaagtgaaaaccgactccaccgaccacgtgaagcccaaagagacagagaacaccaagcagcccagcaagagctgccacaagcccaaggccatcgtgcacaccgagaaagtgaacatgatgagcctgaccgtgctgggcctgcggatgctgttcgccaaaaccgtggccgtgaacttcctgctgaccgccaagctgttcttcctctaa

SEQ ID NO: 39082 - DNA, 1869 bp, synthetic construct
  source 1..1869: mol_type = other DNA
atggccttaccagtgaccgccttgctcctgccgctggccttgctgctccacgccgccaggccggacatccagatgacacagagccctagcagcctgtctgccagcgtgggagacagagtgaccatcacctgtagagccagccagagcatcagcagctacctgaactggtatcagcagaagcccggcaaggcccctaaactgctgatctatgccgccagctctctccagagcggagtgcctagcagattttctggcagcggctccggcaccgatttcaccctgacaatatccagcctccagcctgaggacttcgccacctactactgccagcagagctacagcacccctctgacctttggacagggcaccaaggtggaaatcaagctcgaggacctgaagaacgtgttcccacctgaggtggccgtgttcgagcctagcgaggccgagatcagccacacccagaaagccaccctcgtgtgcctggctaccggcttctaccccgaccatgtggaactgtcttggtgggtcaacggcaaagaggtgcacagcggcgtgtgtaccgacccccagccactgaaagaacagcccgccctgaacgacagccggtactgcctgagcagcagactgagagtgtccgccaccttctggcagaacccccggaaccacttcagatgccaggtgcagttctacggcctgagcgagaacgacgagtggacccaggacagagccaagcccgtgacccagatcgtgtctgccgaagcctggggcagagccgattgcgacgtgaagctggtggaaaagagcttcgagacagacaccaacctgaacttccagaacctgagcgtgatcggcttcagaatcctgctgctgaaagtggccggctttaacctgctgatgaccctgcggctgtggtccagcagggccaagcgatctggatctggagcaacaaacttctcactactcaaacaagcaggtgacgtggaggagaatcccgggcctactagtatggactggatttggcgcatccttttccttgtcggcgctgctaccggcgcgcattccttcgaagaggtgcagctggttgaatctggcggaggactggttcagcctggcggatctctgagactgtcttgtgctgccagcggcttcaccttcagctcctacgccatgagctgggtccgacaggctcctggcaaaggactggaatgggtgtccgccatctctggctcaggcggcagcacatattacgccgactctgtgaagggcagattcaccatcagccgggacaacagcaagaacaccctgtacctccagatgaactccctgagagccgaggacaccgccgtgtactattgtgccagactgggctaccccaccaccacactgctgccctttgattattggggccagggcaccctggtcaccgtttcttctacgcgtatccagaaccctgatcctgccgtgtaccagctgcgggatagcaagagcagcgacaagagcgtgtgtctgttcaccgacttcgacagccagaccaacgtgtcccagagcaaggactccgacgtgtacatcaccgataagtgcgtgctggacatgcggagcatggacttcaagagcaactccgccgtggcctggtccaacaagtccgatttcgcctgcgccaacgccttcaacaacagcattatccccgaggacacattcttcccaagccccgagagcagctgcggctttaccagcgagagctaccagcagggcgtgctgagcgccaccatcctgtacgagatcctgctgggcaaggccaccctgtacgccgtgctggtgtctgccctggtgctgatggctatggtcaagcggaaggacagccggggataa

SEQ ID NO: 39083 - DNA, 1869 bp, synthetic construct
  source 1..1869: mol_type = other DNA
atggccttaccagtgaccgccttgctcctgccgctggccttgctgctccacgccgccaggccggacatccagatgacacagagccctagcagcctgtctgccagcgtgggagacagagtgaccatcacctgtagagccagccagagcatcagcagctacctgaactggtatcagcagaagcccggcaaggcccctaaactgctgatctatgccgccagctctctccagagcggagtgcctagcagattttctggcagcggctccggcaccgatttcaccctgacaatatccagcctccagcctgaggacttcgccacctactactgccagcagagctacagcacccctctgacctttggacagggcaccaaggtggaaatcaagctcgaggacctgaagaacgtgttcccacctgaggtggccgtgttcgagcctagcgaggccgagatcagccacacccagaaagccaccctcgtgtgcctggctaccggcttctaccccgaccatgtggaactgtcttggtgggtcaacggcaaagaggtgcacagcggcgtgtgtaccgacccccagccactgaaagaacagcccgccctgaacgacagccggtactgcctgagcagcagactgagagtgtccgccaccttctggcagaacccccggaaccacttcagatgccaggtgcagttctacggcctgagcgagaacgacgagtggacccaggacagagccaagcccgtgacccagatcgtgtctgccgaagcctggggcagagccgattgcggctttaccagcgagagctaccagcagggcgtgctgagcgccaccaacctgagcgtgatcggcttcagaatcctgctgctgaaagtggccggctttaacctgctgatgaccctgcggctgtggtccagcagggccaagcgatctggatctggagcaacaaacttctcactactcaaacaagcaggtgacgtggaggagaatcccgggcctactagtatggactggatttggcgcatccttttccttgtcggcgctgctaccggcgcgcattccttcgaagaggtgcagctggttgaatctggcggaggactggttcagcctggcggatctctgagactgtcttgtgctgccagcggcttcaccttcagctcctacgccatgagctgggtccgacaggctcctggcaaaggactggaatgggtgtccgccatctctggctcaggcggcagcacatattacgccgactctgtgaagggcagattcaccatcagccgggacaacagcaagaacaccctgtacctccagatgaactccctgagagccgaggacaccgccgtgtactattgtgccagactgggctaccccaccaccacactgctgccctttgattattggggccagggcaccctggtcaccgtttcttctacgcgtatccagaaccctgatcctgccgtgtaccagctgcgggatagcaagagcagcgacaagagcgtgtgtctgttcaccgacttcgacagccagaccaacgtgtcccagagcaaggactccgacgtgtacatcaccgataagtgcgtgctggacatgcggagcatggacttcaagagcaactccgccgtggcctggtccaacaagtccgatttcgcctgcgccaacgccttcaacaacagcattatccccgaggacacattcttcccaagccccgagagcagctgcgacgtgaagctggtggaaaagagcttcgagacagacaccaacctgaacttccagatcctgtacgagatcctgctgggcaaggccaccctgtacgccgtgctggtgtctgccctggtgctgatggctatggtcaagcggaaggacagccggggataa

SEQ ID NO: 39084 - DNA, 1869 bp, synthetic construct; identical to SEQ ID NO: 39082
  source 1..1869: mol_type = other DNA

SEQ ID NO: 39085 - DNA, 1869 bp, synthetic construct; identical to SEQ ID NO: 39083
  source 1..1869: mol_type = other DNA

SEQ ID NO: 39086 - DNA, 1866 bp, synthetic construct
  source 1..1866: mol_type = other DNA
atggccttaccagtgaccgccttgctcctgccgctggccttgctgctccacgccgccaggccggacatccagatgacacagagccctagcagcctgtctgccagcgtgggagacagagtgaccatcacctgtagagccagccagagcatcagcagctacctgaactggtatcagcagaagcccggcaaggcccctaaactgctgatctatgccgccagctctctccagagcggagtgcctagcagattttctggcagcggctccggcaccgatttcaccctgacaatatccagcctccagcctgaggacttcgccacctactactgccagcagagctacagcacccctctgacctttggacagggcaccaaggtggaaatcaagctcgaggacctgaagaacgtgttcccacctgaggtggccgtgttcgagcctagcgaggccgagatcagccacacccagaaagccaccctcgtgtgcctggctaccggcttctaccccgaccatgtggaactgtcttggtgggtcaacggcaaagaggtgcacagcggcgtgtgtaccgacccccagccactgaaagaacagcccgccctgaacgacagccggtactgcctgagcagcagactgagagtgtccgccaccttctggcagaacccccggaaccacttcagatgccaggtgcagttctacggcctgagcgagaacgacgagtggacccaggacagagccaagcccgtgacccagatcgtgtctgccgaagcctggggcagagccgattgcgacgtgaagctggtggaaaagagcttcgagacagacaccaacctgaacttccagaacctgagcgtgatcggcttcagaatcctgctgctgaaagtggccggctttaacctgctgatgaccctgcggctgtggtccagcagggccaagcgatctggatctggagcaacaaacttctcactactcaaacaagcaggtgacgtggaggagaatcccgggcctactagtatggactggatttggcgcatccttttccttgtcggcgctgctaccggcgcgcattccttcgaagaggtgcagctggttgaatctggcggaggactggttcagcctggcggatctctgagactgtcttgtgctgccagcggcttcaccttcagctcctacgccatgagctgggtccgacaggctcctggcaaaggactggaatgggtgtccgccatctctggctcaggcggcagcacatattacgccgactctgtgaagggcagattcaccatcagccgggacaacagcaagaacaccctgtacctccagatgaactccctgagagccgaggacaccgccgtgtactattgtgccagactgggctaccccaccaccacactgctgccctttgattattggggccagggcaccctggtcaccgtttcttctacgcgtatccagaaccctgatcctgccgtgtaccagctgcgggatagcaagagcagcgacaagagcgtgtgtctgttcaccgacttcgacagccagaccaacgtgtcccagagcaaggactccgacgtgtacatcaccgataagtgcgtgctggacatgcggagcatggacttcaagagcaactccgccgtggcctggtccaacaagtccgatttcgcctgcgccaacgccttcaacaacagcattatccccgaggacacattcttcccaagccccgagagcagctgcggctttaccagcgagagctaccagcagggcgtgctgagcgccaccatcctgtacgagatcctgctgggcaaggccaccctgtacgccgtgctggtgtctgccctggtgctgatggctatggtcaagcggaaggacagccgggga

SEQ ID NO: 39087 - DNA, 1878 bp, synthetic construct
  source 1..1878: mol_type = other DNA
atggccttaccagtgaccgccttgctcctgccgctggccttgctgctccacgccgccaggccggacatccagatgacacagagccctagcagcctgtctgccagcgtgggagacagagtgaccatcacctgtagagccagccagagcatcagcagctacctgaactggtatcagcagaagcccggcaaggcccctaaactgctgatctatgccgccagctctctccagagcggagtgcctagcagattttctggcagcggctccggcaccgatttcaccctgacaatatccagcctccagcctgaggacttcgccacctactactgccagcagagctacagcacccctctgacctttggacagggcaccaaggtggaaatcaagctcgaggccgacgtgtcccccaagcctaccatcttcctgccctctatcgccgagacaaagctccagaaggccggcacctacctgtgcctgctggaaaagttcttcccagatgtgattaagatccactggcaggaaaagaagtccaacaccatcctgggcagccaggaaggcaacaccatgaagaccaacgacacctacatgaagttcagctggctgaccgtgcccgagaagtccctggacaaagaacacagatgcatcgtgcggcacgaaaacaacaagaacggcgtggaccaggaaatcatcttcccacccatcaagaccgatgtgattacaatggaccccaaggacaactgctccaaggacgccaacgataccctgctgctccagctgaccaacaccagcgcctactacatgtacttgttgctgctgctgaagtccgtggtgtacttcgccatcatcacatgctgcctgctgcggagaaccgccttctgctgcaacggcgagaagtctagggccaagcgatctggatctggagcaacaaacttctcactactcaaacaagcaggtgacgtggaggagaatcccgggcctactagtatggactggatttggcgcatccttttccttgtcggcgctgctaccggcgcgcattccttcgaagaggtgcagctggttgaatctggcggaggactggttcagcctggcggatctctgagactgtcttgtgctgccagcggcttcaccttcagctcctacgccatgagctgggtccgacaggctcctggcaaaggactggaatgggtgtccgccatctctggctcaggcggcagcacatattacgccgactctgtgaagggcagattcaccatcagccgggacaacagcaagaacaccctgtacctccagatgaactccctgagagccgaggacaccgccgtgtactattgtgccagactgggctaccccaccaccacactgctgccctttgattattggggccagggcaccctggtcaccgtttcttctacgcgtagccagcctcacaccaagcccagcgtgttcgtgatgaagaacggcaccaacgtggcctgcctcgtgaaagagttctaccccaaggacatcaggatcaacctggtgtccagcaagaagatcaccgagttcgaccccgccatcgtgatctcccccagcggcaagtacaacgccgtgaagctggggaagtatgaggacagcaacagcgtgacctgctccgtgcagcacgacaacaagaccgtgcacagcaccgactttgaagtgaaaaccgactccaccgaccacgtgaagcccaaagagacagagaacaccaagcagcccagcaagagctgccacaagcccaaggccatcgtgcacaccgagaaagtgaacatgatgagcctgaccgtgatcggcttcagaatcctgctgctgaaagtggccggctttaacctgctgatgaccctgcggctgtggtccagctaa

SEQ ID NO: 39088 - DNA, 1878 bp, synthetic construct
  source 1..1878: mol_type = other DNA
atggccttaccagtgaccgccttgctcctgccgctggccttgctgctccacgccgccaggccggacatccagatgacacagagccctagcagcctgtctgccagcgtgggagacagagtgaccatcacctgtagagccagccagagcatcagcagctacctgaactggtatcagcagaagcccggcaaggcccctaaactgctgatctatgccgccagctctctccagagcggagtgcctagcagattttctggcagcggctccggcaccgatttcaccctgacaatatccagcctccagcctgaggacttcgccacctactactgccagcagagctacagcacccctctgacctttggacagggcaccaaggtggaaatcaagctcgaggccgacgtgtcccccaagcctaccatcttcctgccctctatcgccgagacaaagctccagaaggccggcacctacctgtgcctgctggaaaagttcttcccagatgtgattaagatccactggcaggaaaagaagtccaacaccatcctgggcagccaggaaggcaacaccatgaagaccaacgacacctacatgaagttcagctggctgaccgtgcccgagaagtccctggacaaagaacacagatgcatcgtgcggcacgaaaacaacaagaacggcgtggaccaggaaatcatcttcccacccatcaagaccgatgtgattacaatggaccccaaggacaactgctccaaggacgccaacgataccctgctgctccagctgaccaacaccagcgcctactacatgtacttgttgctgctgctgaagtccgtggtgtacttcgccatcatcacatgctgcctgctgcggagaaccgccttctgctgcaacggcgagaagtctagggccaagcgatctggatctggagcaacaaacttctcactactcaaacaagcaggtgacgtggaggagaatcccgggcctactagtatggactggatttggcgcatccttttccttgtcggcgctgctaccggcgcgcattccttcgaagaggtgcagctggttgaatctggcggaggactggttcagcctggcggatctctgagactgtcttgtgctgccagcggcttcaccttcagctcctacgccatgagctgggtccgacaggctcctggcaaaggactggaatgggtgtccgccatctctggctcaggcggcagcacatattacgccgactctgtgaagggcagattcaccatcagccgggacaacagcaagaacaccctgtacctccagatgaactccctgagagccgaggacaccgccgtgtactattgtgccagactgggctaccccaccaccacactgctgccctttgattattggggccagggcaccctggtcaccgtttcttctacgcgtagccagcctcacaccaagcccagcgtgttcgtgatgaagaacggcaccaacgtggcctgcctcgtgaaagagttctaccccaaggacatcaggatcaacctggtgtccagcaagaagatcaccgagttcgaccccgccatcgtgatctcccccagcggcaagtacaacgccgtgaagctggggaagtacgaggacagcaacagcgtgacctgctccgtgcagcacgacaacaagaccgtgcacagcaccgactttgaagtgaaaaccgactccaccgaccacgtgaagcccaaagagacagagaacaccaagcagcccagcaagagctgccacaagcccaaggccatcgtgcacaccgagaaagtgaacatgatgagcctgaccgtgctgggcttcagaatcctgctgctgaaagtggccggctttaacctgctgatgaccctgcggctgtggtccagctaa

SEQ ID NO: 39089 - DNA, 1866 bp, synthetic construct; identical to SEQ ID NO: 39086
  source 1..1866: mol_type = other DNA

SEQ ID NO: 39090 - DNA, 1878 bp, synthetic construct
  source 1..1878: mol_type = other DNA
atggccttaccagtgaccgccttgctcctgccgctggccttgctgctccacgccgccaggccggacatccagatgacacagagccctagcagcctgtctgccagcgtgggagacagagtgaccatcacctgtagagccagccagagcatcagcagctacctgaactggtatcagcagaagcccggcaaggcccctaaactgctgatctatgccgccagctctctccagagcggagtgcctagcagattttctggcagcggctccggcaccgatttcaccctgacaatatccagcctccagcctgaggacttcgccacctactactgccagcagagctacagcacccctctgacctttggacagggcaccaaggtggaaatcaagctcgagatccagaaccctgatcctgccgtgtaccagctgcgggatagcaagagcagcgacaagagcgtgtgtctgttcaccgacttcgacagccagaccaacgtgtcccagagcaaggactccgacgtgtacatcaccgataagtgcgtgctggacatgcggagcatggacttcaagagcaactccgccgtggcctggtccaacaagtccgatttcgcctgcgccaacgccttcaacaacagcattatccccgaggacacattcttcccaagccccgagagcagctgcggctttaccagcgagagctaccagcagggcgtgctgagcgccaccatcctgtacgagatcctgctgggcaaggccaccctgtacgccgtgctggtgtctgccctggtgctgatggctatggtcaagcggaaggacagccggggacgcgccaagagaagcggatctggcgtgaagcagaccctgaatttcgacctgctgaagctggctggcgacgtggaatccaacccaggccctactagtatggactggatttggcgcatccttttccttgtcggcgctgctaccggcgcgcattccttcgaagaggtgcagctggttgaatctggcggaggactggttcagcctggcggatctctgagactgtcttgtgctgccagcggcttcaccttcagctcctacgccatgagctgggtccgacaggctcctggcaaaggactggaatgggtgtccgccatctctggctcaggcggcagcacatattacgccgactctgtgaagggcagattcaccatcagccgggacaacagcaagaacaccctgtacctccagatgaactccctgagagccgaggacaccgccgtgtactattgtgccagactgggctaccccaccaccacactgctgccctttgattattggggccagggcaccctggtcaccgtttcttctacgcgtgaggacctgaagaacgtgttcccacctgaggtggccgtgttcgagcctagcgaggccgagatcagccacacccagaaagccaccctcgtgtgcctggctaccggcttctaccccgaccatgtggaactgtcttggtgggtcaacggcaaagaggtgcacagcggcgtgtgtaccgacccccagccactgaaagaacagcccgccctgaacgacagccggtactgcctgagcagcagactgagagtgtccgccaccttctggcagaacccccggaaccacttcagatgccaggtgcagttctacggcctgagcgagaacgacgagtggacccaggacagagccaagcccgtgacccagatcgtgtctgccgaagcctggggcagagccgattgcgacgtgaagctggtggaaaagagcttcgagacagacaccaacctgaacttccagaacctgagcgtgatcggcttcagaatcctgctgctgaaagtggccggctttaacctgctgatgaccctgcggctgtggtccagc

SEQ ID NO: 39091 - DNA, 2271 bp, synthetic construct
  source 1..2271: mol_type = other DNA
atggccttaccagtgaccgccttgctcctgccgctggccttgctgctccacgccgccaggccggaagtgcagctggttgaatctggcggaggactggttcagcctggcggatctctgagactgtcttgtgccgccagcggcttcagcttcagcgacttttggatgagctgggtccgacaggcccctggcaaaggacttgaatgggtcgccacaatcagccaggccggcagcgagaaggactacgtggactctgtgaagggcagattcaccatcagccgggacaacgccaagaagtccctgtacctccagatgaacagcctgagagccgaggacaccgccgtgtactattgtgcctctggcgtgtacagcttcgactacagaggccagggcaccctggtcacagtctcttctggtaccggcggaggcggatctggcggcggaggtagcggtggcggaggatctgaattcgacatccagatgacacagagccctagcagcctgtctgccagcgtgggagacagagtgaccatcacctgtagagccagccagagcatcagcagctacctgaactggtatcagcagaagcccggcaaggcccctaaactgctgatctatgccgccagctctctccagagcggagtgcctagcagattttctggcagcggctccggcaccgatttcaccctgacaatatccagcctccagcctgaggacttcgccacctactactgccagcagagctacagcacccctctgacctttggacagggcaccaaggtggaaatcaagctcgaggacctgaagaacgtgttcccacctgaggtggccgtgttcgagcctagcgaggccgagatcagccacacccagaaagccaccctcgtgtgcctggctaccggcttctaccccgaccatgtggaactgtcttggtgggtcaacggcaaagaggtgcacagcggcgtgtgtaccgacccccagccactgaaagaacagcccgccctgaacgacagccggtactgcctgagcagcagactgagagtgtccgccaccttctggcagaacccccggaaccacttcagatgccaggtgcagttctacggcctgagcgagaacgacgagtggacccaggacagagccaagcccgtgacccagatcgtgtctgccgaagcctggggcagagccgattgcgacgtgaagctggtggaaaagagcttcgagacagacaccaacctgaacttccagaacctgagcgtgatcggcttcagaatcctgctgctgaaagtggccggctttaacctgctgatgaccctgcggctgtggtccagcagggccaagcgatctggatctggagcaacaaacttctcactactcaaacaagcaggtgacgtggaggagaatcccgggcctactagtatggactggatttggcgcatccttttccttgtcggcgctgctaccggcgcgcattccttcgaagaggtgcagctggttgaatctggcggaggactggttcagcctggcggatctctgagactgtcttgtgctgccagcggcttcaccttcagctcctacgccatgagctgggtccgacaggctcctggcaaaggactggaatgggtgtccgccatctctggctcaggcggcagcacatattacgccgactctgtgaagggcagattcaccatcagccgggacaacagcaagaacaccctgtacctccagatgaactccctgagagccgaggacaccgccgtgtactattgtgccagactgggctaccccaccaccacactgctgccctttgattattggggccagggcaccctggtcaccgtttcttctacgcgtatccagaaccctgatcctgccgtgtaccagctgcgggatagcaagagcagcgacaagagcgtgtgtctgttcaccgacttcgacagccagaccaacgtgtcccagagcaaggactccgacgtgtacatcaccgataagtgcgtgctggacatgcggagcatggacttcaagagcaactccgccgtggcctggtccaacaagtccgatttcgcctgcgccaacgccttcaacaacagcattatccccgaggacacattcttcccaagccccgagagcagctgcggctttaccagcgagagctaccagcagggcgtgctgagcgccaccatcctgtacgagatcctgctgggcaaggccaccctgtacgccgtgctggtgtctgccctggtgctgatggctatggtcaagcggaaggacagccgggga

SEQ ID NO: 39092 - DNA, 2283 bp, synthetic construct
  source 1..2283: mol_type = other DNA
atggccttaccagtgaccgccttgctcctgccgctggccttgctgctccacgccgccaggccggaagtgcagctggttgaatctggcggaggactggttcagcctggcggatctctgagactgtcttgtgccgccagcggcttcagcttcagcgacttttggatgagctgggtccgacaggcccctggcaaaggacttgaatgggtcgccacaatcagccaggccggcagcgagaaggactacgtggactctgtgaagggcagattcaccatcagccgggacaacgccaagaagtccctgtacctccagatgaacagcctgagagccgaggacaccgccgtgtactattgtgcctctggcgtgtacagcttcgactacagaggccagggcaccctggtcacagtctcttctggtaccggcggaggcggatctggcggcggaggtagcggtggcggaggatctgaattcgacatccagatgacacagagccctagcagcctgtctgccagcgtgggagacagagtgaccatcacctgtagagccagccagagcatcagcagctacctgaactggtatcagcagaagcccggcaaggcccctaaactgctgatctatgccgccagctctctccagagcggagtgcctagcagattttctggcagcggctccggcaccgatttcaccctgacaatatccagcctccagcctgaggacttcgccacctactactgccagcagagctacagcacccctctgacctttggacagggcaccaaggtggaaatcaagctcgagatccagaaccctgatcctgccgtgtaccagctgcgggatagcaagagcagcgacaagagcgtgtgtctgttcaccgacttcgacagccagaccaacgtgtcccagagcaaggactccgacgtgtacatcaccgataagtgcgtgctggacatgcggagcatggacttcaagagcaactccgccgtggcctggtccaacaagtccgatttcgcctgcgccaacgccttcaacaacagcattatccccgaggacacattcttcccaagccccgagagcagctgcggctttaccagcgagagctaccagcagggcgtgctgagcgccaccatcctgtacgagatcctgctgggcaaggccaccctgtacgccgtgctggtgtctgccctggtgctgatggctatggtcaagcggaaggacagccggggacgcgccaagagaagcggatctggcgtgaagcagaccctgaatttcgacctgctgaagctggctggcgacgtggaatccaacccaggccctactagtatggactggatttggcgcatccttttccttgtcggcgctgctaccggcgcgcattccttcgaagaggtgcagctggttgaatctggcggaggactggttcagcctggcggatctctgagactgtcttgtgctgccagcggcttcaccttcagctcctacgccatgagctgggtccgacaggctcctggcaaaggactggaatgggtgtccgccatctctggctcaggcggcagcacatattacgccgactctgtgaagggcagattcaccatcagccgggacaacagcaagaacaccctgtacctccagatgaactccctgagagccgaggacaccgccgtgtactattgtgccagactgggctaccccaccaccacactgctgccctttgattattggggccagggcaccctggtcaccgtttcttctacgcgtgaggacctgaagaacgtgttcccacctgaggtggccgtgttcgagcctagcgaggccgagatcagccacacccagaaagccaccctcgtgtgcctggctaccggcttctaccccgaccatgtggaactgtcttggtgggtcaacggcaaagaggtgcacagcggcgtgtgtaccgacccccagccactgaaagaacagcccgccctgaacgacagccggtactgcctgagcagcagactgagagtgtccgccaccttctggcagaacccccggaaccacttcagatgccaggtgcagttctacggcctgagcgagaacgacgagtggacccaggacagagccaagcccgtgacccagatcgtgtctgccgaagcctggggcagagccgattgcgacgtgaagctggtggaaaagagcttcgagacagacaccaacctgaacttccagaacctgagcgtgatcggcttcagaatcctgctgctgaaagtggccggctttaacctgctgatgaccctgcggctgtggtccagc

SEQ ID NO: 39093 - DNA, 2682 bp, synthetic construct
  source 1..2682: mol_type = other DNA
atggccttaccagtgaccgccttgctcctgccgctggccttgctgctccacgccgccaggccggaagtgcagctggttgaatctggcggaggactggttcagcctggcggatctctgagactgtcttgtgccgccagcggcttcagcttcagcgacttttggatgagctgggtccgacaggcccctggcaaaggacttgaatgggtcgccacaatcagccaggccggcagcgagaaggactacgtggactctgtgaagggcagattcaccatcagccgggacaacgccaagaagtccctgtacctccagatgaacagcctgagagccgaggacaccgccgtgtactattgtgcctctggcgtgtacagcttcgactacagaggccagggcaccctggtcacagtctcttctggtaccggcggaggcggatctggcggcggaggtagcggtggcggaggatctgaattcgacatccagatgacacagagccctagcagcctgtctgccagcgtgggagacagagtgaccatcacctgtagagccagccagagcatcagcagctacctgaactggtatcagcagaagcccggcaaggcccctaaactgctgatctatgccgccagctctctccagagcggagtgcctagcagattttctggcagcggctccggcaccgatttcaccctgacaatatccagcctccagcctgaggacttcgccacctactactgccagcagagctacagcacccctctgacctttggacagggcaccaaggtggaaatcaagctcgaggacctgaagaacgtgttcccacctgaggtggccgtgttcgagcctagcgaggccgagatcagccacacccagaaagccaccctcgtgtgcctggctaccggcttctaccccgaccatgtggaactgtcttggtgggtcaacggcaaagaggtgcacagcggcgtgtgtaccgacccccagccactgaaagaacagcccgccctgaacgacagccggtactgcctgagcagcagactgagagtgtccgccaccttctggcagaacccccggaaccacttcagatgccaggtgcagttctacggcctgagcgagaacgacgagtggacccaggacagagccaagcccgtgacccagatcgtgtctgccgaagcctggggcagagccgattgcgacgtgaagctggtggaaaagagcttcgagacagacaccaacctgaacttccagaacctgagcgtgatcggcttcagaatcctgctgctgaaagtggccggctttaacctgctgatgaccctgcggctgtggtccagcagggccaagcgatctggatctggagcaacaaacttctcactactcaaacaagcaggtgacgtggaggagaatcccgggcctactagtatggactggatttggcgcatccttttccttgtcggcgctgctaccggcgcgcattccgggccccagctccagctgcaagagtctggacctggcctggtcaagcctagcgagacactgagcctgacctgtaccgtgtccggcgatagcatcagcagcggcgattactactggggctggatcagacagcctcctggcaaaggactggaatggatcggccacatctactacagcggcgtgacctactacaaccccagcctgaagtccagagtgaccatcagcgtggacaccagccggaaccagttctccctgaagctgtctagcgtgacagccgccgataccgccgtgtactactgcaccagagaggacagcagcaactggcggagtagaggccagggaacactggtcacagttagctctggatccggcggaggcggaagtggaggcggaggatctggcggcggaggctctttcgaagaggtgcagctggttgaatctggcggaggactggttcagcctggcggatctctgagactgtcttgtgctgccagcggcttcaccttcagctcctacgccatgagctgggtccgacaggctcctggcaaaggactggaatgggtgtccgccatctctggctcaggcggcagcacatattacgccgactctgtgaagggcagattcaccatcagccgggacaacagcaagaacaccctgtacctccagatgaactccctgagagccgaggacaccgccgtgtactattgtgccagactgggctaccccaccaccacactgctgccctttgattattggggccagggcaccctggtcaccgtttcttctacgcgtatccagaaccctgatcctgccgtgtaccagctgcgggatagcaagagcagcgacaagagcgtgtgtctgttcaccgacttcgacagccagaccaacgtgtcccagagcaaggactccgacgtgtacatcaccgataagtgcgtgctggacatgcggagcatggacttcaagagcaactccgccgtggcctggtccaacaagtccgatttcgcctgcgccaacgccttcaacaacagcattatccccgaggacacattcttcccaagccccgagagcagctgcggctttaccagcgagagctaccagcagggcgtgctgagcgccaccatcctgtacgagatcctgctgggcaaggccaccctgtacgccgtgctggtgtctgccctggtgctgatggctatggtcaagcggaaggacagccgggga

SEQ ID NO: 39094 - DNA, 2694 bp, synthetic construct
  source 1..2694: mol_type = other DNA
atggccttaccagtgaccgccttgctcctgccgctggccttgctgctccacgccgccaggccggaagtgcagctggttgaatctggcggaggactggttcagcctggcggatctctgagactgtcttgtgccgccagcggcttcagcttcagcgacttttggatgagctgggtccgacaggcccctggcaaaggacttgaatgggtcgccacaatcagccaggccggcagcgagaaggactacgtggactctgtgaagggcagattcaccatcagccgggacaacgccaagaagtccctgtacctccagatgaacagcctgagagccgaggacaccgccgtgtactattgtgcctctggcgtgtacagcttcgactacagaggccagggcaccctggtcacagtctcttctggtaccggcggaggcggatctggcggcggaggtagcggtggcggaggatctgaattcgacatccagatgacacagagccctagcagcctgtctgccagcgtgggagacagagtgaccatcacctgtagagccagccagagcatcagcagctacctgaactggtatcagcagaagcccggcaaggcccctaaactgctgatctatgccgccagctctctccagagcggagtgcctagcagattttctggcagcggctccggcaccgatttcaccctgacaatatccagcctccagcctgaggacttcgccacctactactgccagcagagctacagcacccctctgacctttggacagggcaccaaggtggaaatcaagctcgagatccagaaccctgatcctgccgtgtaccagctgcgggatagcaagagcagcgacaagagcgtgtgtctgttcaccgacttcgacagccagaccaacgtgtcccagagcaaggactccgacgtgtacatcaccgataagtgcgtgctggacatgcggagcatggacttcaagagcaactccgccgtggcctggtccaacaagtccgatttcgcctgcgccaacgccttcaacaacagcattatccccgaggacacattcttcccaagccccgagagcagctgcggctttaccagcgagagctaccagcagggcgtgctgagcgccaccatcctgtacgagatcctgctgggcaaggccaccctgtacgccgtgctggtgtctgccctggtgctgatggctatggtcaagcggaaggacagccggggacgcgccaagagaagcggatctggcgtgaagcagaccctgaatttcgacctgctgaagctggctggcgacgtggaatccaacccaggccctactagtatggactggatttggcgcatccttttccttgtcggcgctgctaccggcgcgcattccgggccccagctccagctgcaagagtctggacctggcctggtcaagcctagcgagacactgagcctgacctgtaccgtgtccggcgatagcatcagcagcggcgattactactggggctggatcagacagcctcctggcaaaggactggaatggatcggccacatctactacagcggcgtgacctactacaaccccagcctgaagtccagagtgaccatcagcgtggacaccagccggaaccagttctccctgaagctgtctagcgtgacagccgccgataccgccgtgtactactgcaccagagaggacagcagcaactggcggagtagaggccagggaacactggtcacagttagctctggatccggcggaggcggaagtggaggcggaggatctggcggcggaggctctttcgaagaggtgcagctggttgaatctggcggaggactggttcagcctggcggatctctgagactgtcttgtgctgccagcggcttcaccttcagctcctacgccatgagctgggtccgacaggctcctggcaaaggactggaatgggtgtccgccatctctggctcaggcggcagcacatattacgccgactctgtgaagggcagattcaccatcagccgggacaacagcaagaacaccctgtacctccagatgaactccctgagagccgaggacaccgccgtgtactattgtgccagactgggctaccccaccaccacactgctgccctttgattattggggccagggcaccctggtcaccgtttcttctacgcgtgaggacctgaagaacgtgttcccacctgaggtggccgtgttcgagcctagcgaggccgagatcagccacacccagaaagccaccctcgtgtgcctggctaccggcttctaccccgaccatgtggaactgtcttggtgggtcaacggcaaagaggtgcacagcggcgtgtgtaccgacccccagccactgaaagaacagcccgccctgaacgacagccggtactgcctgagcagcagactgagagtgtccgccaccttctggcagaacccccggaaccacttcagatgccaggtgcagttctacggcctgagcgagaacgacgagtggacccaggacagagccaagcccgtgacccagatcgtgtctgccgaagcctggggcagagccgattgcgacgtgaagctggtggaaaagagcttcgagacagacaccaacctgaacttccagaacctgagcgtgatcggcttcagaatcctgctgctgaaagtggccggctttaacctgctgatgaccctgcggctgtggtccagc

SEQ ID NO: 39095 - DNA, 2076 bp, synthetic construct
  source 1..2076: mol_type = other DNA
atggccttaccagtgaccgccttgctcctgccgctggccttgctgctccacgccgccaggccggacatccagatgacacagagccctagcagcctgtctgccagcgtgggagacagagtgaccatcacctgtagagccagccagagcatcagcagctacctgaactggtatcagcagaagcccggcaaggcccctaaactgctgatctatgccgccagctctctccagagcggagtgcctagcagattttctggcagcggctccggcaccgatttcaccctgacaatatccagcctccagcctgaggacttcgccacctactactgccagcagagctacagcacccctctgacctttggacagggcaccaaggtggaaatcaagctcgaggacctgaagaacgtgttcccacctgaggtggccgtgttcgagcctagcgaggccgagatcagccacacccagaaagccaccctcgtgtgcctggctaccggcttctaccccgaccatgtggaactgtcttggtgggtcaacggcaaagaggtgcacagcggcgtgtgtaccgacccccagccactgaaagaacagcccgccctgaacgacagccggtactgcctgagcagcagactgagagtgtccgccaccttctggcagaacccccggaaccacttcagatgccaggtgcagttctacggcctgagcgagaacgacgagtggacccaggacagagccaagcccgtgacccagatcgtgtctgccgaagcctggggcagagccgattgcgacgtgaagctggtggaaaagagcttcgagacagacaccaacctgaacttccagaacctgagcgtgatcggcttcagaatcctgctgctgaaagtggccggctttaacctgctgatgaccctgcggctgtggtccagcagggccaagcgatctggatctggagcaacaaacttctcactactcaaacaagcaggtgacgtggaggagaatcccgggcctactagtatggactggatttggcgcatccttttccttgtcggcgctgctaccggcgcccattccgggcccatggaccccgacctggaaatcagagccgccttcctgcggcagagaaacacagccctgagaacagaggtggccgagctggaacaagaggtgcagcggctggaaaacgaggtgtcccagtacgagacaagatacggccctctcggaggcggaaaaggatccggcggcggaggatctggcggaggcggatctgggggcggaggctctttcgaagaggtgcagctggttgaatctggcggaggactggttcagcctggcggatctctgagactgtcttgtgctgccagcggcttcaccttcagctcctacgccatgagctgggtccgacaggctcctggcaaaggactggaatgggtgtccgccatctctggctcaggcggcagcacatattacgccgactctgtgaagggcagattcaccatcagccgggacaacagcaagaacaccctgtacctccagatgaactccctgagagccgaggacaccgccgtgtactattgtgccagactgggctaccccaccaccacactgctgccctttgattattggggccagggcaccctggtcaccgtttcttctacgcgtatccagaaccctgatcctgccgtgtaccagctgcgggatagcaagagcagcgacaagagcgtgtgtctgttcaccgacttcgacagccagaccaacgtgtcccagagcaaggactccgacgtgtacatcaccgataagtgcgtgctggacatgcggagcatggacttcaagagcaactccgccgtggcctggtccaacaagtccgatttcgcctgcgccaacgccttcaacaacagcattatccccgaggacacattcttcccaagccccgagagcagctgcggctttaccagcgagagctaccagcagggcgtgctgagcgccaccatcctgtacgagatcctgctgggcaaggccaccctgtacgccgtgctggtgtctgccctggtgctgatggctatggtcaagcggaaggacagccgggga

SEQ ID NO: 39096 - DNA, 2088 bp, synthetic construct
  source 1..2088: mol_type = other DNA
atggccttaccagtgaccgccttgctcctgccgctggccttgctgctccacgccgccaggccggacatccagatgacacagagccctagcagcctgtctgccagcgtgggagacagagtgaccatcacctgtagagccagccagagcatcagcagctacctgaactggtatcagcagaagcccggcaaggcccctaaactgctgatctatgccgccagctctctccagagcggagtgcctagcagattttctggcagcggctccggcaccgatttcaccctgacaatatccagcctccagcctgaggacttcgccacctactactgccagcagagctacagcacccctctgacctttggacagggcaccaaggtggaaatcaagctcgagatccagaaccctgatcctgccgtgtaccagctgcgggatagcaagagcagcgacaagagcgtgtgtctgttcaccgacttcgacagccagaccaacgtgtcccagagcaaggactccgacgtgtacatcaccgataagtgcgtgctggacatgcggagcatggacttcaagagcaactccgccgtggcctggtccaacaagtccgatttcgcctgcgccaacgccttcaacaacagcattatccccgaggacacattcttcccaagccccgagagcagctgcggctttaccagcgagagctaccagcagggcgtgctgagcgccaccatcctgtacgagatcctgctgggcaaggccaccctgtacgccgtgctggtgtctgccctggtgctgatggctatggtcaagcggaaggacagccggggacgcgccaagagaagcggatctggcgtgaagcagaccctgaatttcgacctgctgaagctggctggcgacgtggaatccaacccaggccctactagtatggactggatttggcgcatccttttccttgtcggcgctgctaccggcgcccattccgggcccatggaccccgacctggaaatcagagccgccttcctgcggcagagaaacacagccctgagaacagaggtggccgagctggaacaagaggtgcagcggctggaaaacgaggtgtcccagtacgagacaagatacggccctctcggaggcggaaaaggatccggcggcggaggatctggcggaggcggatctgggggcggaggctctttcgaagaggtgcagctggttgaatctggcggaggactggttcagcctggcggatctctgagactgtcttgtgctgccagcggcttcaccttcagctcctacgccatgagctgggtccgacaggctcctggcaaaggactggaatgggtgtccgccatctctggctcaggcggcagcacatattacgccgactctgtgaagggcagattcaccatcagccgggacaacagcaagaacaccctgtacctccagatgaactccctgagagccgaggacaccgccgtgtactattgtgccagactgggctaccccaccaccacactgctgccctttgattattggggccagggcaccctggtcaccgtttcttctacgcgtgaggacctgaagaacgtgttcccacctgaggtggccgtgttcgagcctagcgaggccgagatcagccacacccagaaagccaccctcgtgtgcctggctaccggcttctaccccgaccatgtggaactgtcttggtgggtcaacggcaaagaggtgcacagcggcgtgtgtaccgacccccagccactgaaagaacagcccgccctgaacgacagccggtactgcctgagcagcagactgagagtgtccgccaccttctggcagaacccccggaaccacttcagatgccaggtgcagttctacggcctgagcgagaacgacgagtggacccaggacagagccaagcccgtgacccagatcgtgtctgccgaagcctggggcagagccgattgcgacgtgaagctggtggaaaagagcttcgagacagacaccaacctgaacttccagaacctgagcgtgatcggcttcagaatcctgctgctgaaagtggccggctttaacctgctgatgaccctgcggctgtggtccagc

SEQ ID NO: 39097 - DNA, 2007 bp, synthetic construct
  source 1..2007: mol_type = other DNA
atggccttaccagtgaccgccttgctcctgccgctggccttgctgctccacgccgccaggccggacatccagatgacacagagccctagcagcctgtctgccagcgtgggagacagagtgaccatcacctgtagagccagccagagcatcagcagctacctgaactggtatcagcagaagcccggcaaggcccctaaactgctgatctatgccgccagctctctccagagcggagtgcctagcagattttctggcagcggctccggcaccgatttcaccctgacaatatccagcctccagcctgaggacttcgccacctactactgccagcagagctacagcacccctctgacctttggacagggcaccaaggtggaaatcaagctcgaggacctgaagaacgtgttcccacctgaggtggccgtgttcgagcctagcgaggccgagatcagccacacccagaaagccaccctcgtgtgcctggctaccggcttctaccccgaccatgtggaactgtcttggtgggtcaacggcaaagaggtgcacagcggcgtgtgtaccgacccccagccactgaaagaacagcccgccctgaacgacagccggtactgcctgagcagcagactgagagtgtccgccaccttctggcagaacccccggaaccacttcagatgccaggtgcagttctacggcctgagcgagaacgacgagtggacccaggacagagccaagcccgtgacccagatcgtgtctgccgaagcctggggcagagccgattgcgacgtgaagctggtggaaaagagcttcgagacagacaccaacctgaacttccagaacctgagcgtgatcggcttcagaatcctgctgctgaaagtggccggctttaacctgctgatgaccctgcggctgtggtccagcagggccaagcgatctggatctggagcaacaaacttctcactactcaaacaagcaggtgacgtggaggagaatcccgggcctactagtatggactggatttggcgcatccttttccttgtcggcgctgctaccggcgcccattccgggcccgaagttgctgccctcgagaaggaggtagcagctttggaaaaagaagtcgcagcccttgagaaagaagttgcggctctggagaagggatccggcggcggaggatctggcggaggcggatctgggggcggaggctctttcgaagaggtgcagctggttgaatctggcggaggactggttcagcctggcggatctctgagactgtcttgtgctgccagcggcttcaccttcagctcctacgccatgagctgggtccgacaggctcctggcaaaggactggaatgggtgtccgccatctctggctcaggcggcagcacatattacgccgactctgtgaagggcagattcaccatcagccgggacaacagcaagaacaccctgtacctccagatgaactccctgagagccgaggacaccgccgtgtactattgtgccagactgggctaccccaccaccacactgctgccctttgattattggggccagggcaccctggtcaccgtttcttctacgcgtatccagaaccctgatcctgccgtgtaccagctgcgggatagcaagagcagcgacaagagcgtgtgtctgttcaccgacttcgacagccagaccaacgtgtcccagagcaaggactccgacgtgtacatcaccgataagtgcgtgctggacatgcggagcatggacttcaagagcaactccgccgtggcctggtccaacaagtccgatttcgcctgcgccaacgccttcaacaacagcattatccccgaggacacattcttcccaagccccgagagcagctgcggctttaccagcgagagctaccagcagggcgtgctgagcgccaccatcctgtacgagatcctgctgggcaaggccaccctgtacgccgtgctggtgtctgccctggtgctgatggctatggtcaagcggaaggacagccgggga

SEQ ID NO: 39098 - DNA, 2019 bp, synthetic construct
  source 1..2019: mol_type = other DNA
atggccttaccagtgaccgccttgctcctgccgctggccttgctgctccacgccgccaggccggacatccagatgacacagagccctagcagcctgtctgccagcgtgggagacagagtgaccatcacctgtagagccagccagagcatcagcagctacctgaactggtatcagcagaagcccggcaaggcccctaaactgctgatctatgccgccagctctctccagagcggagtgcctagcagattttctggcagcggctccggcaccgatttcaccctgacaatatccagcctccagcctgaggacttcgccacctactactgccagcagagctacagcacccctctgacctttggacagggcaccaaggtggaaatcaagctcgagatccagaaccctgatcctgccgtgtaccagctgcgggatagcaagagcagcgacaagagcgtgtgtctgttcaccgacttcgacagccagaccaacgtgtcccagagcaaggactccgacgtgtacatcaccgataagtgcgtgctggacatgcggagcatggacttcaagagcaactccgccgtggcctggtccaacaagtccgatttcgcctgcgccaacgccttcaacaacagcattatccccgaggacacattcttcccaagccccgagagcagctgcggctttaccagcgagagctaccagcagggcgtgctgagcgccaccatcctgtacgagatcctgctgggcaaggccaccctgtacgccgtgctggtgtctgccctggtgctgatggctatggtcaagcggaaggacagccggggacgcgccaagagaagcggatctggcgtgaagcagaccctgaatttcgacctgctgaagctggctggcgacgtggaatccaacccaggccctactagtatggactggatttggcgcatccttttccttgtcggcgctgctaccggcgcccattccgggcccgaagttgctgccctcgagaaggaggtagcagctttggaaaaagaagtcgcagcccttgagaaagaagttgcggctctggagaagggatccggcggcggaggatctggcggaggcggatctgggggcggaggctctttcgaagaggtgcagctggttgaatctggcggaggactggttcagcctggcggatctctgagactgtcttgtgctgccagcggcttcaccttcagctcctacgccatgagctgggtccgacaggctcctggcaaaggactggaatgggtgtccgccatctctggctcaggcggcagcacatattacgccgactctgtgaagggcagattcaccatcagccgggacaacagcaagaacaccctgtacctccagatgaactccctgagagccgaggacaccgccgtgtactattgtgccagactgggctaccccaccaccacactgctgccctttgattattggggccagggcaccctggtcaccgtttcttctacgcgtgaggacctgaagaacgtgttcccacctgaggtggccgtgttcgagcctagcgaggccgagatcagccacacccagaaagccaccctcgtgtgcctggctaccggcttctaccccgaccatgtggaactgtcttggtgggtcaacggcaaagaggtgcacagcggcgtgtgtaccgacccccagccactgaaagaacagcccgccctgaacgacagccggtactgcctgagcagcagactgagagtgtccgccaccttctggcagaacccccggaaccacttcagatgccaggtgcagttctacggcctgagcgagaacgacgagtggacccaggacagagccaagcccgtgacccagatcgtgtctgccgaagcctggggcagagccgattgcgacgtgaagctggtggaaaagagcttcgagacagacaccaacctgaacttccagaacctgagcgtgatcggcttcagaatcctgctgctgaaagtggccggctttaacctgctgatgaccctgcggctgtggtccagc

SEQ ID NO: 39099 - DNA, 2277 bp, synthetic construct
  source 1..2277: mol_type = other DNA
atggccttaccagtgaccgccttgctcctgccgctggccttgctgctccacgccgccaggccggacatccagatgacacagagccctagcagcctgtctgccagcgtgggagacagagtgaccatcacctgtagagccagccagagcatcagcagctacctgaactggtatcagcagaagcccggcaaggcccctaaactgctgatctatgccgccagctctctccagagcggagtgcctagcagattttctggcagcggctccggcaccgatttcaccctgacaatatccagcctccagcctgaggacttcgccacctactactgccagcagagctacagcacccctctgacctttggacagggcaccaaggtggaaatcaagctcgaggacctgaagaacgtgttcccacctgaggtggccgtgttcgagcctagcgaggccgagatcagccacacccagaaagccaccctcgtgtgcctggctaccggcttctaccccgaccatgtggaactgtcttggtgggtcaacggcaaagaggtgcacagcggcgtgtgtaccgacccccagccactgaaagaacagcccgccctgaacgacagccggtactgcctgagcagcagactgagagtgtccgccaccttctggcagaacccccggaaccacttcagatgccaggtgcagttctacggcctgagcgagaacgacgagtggacccaggacagagccaagcccgtgacccagatcgtgtctgccgaagcctggggcagagccgattgcgacgtgaagctggtggaaaagagcttcgagacagacaccaacctgaacttccagaacctgagcgtgatcggcttcagaatcctgctgctgaaagtggccggctttaacctgctgatgaccctgcggctgtggtccagcagggccaagcgatctggatctggagcaacaaacttctcactactcaaacaagcaggtgacgtggaggagaatcccgggcctactagtatggactggatttggcgcatccttttccttgtcggcgctgctaccggcgcccattccgggccccaggttcagctgcaagagtctggcggaggacttgctcaagctggcggaagcctgagactgtcttgtgccgcctctggcagaaccttcagcatgggctggtttagacaggcccctggcaaagagagagagttcgtcgccgccatcacatacagcggcggcagcccttactacgcctcttctgtcagaggccggttcaccatcagccgggacaacgccaagaacaccgtgtacctccagatgaacagcctgaagccagaggacaccgccgtgtactactgtgccgccaatccaacctacggcagcgactggaatgccgagaattggggccagggcacccaagtgacagtgtctagtggatccggcggcggaggatctggcggaggcggatctgggggcggaggctctttcgaagaggtgcagctggttgaatctggcggaggactggttcagcctggcggatctctgagactgtcttgtgctgccagcggcttcaccttcagctcctacgccatgagctgggtccgacaggctcctggcaaaggactggaatgggtgtccgccatctctggctcaggcggcagcacatattacgccgactctgtgaagggcagattcaccatcagccgggacaacagcaagaacaccctgtacctccagatgaactccctgagagccgaggacaccgccgtgtactattgtgccagactgggctaccccaccaccacactgctgccctttgattattggggccagggcaccctggtcaccgtttcttctacgcgtatccagaaccctgatcctgccgtgtaccagctgcgggatagcaagagcagcgacaagagcgtgtgtctgttcaccgacttcgacagccagaccaacgtgtcccagagcaaggactccgacgtgtacatcaccgataagtgcgtgctggacatgcggagcatggacttcaagagcaactccgccgtggcctggtccaacaagtccgatttcgcctgcgccaacgccttcaacaacagcattatccccgaggacacattcttcccaagccccgagagcagctgcggctttaccagcgagagctaccagcagggcgtgctgagcgccaccatcctgtacgagatcctgctgggcaaggccaccctgtacgccgtgctggtgtctgccctggtgctgatggctatggtcaagcggaaggacagccgggga

SEQ ID NO: 39100 - DNA, 2289 bp, synthetic construct
  source 1..2289: mol_type = other DNA
atggccttaccagtgaccgccttgctcctgccgctggccttgctgctccacgccgccaggccggacatccagatgacacagagccctagcagcctgtctgccagcgtgggagacagagtgaccatcacctgtagagccagccagagcatcagcagctacctgaactggtatcagcagaagcccggcaaggcccctaaactgctgatctatgccgccagctctctccagagcggagtgcctagcagattttctggcagcggctccggcaccgatttcaccctgacaatatccagcctccagcctgaggacttcgccacctactactgccagcagagctacagcacccctctgacctttggacagggcaccaaggtggaaatcaagctcgagatccagaaccctgatcctgccgtgtaccagctgcgggatagcaagagcagcgacaagagcgtgtgtctgttcaccgacttcgacagccagaccaacgtgtcccagagcaaggactccgacgtgtacatcaccgataagtgcgtgctggacatgcggagcatggacttcaagagcaactccgccgtggcctggtccaacaagtccgatttcgcctgcgccaacgccttcaacaacagcattatccccgaggacacattcttcccaagccccgagagcagctgcggctttaccagcgagagctaccagcagggcgtgctgagcgccaccatcctgtacgagatcctgctgggcaaggccaccctgtacgccgtgctggtgtctgccctggtgctgatggctatggtcaagcggaaggacagccggggacgcgccaagagaagcggatctggcgtgaagcagaccctgaatttcgacctgctgaagctggctggcgacgtggaatccaacccaggccctactagtatggactggatttggcgcatccttttccttgtcggcgctgctaccggcgcccattccgggccccaggttcagctgcaagagtctggcggaggacttgctcaagctggcggaagcctgagactgtcttgtgccgcctctggcagaaccttcagcatgggctggtttagacaggcccctggcaaagagagagagttcgtcgccgccatcacatacagcggcggcagcccttactacgcctcttctgtcagaggccggttcaccatcagccgggacaacgccaagaacaccgtgtacctccagatgaacagcctgaagccagaggacaccgccgtgtactactgtgccgccaatccaacctacggcagcgactggaatgccgagaattggggccagggcacccaagtgacagtgtctagtggatccggcggcggaggatctggcggaggcggatctgggggcggaggctctttcgaagaggtgcagctggttgaatctggcggaggactggttcagcctggcggatctctgagactgtcttgtgctgccagcggcttcaccttcagctcctacgccatgagctgggtccgacaggctcctggcaaaggactggaatgggtgtccgccatctctggctcaggcggcagcacatattacgccgactctgtgaagggcagattcaccatcagccgggacaacagcaagaacaccctgtacctccagatgaactccctgagagccgaggacaccgccgtgtactattgtgccagactgggctaccccaccaccacactgctgccctttgattattggggccagggcaccctggtcaccgtttcttctacgcgtgaggacctgaagaacgtgttcccacctgaggtggccgtgttcgagcctagcgaggccgagatcagccacacccagaaagccaccctcgtgtgcctggctaccggcttctaccccgaccatgtggaactgtcttggtgggtcaacggcaaagaggtgcacagcggcgtgtgtaccgacccccagccactgaaagaacagcccgccctgaacgacagccggtactgcctgagcagcagactgagagtgtccgccaccttctggcagaacccccggaaccacttcagatgccaggtgcagttctacggcctgagcgagaacgacgagtggacccaggacagagccaagcccgtgacccagatcgtgtctgccgaagcctggggcagagccgattgcgacgtgaagctggtggaaaagagcttcgagacagacaccaacctgaacttccagaacctgagcgtgatcggcttcagaatcctgctgctgaaagtggccggctttaacctgctgatgaccctgcggctgtggtccagc

SEQ ID NO: 39101 - DNA, 2295 bp, synthetic construct
  source 1..2295: mol_type = other DNA
atggccttaccagtgaccgccttgctcctgccgctggccttgctgctccacgccgccaggccggaagtgcaactggtggaatctggaggctctctggtgcagccagggggaagcctgagactgtcttgtgccgcttccggcttcaccttcgacgactacgccatgagctgggtgcgccaggtgccaggcaaaggcctggaatgggtgtccagcatcaactggagcggcacccacaccgattacgccgactccgtgaaaggcagattcacaatcagcagaaacaacgccaacaataccctgtacctgcagatgaactccctgaagtctgaggatacagcagtgtattattgcgccaagaactggcgggacgccggcaccacttggtttgagaaaagcggctctgccggacagggaacccaagtgacagtgtcctccggtaccggcggaggcggatctggcggcggaggtagcggtggcggaggatctgaattcgacatccagatgacacagagccctagcagcctgtctgccagcgtgggagacagagtgaccatcacctgtagagccagccagagcatcagcagctacctgaactggtatcagcagaagcccggcaaggcccctaaactgctgatctatgccgccagctctctccagagcggagtgcctagcagattttctggcagcggctccggcaccgatttcaccctgacaatatccagcctccagcctgaggacttcgccacctactactgccagcagagctacagcacccctctgacctttggacagggcaccaaggtggaaatcaagctcgaggacctgaagaacgtgttcccacctgaggtggccgtgttcgagcctagcgaggccgagatcagccacacccagaaagccaccctcgtgtgcctggctaccggcttctaccccgaccatgtggaactgtcttggtgggtcaacggcaaagaggtgcacagcggcgtgtgtaccgacccccagccactgaaagaacagcccgccctgaacgacagccggtactgcctgagcagcagactgagagtgtccgccaccttctggcagaacccccggaaccacttcagatgccaggtgcagttctacggcctgagcgagaacgacgagtggacccaggacagagccaagcccgtgacccagatcgtgtctgccgaagcctggggcagagccgattgcgacgtgaagctggtggaaaagagcttcgagacagacaccaacctgaacttccagaacctgagcgtgatcggcttcagaatcctgctgctgaaagtggccggctttaacctgctgatgaccctgcggctgtggtccagcagggccaagcgatctggatctggagcaacaaacttctcactactcaaacaagcaggtgacgtggaggagaatcccgggcctactagtatggactggatttggcgcatccttttccttgtcggcgctgctaccggcgcgcattccttcgaagaggtgcagctggttgaatctggcggaggactggttcagcctggcggatctctgagactgtcttgtgctgccagcggcttcaccttcagctcctacgccatgagctgggtccgacaggctcctggcaaaggactggaatgggtgtccgccatctctggctcaggcggcagcacatattacgccgactctgtgaagggcagattcaccatcagccgggacaacagcaagaacaccctgtacctccagatgaactccctgagagccgaggacaccgccgtgtactattgtgccagactgggctaccccaccaccacactgctgccctttgattattggggccagggcaccctggtcaccgtttcttctacgcgtatccagaaccctgatcctgccgtgtaccagctgcgggatagcaagagcagcgacaagagcgtgtgtctgttcaccgacttcgacagccagaccaacgtgtcccagagcaaggactccgacgtgtacatcaccgataagtgcgtgctggacatgcggagcatggacttcaagagcaactccgccgtggcctggtccaacaagtccgatttcgcctgcgccaacgccttcaacaacagcattatccccgaggacacattcttcccaagccccgagagcagctgcggctttaccagcgagagctaccagcagggcgtgctgagcgccaccatcctgtacgagatcctgctgggcaaggccaccctgtacgccgtgctggtgtctgccctggtgctgatggctatggtcaagcggaaggacagccgggga

SEQ ID NO: 39102 - DNA, 2307 bp, synthetic construct
  source 1..2307: mol_type = other DNA
atggccttaccagtgaccgccttgctcctgccgctggccttgctgctccacgccgccaggccggaagtgcaactggtggaatctggaggctctctggtgcagccagggggaagcctgagactgtcttgtgccgcttccggcttcaccttcgacgactacgccatgagctgggtgcgccaggtgccaggcaaaggcctggaatgggtgtccagcatcaactggagcggcacccacaccgattacgccgactccgtgaaaggcagattcacaatcagcagaaacaacgccaacaataccctgtacctgcagatgaactccctgaagtctgaggatacagcagtgtattattgcgccaagaactggcgggacgccggcaccacttggtttgagaaaagcggctctgccggacagggaacccaagtgacagtgtcctccggtaccggcggaggcggatctggcggcggaggtagcggtggcggaggatctgaattcgacatccagatgacacagagccctagcagcctgtctgccagcgtgggagacagagtgaccatcacctgtagagccagccagagcatcagcagctacctgaactggtatcagcagaagcccggcaaggcccctaaactgctgatctatgccgccagctctctccagagcggagtgcctagcagattttctggcagcggctccggcaccgatttcaccctgacaatatccagcctccagcctgaggacttcgccacctactactgccagcagagctacagcacccctctgacctttggacagggcaccaaggtggaaatcaagctcgagatccagaaccctgatcctgccgtgtaccagctgcgggatagcaagagcagcgacaagagcgtgtgtctgttcaccgacttcgacagccagaccaacgtgtcccagagcaaggactccgacgtgtacatcaccgataagtgcgtgctggacatgcggagcatggacttcaagagcaactccgccgtggcctggtccaacaagtccgatttcgcctgcgccaacgccttcaacaacagcattatccccgaggacacattcttcccaagccccgagagcagctgcggctttaccagcgagagctaccagcagggcgtgctgagcgccaccatcctgtacgagatcctgctgggcaaggccaccctgtacgccgtgctggtgtctgccctggtgctgatggctatggtcaagcggaaggacagccggggacgcgccaagagaagcggatctggcgtgaagcagaccctgaatttcgacctgctgaagctggctggcgacgtggaatccaacccaggccctactagtatggactggatttggcgcatccttttccttgtcggcgctgctaccggcgcgcattccttcgaagaggtgcagctggttgaatctggcggaggactggttcagcctggcggatctctgagactgtcttgtgctgccagcggcttcaccttcagctcctacgccatgagctgggtccgacaggctcctggcaaaggactggaatgggtgtccgccatctctggctcaggcggcagcacatattacgccgactctgtgaagggcagattcaccatcagccgggacaacagcaagaacaccctgtacctccagatgaactccctgagagccgaggacaccgccgtgtactattgtgccagactgggctaccccaccaccacactgctgccctttgattattggggccagggcaccctggtcaccgtttcttctacgcgtgaggacctgaagaacgtgttcccacctgaggtggccgtgttcgagcctagcgaggccgagatcagccacacccagaaagccaccctcgtgtgcctggctaccggcttctaccccgaccatgtggaactgtcttggtgggtcaacggcaaagaggtgcacagcggcgtgtgtaccgacccccagccactgaaagaacagcccgccctgaacgacagccggtactgcctgagcagcagactgagagtgtccgccaccttctggcagaacccccggaaccacttcagatgccaggtgcagttctacggcctgagcgagaacgacgagtggacccaggacagagccaagcccgtgacccagatcgtgtctgccgaagcctggggcagagccgattgcgacgtgaagctggtggaaaagagcttcgagacagacaccaacctgaacttccagaacctgagcgtgatcggcttcagaatcctgctgctgaaagtggccggctttaacctgctgatgaccctgcggctgtggtccagc

SEQ ID NO: 39103 - DNA, 2289 bp, synthetic construct
  source 1..2289: mol_type = other DNA
atggccttaccagtgaccgccttgctcctgccgctggccttgctgctccacgccgccaggccggaagttcagctgcttgagtctggcggaggactggttcaacctggcggaagcctgagactgtcttgtgccgccagcggcttcatcttcagcagctacgccatgagctgggtccgacaggctcctggaaagggccaagaatgggtttccggcgttagcggcacaggcgtgaacacctactacgccgatagcgtgaagggcagattcaccatcagccgggacaacagcaagaacaccctgtacctccagatgaacagcctgagagccgaggacaccgccgtgtactattgtgcctctggcaaaggctgggacagcggctcttggtacgaggactatagaggccagggcaccctggtcacagtttcttcaggtaccggcggaggcggatctggcggcggaggtagcggtggcggaggatctgaattcgacatccagatgacacagagccctagcagcctgtctgccagcgtgggagacagagtgaccatcacctgtagagccagccagagcatcagcagctacctgaactggtatcagcagaagcccggcaaggcccctaaactgctgatctatgccgccagctctctccagagcggagtgcctagcagattttctggcagcggctccggcaccgatttcaccctgacaatatccagcctccagcctgaggacttcgccacctactactgccagcagagctacagcacccctctgacctttggacagggcaccaaggtggaaatcaagctcgaggacctgaagaacgtgttcccacctgaggtggccgtgttcgagcctagcgaggccgagatcagccacacccagaaagccaccctcgtgtgcctggctaccggcttctaccccgaccatgtggaactgtcttggtgggtcaacggcaaagaggtgcacagcggcgtgtgtaccgacccccagccactgaaagaacagcccgccctgaacgacagccggtactgcctgagcagcagactgagagtgtccgccaccttctggcagaacccccggaaccacttcagatgccaggtgcagttctacggcctgagcgagaacgacgagtggacccaggacagagccaagcccgtgacccagatcgtgtctgccgaagcctggggcagagccgattgcgacgtgaagctggtggaaaagagcttcgagacagacaccaacctgaacttccagaacctgagcgtgatcggcttcagaatcctgctgctgaaagtggccggctttaacctgctgatgaccctgcggctgtggtccagcagggccaagcgatctggatctggagcaacaaacttctcactactcaaacaagcaggtgacgtggaggagaatcccgggcctactagtatggactggatttggcgcatccttttccttgtcggcgctgctaccggcgcgcattccttcgaagaggtgcagctggttgaatctggcggaggactggttcagcctggcggatctctgagactgtcttgtgctgccagcggcttcaccttcagctcctacgccatgagctgggtccgacaggctcctggcaaaggactggaatgggtgtccgccatctctggctcaggcggcagcacatattacgccgactctgtgaagggcagattcaccatcagccgggacaacagcaagaacaccctgtacctccagatgaactccctgagagccgaggacaccgccgtgtactattgtgccagactgggctaccccaccaccacactgctgccctttgattattggggccagggcaccctggtcaccgtttcttctacgcgtatccagaaccctgatcctgccgtgtaccagctgcgggatagcaagagcagcgacaagagcgtgtgtctgttcaccgacttcgacagccagaccaacgtgtcccagagcaaggactccgacgtgtacatcaccgataagtgcgtgctggacatgcggagcatggacttcaagagcaactccgccgtggcctggtccaacaagtccgatttcgcctgcgccaacgccttcaacaacagcattatccccgaggacacattcttcccaagccccgagagcagctgcggctttaccagcgagagctaccagcagggcgtgctgagcgccaccatcctgtacgagatcctgctgggcaaggccaccctgtacgccgtgctggtgtctgccctggtgctgatggctatggtcaagcggaaggacagccgggga

SEQ ID NO: 39104 - DNA, 2301 bp, synthetic construct
  source 1..2301: mol_type = other DNA
atggccttaccagtgaccgccttgctcctgccgctggccttgctgctccacgccgccaggccggaagttcagctgcttgagtctggcggaggactggttcaacctggcggaagcctgagactgtcttgtgccgccagcggcttcatcttcagcagctacgccatgagctgggtccgacaggctcctggaaagggccaagaatgggtttccggcgttagcggcacaggcgtgaacacctactacgccgatagcgtgaagggcagattcaccatcagccgggacaacagcaagaacaccctgtacctccagatgaacagcctgagagccgaggacaccgccgtgtactattgtgcctctggcaaaggctgggacagcggctcttggtacgaggactatagaggccagggcaccctggtcacagtttcttcaggtaccggcggaggcggatctggcggcggaggtagcggtggcggaggatctgaattcgacatccagatgacacagagccctagcagcctgtctgccagcgtgggagacagagtgaccatcacctgtagagccagccagagcatcagcagctacctgaactggtatcagcagaagcccggcaaggcccctaaactgctgatctatgccgccagctctctccagagcggagtgcctagcagattttctggcagcggctccggcaccgatttcaccctgacaatatccagcctccagcctgaggacttcgccacctactactgccagcagagctacagcacccctctgacctttggacagggcaccaaggtggaaatcaagctcgagatccagaaccctgatcctgccgtgtaccagctgcgggatagcaagagcagcgacaagagcgtgtgtctgttcaccgacttcgacagccagaccaacgtgtcccagagcaaggactccgacgtgtacatcaccgataagtgcgtgctggacatgcggagcatggacttcaagagcaactccgccgtggcctggtccaacaagtccgatttcgcctgcgccaacgccttcaacaacagcattatccccgaggacacattcttcccaagccccgagagcagctgcggctttaccagcgagagctaccagcagggcgtgctgagcgccaccatcctgtacgagatcctgctgggcaaggccaccctgtacgccgtgctggtgtctgccctggtgctgatggctatggtcaagcggaaggacagccggggacgcgccaagagaagcggatctggcgtgaagcagaccctgaatttcgacctgctgaagctggctggcgacgtggaatccaacccaggccctactagtatggactggatttggcgcatccttttccttgtcggcgctgctaccggcgcgcattccttcgaagaggtgcagctggttgaatctggcggaggactggttcagcctggcggatctctgagactgtcttgtgctgccagcggcttcaccttcagctcctacgccatgagctgggtccgacaggctcctggcaaaggactggaatgggtgtccgccatctctggctcaggcggcagcacatattacgccgactctgtgaagggcagattcaccatcagccgggacaacagcaagaacaccctgtacctccagatgaactccctgagagccgaggacaccgccgtgtactattgtgccagactgggctaccccaccaccacactgctgccctttgattattggggccagggcaccctggtcaccgtttcttctacgcgtgaggacctgaagaacgtgttcccacctgaggtggccgtgttcgagcctagcgaggccgagatcagccacacccagaaagccaccctcgtgtgcctggctaccggcttctaccccgaccatgtggaactgtcttggtgggtcaacggcaaagaggtgcacagcggcgtgtgtaccgacccccagccactgaaagaacagcccgccctgaacgacagccggtactgcctgagcagcagactgagagtgtccgccaccttctggcagaacccccggaaccacttcagatgccaggtgcagttctacggcctgagcgagaacgacgagtggacccaggacagagccaagcccgtgacccagatcgtgtctgccgaagcctggggcagagccgattgcgacgtgaagctggtggaaaagagcttcgagacagacaccaacctgaacttccagaacctgagcgtgatcggcttcagaatcctgctgctgaaagtggccggctttaacctgctgatgaccctgcggctgtggtccagc

SEQ ID NO: 39105 - DNA, 2193 bp, synthetic construct
  source 1..2193: mol_type = other DNA
atggccttaccagtgaccgccttgctcctgccgctggccttgctgctccacgccgccaggccgatgctgcccgctcctaagaatctggtggtgtccagaatcaccgaggacagcgccagactgtcttggacagctcctgatgccgccttcgacagcttccccatccggtacatcgagacactgatctggggcgaagccatctggctggatgtgcctggaagcgagagaagctacgacctgaccggactgaagcctggcacagagtatgccgtggtcatcaccggcgtgaaaggcggcagattctctagccctctggtggcctctttcaccaccggtaccggcggaggcggatctggcggcggaggtagcggtggcggaggatctgaattcgacatccagatgacacagagccctagcagcctgtctgccagcgtgggagacagagtgaccatcacctgtagagccagccagagcatcagcagctacctgaactggtatcagcagaagcccggcaaggcccctaaactgctgatctatgccgccagctctctccagagcggagtgcctagcagattttctggcagcggctccggcaccgatttcaccctgacaatatccagcctccagcctgaggacttcgccacctactactgccagcagagctacagcacccctctgacctttggacagggcaccaaggtggaaatcaagctcgaggacctgaagaacgtgttcccacctgaggtggccgtgttcgagcctagcgaggccgagatcagccacacccagaaagccaccctcgtgtgcctggctaccggcttctaccccgaccatgtggaactgtcttggtgggtcaacggcaaagaggtgcacagcggcgtgtgtaccgacccccagccactgaaagaacagcccgccctgaacgacagccggtactgcctgagcagcagactgagagtgtccgccaccttctggcagaacccccggaaccacttcagatgccaggtgcagttctacggcctgagcgagaacgacgagtggacccaggacagagccaagcccgtgacccagatcgtgtctgccgaagcctggggcagagccgattgcgacgtgaagctggtggaaaagagcttcgagacagacaccaacctgaacttccagaacctgagcgtgatcggcttcagaatcctgctgctgaaagtggccggctttaacctgctgatgaccctgcggctgtggtccagcagggccaagcgatctggatctggagcaacaaacttctcactactcaaacaagcaggtgacgtggaggagaatcccgggcctactagtatggactggatttggcgcatccttttccttgtcggcgctgctaccggcgcgcattccttcgaagaggtgcagctggttgaatctggcggaggactggttcagcctggcggatctctgagactgtcttgtgctgccagcggcttcaccttcagctcctacgccatgagctgggtccgacaggctcctggcaaaggactggaatgggtgtccgccatctctggctcaggcggcagcacatattacgccgactctgtgaagggcagattcaccatcagccgggacaacagcaagaacaccctgtacctccagatgaactccctgagagccgaggacaccgccgtgtactattgtgccagactgggctaccccaccaccacactgctgccctttgattattggggccagggcaccctggtcaccgtttcttctacgcgtatccagaaccctgatcctgccgtgtaccagctgcgggatagcaagagcagcgacaagagcgtgtgtctgttcaccgacttcgacagccagaccaacgtgtcccagagcaaggactccgacgtgtacatcaccgataagtgcgtgctggacatgcggagcatggacttcaagagcaactccgccgtggcctggtccaacaagtccgatttcgcctgcgccaacgccttcaacaacagcattatccccgaggacacattcttcccaagccccgagagcagctgcggctttaccagcgagagctaccagcagggcgtgctgagcgccaccatcctgtacgagatcctgctgggcaaggccaccctgtacgccgtgctggtgtctgccctggtgctgatggctatggtcaagcggaaggacagccgggga

SEQ ID NO: 39106 - DNA, 2205 bp, synthetic construct
  source 1..2205: mol_type = other DNA
atggccttaccagtgaccgccttgctcctgccgctggccttgctgctccacgccgccaggccgatgctgcccgctcctaagaatctggtggtgtccagaatcaccgaggacagcgccagactgtcttggacagctcctgatgccgccttcgacagcttccccatccggtacatcgagacactgatctggggcgaagccatctggctggatgtgcctggaagcgagagaagctacgacctgaccggactgaagcctggcacagagtatgccgtggtcatcaccggcgtgaaaggcggcagattctctagccctctggtggcctctttcaccaccggtaccggcggaggcggatctggcggcggaggtagcggtggcggaggatctgaattcgacatccagatgacacagagccctagcagcctgtctgccagcgtgggagacagagtgaccatcacctgtagagccagccagagcatcagcagctacctgaactggtatcagcagaagcccggcaaggcccctaaactgctgatctatgccgccagctctctccagagcggagtgcctagcagattttctggcagcggctccggcaccgatttcaccctgacaatatccagcctccagcctgaggacttcgccacctactactgccagcagagctacagcacccctctgacctttggacagggcaccaaggtggaaatcaagctcgagatccagaaccctgatcctgccgtgtaccagctgcgggatagcaagagcagcgacaagagcgtgtgtctgttcaccgacttcgacagccagaccaacgtgtcccagagcaaggactccgacgtgtacatcaccgataagtgcgtgctggacatgcggagcatggacttcaagagcaactccgccgtggcctggtccaacaagtccgatttcgcctgcgccaacgccttcaacaacagcattatccccgaggacacattcttcccaagccccgagagcagctgcggctttaccagcgagagctaccagcagggcgtgctgagcgccaccatcctgtacgagatcctgctgggcaaggccaccctgtacgccgtgctggtgtctgccctggtgctgatggctatggtcaagcggaaggacagccggggacgcgccaagagaagcggatctggcgtgaagcagaccctgaatttcgacctgctgaagctggctggcgacgtggaatccaacccaggccctactagtatggactggatttggcgcatccttttccttgtcggcgctgctaccggcgcgcattccttcgaagaggtgcagctggttgaatctggcggaggactggttcagcctggcggatctctgagactgtcttgtgctgccagcggcttcaccttcagctcctacgccatgagctgggtccgacaggctcctggcaaaggactggaatgggtgtccgccatctctggctcaggcggcagcacatattacgccgactctgtgaagggcagattcaccatcagccgggacaacagcaagaacaccctgtacctccagatgaactccctgagagccgaggacaccgccgtgtactattgtgccagactgggctaccccaccaccacactgctgccctttgattattggggccagggcaccctggtcaccgtttcttctacgcgtgaggacctgaagaacgtgttcccacctgaggtggccgtgttcgagcctagcgaggccgagatcagccacacccagaaagccaccctcgtgtgcctggctaccggcttctaccccgaccatgtggaactgtcttggtgggtcaacggcaaagaggtgcacagcggcgtgtgtaccgacccccagccactgaaagaacagcccgccctgaacgacagccggtactgcctgagcagcagactgagagtgtccgccaccttctggcagaacccccggaaccacttcagatgccaggtgcagttctacggcctgagcgagaacgacgagtggacccaggacagagccaagcccgtgacccagatcgtgtctgccgaagcctggggcagagccgattgcgacgtgaagctggtggaaaagagcttcgagacagacaccaacctgaacttccagaacctgagcgtgatcggcttcagaatcctgctgctgaaagtggccggctttaacctgctgatgaccctgcggctgtggtccagc

SEQ ID NO: 39107 - DNA, 2280 bp, synthetic construct
  source 1..2280: mol_type = other DNA
atggccttaccagtgaccgccttgctcctgccgctggccttgctgctccacgccgccaggccggaggtgcagctggttgaatctggcggaggactggttcagcctggcggatctctgagactgtcttgtgccgccagcggcttcaacatcaaggatacctgtatcggctgggttcgcagagcccctggcaaagaggaagaactggtcgccaaaatctgcaagtacagcggccacaccagatacgccgacagcgtgaagggcagattcaccatcagcgccgacaccagcaagaacaccgcctacctccagatgaacagcctgagagccgaggacaccgccgtgtactattgtgccgctgtgtccgtcagagatgggcactacaattactggggccagggcaccaccgtgaccgtttcttcaggtaccggcggaggcggatctggcggcggaggtagcggtggcggaggatctgaattcgacatccagatgacacagagccctagcagcctgtctgccagcgtgggagacagagtgaccatcacctgtagagccagccagagcatcagcagctacctgaactggtatcagcagaagcccggcaaggcccctaaactgctgatctatgccgccagctctctccagagcggagtgcctagcagattttctggcagcggctccggcaccgatttcaccctgacaatatccagcctccagcctgaggacttcgccacctactactgccagcagagctacagcacccctctgacctttggacagggcaccaaggtggaaatcaagctcgaggacctgaagaacgtgttcccacctgaggtggccgtgttcgagcctagcgaggccgagatcagccacacccagaaagccaccctcgtgtgcctggctaccggcttctaccccgaccatgtggaactgtcttggtgggtcaacggcaaagaggtgcacagcggcgtgtgtaccgacccccagccactgaaagaacagcccgccctgaacgacagccggtactgcctgagcagcagactgagagtgtccgccaccttctggcagaacccccggaaccacttcagatgccaggtgcagttctacggcctgagcgagaacgacgagtggacccaggacagagccaagcccgtgacccagatcgtgtctgccgaagcctggggcagagccgattgcgacgtgaagctggtggaaaagagcttcgagacagacaccaacctgaacttccagaacctgagcgtgatcggcttcagaatcctgctgctgaaagtggccggctttaacctgctgatgaccctgcggctgtggtccagcagggccaagcgatctggatctggagcaacaaacttctcactactcaaacaagcaggtgacgtggaggagaatcccgggcctactagtatggactggatttggcgcatccttttccttgtcggcgctgctaccggcgcgcattccttcgaagaggtgcagctggttgaatctggcggaggactggttcagcctggcggatctctgagactgtcttgtgctgccagcggcttcaccttcagctcctacgccatgagctgggtccgacaggctcctggcaaaggactggaatgggtgtccgccatctctggctcaggcggcagcacatattacgccgactctgtgaagggcagattcaccatcagccgggacaacagcaagaacaccctgtacctccagatgaactccctgagagccgaggacaccgccgtgtactattgtgccagactgggctaccccaccaccacactgctgccctttgattattggggccagggcaccctggtcaccgtttcttctacgcgtatccagaaccctgatcctgccgtgtaccagctgcgggatagcaagagcagcgacaagagcgtgtgtctgttcaccgacttcgacagccagaccaacgtgtcccagagcaaggactccgacgtgtacatcaccgataagtgcgtgctggacatgcggagcatggacttcaagagcaactccgccgtggcctggtccaacaagtccgatttcgcctgcgccaacgccttcaacaacagcattatccccgaggacacattcttcccaagccccgagagcagctgcggctttaccagcgagagctaccagcagggcgtgctgagcgccaccatcctgtacgagatcctgctgggcaaggccaccctgtacgccgtgctggtgtctgccctggtgctgatggctatggtcaagcggaaggacagccgggga

SEQ ID NO: 39108 - DNA, 2292 bp, synthetic construct
  source 1..2292: mol_type = other DNA
atggccttaccagtgaccgccttgctcctgccgctggccttgctgctccacgccgccaggccggaggtgcagctggttgaatctggcggaggactggttcagcctggcggatctctgagactgtcttgtgccgccagcggcttcaacatcaaggatacctgtatcggctgggttcgcagagcccctggcaaagaggaagaactggtcgccaaaatctgcaagtacagcggccacaccagatacgccgacagcgtgaagggcagattcaccatcagcgccgacaccagcaagaacaccgcctacctccagatgaacagcctgagagccgaggacaccgccgtgtactattgtgccgctgtgtccgtcagagatgggcactacaattactggggccagggcaccaccgtgaccgtttcttcaggtaccggcggaggcggatctggcggcggaggtagcggtggcggaggatctgaattcgacatccagatgacacagagccctagcagcctgtctgccagcgtgggagacagagtgaccatcacctgtagagccagccagagcatcagcagctacctgaactggtatcagcagaagcccggcaaggcccctaaactgctgatctatgccgccagctctctccagagcggagtgcctagcagattttctggcagcggctccggcaccgatttcaccctgacaatatccagcctccagcctgaggacttcgccacctactactgccagcagagctacagcacccctctgacctttggacagggcaccaaggtggaaatcaagctcgagatccagaaccctgatcctgccgtgtaccagctgcgggatagcaagagcagcgacaagagcgtgtgtctgttcaccgacttcgacagccagaccaacgtgtcccagagcaaggactccgacgtgtacatcaccgataagtgcgtgctggacatgcggagcatggacttcaagagcaactccgccgtggcctggtccaacaagtccgatttcgcctgcgccaacgccttcaacaacagcattatccccgaggacacattcttcccaagccccgagagcagctgcggctttaccagcgagagctaccagcagggcgtgctgagcgccaccatcctgtacgagatcctgctgggcaaggccaccctgtacgccgtgctggtgtctgccctggtgctgatggctatggtcaagcggaaggacagccggggacgcgccaagagaagcggatctggcgtgaagcagaccctgaatttcgacctgctgaagctggctggcgacgtggaatccaacccaggccctactagtatggactggatttggcgcatccttttccttgtcggcgctgctaccggcgcgcattccttcgaagaggtgcagctggttgaatctggcggaggactggttcagcctggcggatctctgagactgtcttgtgctgccagcggcttcaccttcagctcctacgccatgagctgggtccgacaggctcctggcaaaggactggaatgggtgtccgccatctctggctcaggcggcagcacatattacgccgactctgtgaagggcagattcaccatcagccgggacaacagcaagaacaccctgtacctccagatgaactccctgagagccgaggacaccgccgtgtactattgtgccagactgggctaccccaccaccacactgctgccctttgattattggggccagggcaccctggtcaccgtttcttctacgcgtgaggacctgaagaacgtgttcccacctgaggtggccgtgttcgagcctagcgaggccgagatcagccacacccagaaagccaccctcgtgtgcctggctaccggcttctaccccgaccatgtggaactgtcttggtgggtcaacggcaaagaggtgcacagcggcgtgtgtaccgacccccagccactgaaagaacagcccgccctgaacgacagccggtactgcctgagcagcagactgagagtgtccgccaccttctggcagaacccccggaaccacttcagatgccaggtgcagttctacggcctgagcgagaacgacgagtggacccaggacagagccaagcccgtgacccagatcgtgtctgccgaagcctggggcagagccgattgcgacgtgaagctggtggaaaagagcttcgagacagacaccaacctgaacttccagaacctgagcgtgatcggcttcagaatcctgctgctgaaagtggccggctttaacctgctgatgaccctgcggctgtggtccagc

SEQ ID NO: 39109 - DNA, 3396 bp, synthetic construct
  source 1..3396: mol_type = other DNA
atggccttaccagtgaccgccttgctcctgccgctggccttgctgctccacgccgccaggccggaagtgcagctggttgaatctggcggaggactggttcaggctggcggatctctgagactgtcttgtgccgccagcggcagaacctttagcatgggctggtttagacaggcccctggcaaagagagagagttcgtcgccgccatcacatactctggcggcagcccttactacgccgactctgtgaagggcagattcaccatcagccgggacaacgccaagaacaccgtgtacctccagatgaacagcctgaagcctgaggacaccgccgtgtactactgcgccgccaatccaacatacggcagcgactggaacgccgagaattggggccagggaacccaagtgacagtgtctagcggtaccggcggaggcggatctggcggcggaggtagcggtggcggaggatctgaattcgacatccagatgacacagagccctagcagcctgtctgccagcgtgggagacagagtgaccatcacctgtagagccagccagagcatcagcagctacctgaactggtatcagcagaagcccggcaaggcccctaaactgctgatctatgccgccagctctctccagagcggagtgcctagcagattttctggcagcggctccggcaccgatttcaccctgacaatatccagcctccagcctgaggacttcgccacctactactgccagcagagctacagcacccctctgacctttggacagggcaccaaggtggaaatcaagctcgaggacctgaagaacgtgttcccacctgaggtggccgtgttcgagcctagcgaggccgagatcagccacacccagaaagccaccctcgtgtgcctggctaccggcttctaccccgaccatgtggaactgtcttggtgggtcaacggcaaagaggtgcacagcggcgtgtgtaccgacccccagccactgaaagaacagcccgccctgaacgacagccggtactgcctgagcagcagactgagagtgtccgccaccttctggcagaacccccggaaccacttcagatgccaggtgcagttctacggcctgagcgagaacgacgagtggacccaggacagagccaagcccgtgacccagatcgtgtctgccgaagcctggggcagagccgattgcgacgtgaagctggtggaaaagagcttcgagacagacaccaacctgaacttccagaacctgagcgtgatcggcttcagaatcctgctgctgaaagtggccggctttaacctgctgatgaccctgcggctgtggtccagcagggccaagcgatctggatctggagcaacaaacttctcactactcaaacaagcaggtgacgtggaggagaatcccgggcctactagtgccaccatggactggatttggcgcatccttttccttgtcggcgctgctaccggcgcccattccgggcccgaagtgcaactggttgaatccggtggcggcctggtgcaagcaggcggatctctcagacttagctgtgccgcctccggcagaaccttcacaatgggatggtttaggcaggctccagggaaagagagagagttcgtcgccgccatctctctgtctcccacactggcctactacgccgactctgtgaaaggccggttcaccatctccagagataatgccaagaacaccgtggtgctgcaaatgaactctctgaaacccgaggatacagccctgtactattgtgccgctgaccggaagtccgtgatgagcatcagacccgattactggggacagggcacacaagtcacagtgtcctctggatccggcggcggaggatctggcggaggcggatctgggggcggaggctctttcgaagaggtgcagctggttgaatctggcggaggactggttcagcctggcggatctctgagactgtcttgtgctgccagcggcttcaccttcagctcctacgccatgagctgggtccgacaggctcctggcaaaggactggaatgggtgtccgccatctctggctcaggcggcagcacatattacgccgactctgtgaagggcagattcaccatcagccgggacaacagcaagaacaccctgtacctccagatgaactccctgagagccgaggacaccgccgtgtactattgtgccagactgggctaccccaccaccacactgctgccctttgattattggggccagggcaccctggtcaccgtttcttctacgcgtatccagaaccctgatcctgccgtgtaccagctgcgggatagcaagagcagcgacaagagcgtgtgtctgttcaccgacttcgacagccagaccaacgtgtcccagagcaaggactccgacgtgtacatcaccgataagtgcgtgctggacatgcggagcatggacttcaagagcaactccgccgtggcctggtccaacaagtccgatttcgcctgcgccaacgccttcaacaacagcattatccccgaggacacattcttcccaagccccgagagcagctgcggctttaccagcgagagctaccagcagggcgtgctgagcgccaccatcctgtacgagatcctgctgggcaaggccaccctgtacgccgtgctggtgtctgccctggtgctgatggctatggtcaagcggaaggacagccggggacgcgccaagagaagcggatctggcgtgaagcagaccctgaatttcgacctgctgaagctggctggcgacgtggaatccaacccaggcccttctagaggccatatgaccgagtacaagcccacggtgcgcctcgccacccgcgacgacgtccccagggccgtacgcaccctcgccgccgcgttcgccgactaccccgccacgcgccacaccgtcgatccggaccgccacatcgagcgggtcaccgagctgcaagaactcttcctcacgcgcgtcgggctcgacatcggcaaggtgtgggtcgcggacgacggcgccgcggtggcggtctggaccacgccggagagcgtcgaagcgggggcggtgttcgccgagatcggcccgcgcatggccgagttgagcggttcccggctggccgcgcagcaacagatggaaggcctcctggcgccgcaccggcccaaggagcccgcgtggttcctggccaccgtcggcgtctcgcccgaccaccagggcaagggtctgggcagcgccgtcgtgctccccggagtggaggcggccgagcgcgccggggtgcccgccttcctggagacctccgcgccccgcaacctccccttctacgagcggctcggcttcaccgtcaccgccgacgtcgaggtgcccgaaggaccgcgcacctggtgcatgacccgcaagcccggtgcctga

SEQ ID NO: 39110 - DNA, 2310 bp, synthetic construct
  source 1..2310: mol_type = other DNA
atggccttaccagtgaccgccttgctcctgccgctggccttgctgctccacgccgccaggccggaagtgcagctggttgaatctggcggaggactggttcagcctggcggatctctgagactgtcttgtgccgcctctggcttcgccagcgactactatatcatcggctggttcagacaggcccctggcaaagagagagagggcgtcagctgtatcagcagcagatacgccaacaccaactacgccgacagcgtgaagggcagattcaccatcagccgggacaacgccaagaacaccgtgtacctccagatgaacagcctgaagcctgaggacaccgccgtgtactactgtgccgccgacaccagaagatacacctgtcctgacattgccaccatgcaccggaacttcgattcttggggccagggcacactggtcaccgtttcttctggtaccggcggaggcggatctggcggcggaggtagcggtggcggaggatctgaattcgacatccagatgacacagagccctagcagcctgtctgccagcgtgggagacagagtgaccatcacctgtagagccagccagagcatcagcagctacctgaactggtatcagcagaagcccggcaaggcccctaaactgctgatctatgccgccagctctctccagagcggagtgcctagcagattttctggcagcggctccggcaccgatttcaccctgacaatatccagcctccagcctgaggacttcgccacctactactgccagcagagctacagcacccctctgacctttggacagggcaccaaggtggaaatcaagctcgaggacctgaagaacgtgttcccacctgaggtggccgtgttcgagcctagcgaggccgagatcagccacacccagaaagccaccctcgtgtgcctggctaccggcttctaccccgaccatgtggaactgtcttggtgggtcaacggcaaagaggtgcacagcggcgtgtgtaccgacccccagccactgaaagaacagcccgccctgaacgacagccggtactgcctgagcagcagactgagagtgtccgccaccttctggcagaacccccggaaccacttcagatgccaggtgcagttctacggcctgagcgagaacgacgagtggacccaggacagagccaagcccgtgacccagatcgtgtctgccgaagcctggggcagagccgattgcgacgtgaagctggtggaaaagagcttcgagacagacaccaacctgaacttccagaacctgagcgtgatcggcttcagaatcctgctgctgaaagtggccggctttaacctgctgatgaccctgcggctgtggtccagcagggccaagcgatctggatctggagcaacaaacttctcactactcaaacaagcaggtgacgtggaggagaatcccgggcctactagtatggactggatttggcgcatccttttccttgtcggcgctgctaccggcgcgcattccttcgaagaggtgcagctggttgaatctggcggaggactggttcagcctggcggatctctgagactgtcttgtgctgccagcggcttcaccttcagctcctacgccatgagctgggtccgacaggctcctggcaaaggactggaatgggtgtccgccatctctggctcaggcggcagcacatattacgccgactctgtgaagggcagattcaccatcagccgggacaacagcaagaacaccctgtacctccagatgaactccctgagagccgaggacaccgccgtgtactattgtgccagactgggctaccccaccaccacactgctgccctttgattattggggccagggcaccctggtcaccgtttcttctacgcgtatccagaaccctgatcctgccgtgtaccagctgcgggatagcaagagcagcgacaagagcgtgtgtctgttcaccgacttcgacagccagaccaacgtgtcccagagcaaggactccgacgtgtacatcaccgataagtgcgtgctggacatgcggagcatggacttcaagagcaactccgccgtggcctggtccaacaagtccgatttcgcctgcgccaacgccttcaacaacagcattatccccgaggacacattcttcccaagccccgagagcagctgcggctttaccagcgagagctaccagcagggcgtgctgagcgccaccatcctgtacgagatcctgctgggcaaggccaccctgtacgccgtgctggtgtctgccctggtgctgatggctatggtcaagcggaaggacagccggggataa

SEQ ID NO: 39111 - DNA, 2310 bp, synthetic construct
  source 1..2310: mol_type = other DNA
atggccttaccagtgaccgccttgctcctgccgctggccttgctgctccacgccgccaggccggaagtgcagctggttgaatctggcggaggactggttcagcctggcggatctctgagactgagctgtgaagccagcggcttcgccagcgacgattacatcatcggctggttcagacaggcccctggcaaagagagagagggcgtcagctgcatcagctctaagtacgccaacaccgtgtacaccgacagcgtgaagggcagattcagactgagcagaggcaccgccaagaataccgtgtacctccagatgagcgccctgaagcctgaggataccgccgtgtactactgcgctatggacagccgcagagtgacatgccctgagatcagcaccatgcaccggaacttcgattcttggggccagggcacactggtcacagtgtcatctggtaccggcggaggcggatctggcggcggaggtagcggtggcggaggatctgaattcgacatccagatgacacagagccctagcagcctgtctgccagcgtgggagacagagtgaccatcacctgtagagccagccagagcatcagcagctacctgaactggtatcagcagaagcccggcaaggcccctaaactgctgatctatgccgccagctctctccagagcggagtgcctagcagattttctggcagcggctccggcaccgatttcaccctgacaatatccagcctccagcctgaggacttcgccacctactactgccagcagagctacagcacccctctgacctttggacagggcaccaaggtggaaatcaagctcgaggacctgaagaacgtgttcccacctgaggtggccgtgttcgagcctagcgaggccgagatcagccacacccagaaagccaccctcgtgtgcctggctaccggcttctaccccgaccatgtggaactgtcttggtgggtcaacggcaaagaggtgcacagcggcgtgtgtaccgacccccagccactgaaagaacagcccgccctgaacgacagccggtactgcctgagcagcagactgagagtgtccgccaccttctggcagaacccccggaaccacttcagatgccaggtgcagttctacggcctgagcgagaacgacgagtggacccaggacagagccaagcccgtgacccagatcgtgtctgccgaagcctggggcagagccgattgcgacgtgaagctggtggaaaagagcttcgagacagacaccaacctgaacttccagaacctgagcgtgatcggcttcagaatcctgctgctgaaagtggccggctttaacctgctgatgaccctgcggctgtggtccagcagggccaagcgatctggatctggagcaacaaacttctcactactcaaacaagcaggtgacgtggaggagaatcccgggcctactagtatggactggatttggcgcatccttttccttgtcggcgctgctaccggcgcgcattccttcgaagaggtgcagctggttgaatctggcggaggactggttcagcctggcggatctctgagactgtcttgtgctgccagcggcttcaccttcagctcctacgccatgagctgggtccgacaggctcctggcaaaggactggaatgggtgtccgccatctctggctcaggcggcagcacatattacgccgactctgtgaagggcagattcaccatcagccgggacaacagcaagaacaccctgtacctccagatgaactccctgagagccgaggacaccgccgtgtactattgtgccagactgggctaccccaccaccacactgctgccctttgattattggggccagggcaccctggtcaccgtttcttctacgcgtatccagaaccctgatcctgccgtgtaccagctgcgggatagcaagagcagcgacaagagcgtgtgtctgttcaccgacttcgacagccagaccaacgtgtcccagagcaaggactccgacgtgtacatcaccgataagtgcgtgctggacatgcggagcatggacttcaagagcaactccgccgtggcctggtccaacaagtccgatttcgcctgcgccaacgccttcaacaacagcattatccccgaggacacattcttcccaagccccgagagcagctgcggctttaccagcgagagctaccagcagggcgtgctgagcgccaccatcctgtacgagatcctgctgggcaaggccaccctgtacgccgtgctggtgtctgccctggtgctgatggctatggtcaagcggaaggacagccggggataa

SEQ ID NO: 39112 - DNA, 2307 bp, synthetic construct
  source 1..2307: mol_type = other DNA
atggccttaccagtgaccgccttgctcctgccgctggccttgctgctccacgccgccaggccggaagtgcagctggttgaatctggcggaggactggttcagcctggcggatctctgagactgtcttgtgccgcctctggcttcgccagcgactactatatcatcggctggttcagacaggcccctggcaaagagagagagggcgtcagctgtatcagcagcagatacgccaacaccaactacgccgacagcgtgaagggcagattcaccatcagccgggacaacgccaagaacaccgtgtacctccagatgaacagcctgaagcctgaggacaccgccgtgtactactgtgccgccgacaccagaagatacacctgtcctgacattgccaccatgcaccggaacttcgattcttggggccagggcacactggtcaccgtttcttctggtaccggcggaggcggatctggcggcggaggtagcggtggcggaggatctgaattcgacatccagatgacacagagccctagcagcctgtctgccagcgtgggagacagagtgaccatcacctgtagagccagccagagcatcagcagctacctgaactggtatcagcagaagcccggcaaggcccctaaactgctgatctatgccgccagctctctccagagcggagtgcctagcagattttctggcagcggctccggcaccgatttcaccctgacaatatccagcctccagcctgaggacttcgccacctactactgccagcagagctacagcacccctctgacctttggacagggcaccaaggtggaaatcaagctcgagatccagaaccctgatcctgccgtgtaccagctgcgggatagcaagagcagcgacaagagcgtgtgtctgttcaccgacttcgacagccagaccaacgtgtcccagagcaaggactccgacgtgtacatcaccgataagtgcgtgctggacatgcggagcatggacttcaagagcaactccgccgtggcctggtccaacaagtccgatttcgcctgcgccaacgccttcaacaacagcattatccccgaggacacattcttcccaagccccgagagcagctgcggctttaccagcgagagctaccagcagggcgtgctgagcgccaccatcctgtacgagatcctgctgggcaaggccaccctgtacgccgtgctggtgtctgccctggtgctgatggctatggtcaagcggaaggacagccggggaagggccaagcgatctggatctggagcaacaaacttctcactactcaaacaagcaggtgacgtggaggagaatcccgggcctactagtatggactggatttggcgcatccttttccttgtcggcgctgctaccggcgcgcattccttcgaagaggtgcagctggttgaatctggcggaggactggttcagcctggcggatctctgagactgtcttgtgctgccagcggcttcaccttcagctcctacgccatgagctgggtccgacaggctcctggcaaaggactggaatgggtgtccgccatctctggctcaggcggcagcacatattacgccgactctgtgaagggcagattcaccatcagccgggacaacagcaagaacaccctgtacctccagatgaactccctgagagccgaggacaccgccgtgtactattgtgccagactgggctaccccaccaccacactgctgccctttgattattggggccagggcaccctggtcaccgtttcttctacgcgtgacctgaagaacgtgttcccacctgaggtggccgtgttcgagcctagcgaggccgagatcagccacacccagaaagccaccctcgtgtgcctggctaccggcttctaccccgaccatgtggaactgtcttggtgggtcaacggcaaagaggtgcacagcggcgtgtgtaccgacccccagccactgaaagaacagcccgccctgaacgacagccggtactgcctgagcagcagactgagagtgtccgccaccttctggcagaacccccggaaccacttcagatgccaggtgcagttctacggcctgagcgagaacgacgagtggacccaggacagagccaagcccgtgacccagatcgtgtctgccgaagcctggggcagagccgattgcgacgtgaagctggtggaaaagagcttcgagacagacaccaacctgaacttccagaacctgagcgtgatcggcttcagaatcctgctgctgaaagtggccggctttaacctgctgatgaccctgcggctgtggtccagc

SEQ ID NO: 39113 - DNA, 2307 bp, synthetic construct
  source 1..2307: mol_type = other DNA
atggccttaccagtgaccgccttgctcctgccgctggccttgctgctccacgccgccaggccggaagtgcagctggttgaatctggcggaggactggttcagcctggcggatctctgagactgagctgtgaagccagcggcttcgccagcgacgattacatcatcggctggttcagacaggcccctggcaaagagagagagggcgtcagctgcatcagctctaagtacgccaacaccgtgtacaccgacagcgtgaagggcagattcagactgagcagaggcaccgccaagaataccgtgtacctccagatgagcgccctgaagcctgaggataccgccgtgtactactgcgctatggacagccgcagagtgacatgccctgagatcagcaccatgcaccggaacttcgattcttggggccagggcacactggtcacagtgtcatctggtaccggcggaggcggatctggcggcggaggtagcggtggcggaggatctgaattcgacatccagatgacacagagccctagcagcctgtctgccagcgtgggagacagagtgaccatcacctgtagagccagccagagcatcagcagctacctgaactggtatcagcagaagcccggcaaggcccctaaactgctgatctatgccgccagctctctccagagcggagtgcctagcagattttctggcagcggctccggcaccgatttcaccctgacaatatccagcctccagcctgaggacttcgccacctactactgccagcagagctacagcacccctctgacctttggacagggcaccaaggtggaaatcaagctcgagatccagaaccctgatcctgccgtgtaccagctgcgggatagcaagagcagcgacaagagcgtgtgtctgttcaccgacttcgacagccagaccaacgtgtcccagagcaaggactccgacgtgtacatcaccgataagtgcgtgctggacatgcggagcatggacttcaagagcaactccgccgtggcctggtccaacaagtccgatttcgcctgcgccaacgccttcaacaacagcattatccccgaggacacattcttcccaagccccgagagcagctgcggctttaccagcgagagctaccagcagggcgtgctgagcgccaccatcctgtacgagatcctgctgggcaaggccaccctgtacgccgtgctggtgtctgccctggtgctgatggctatggtcaagcggaaggacagccggggaagggccaagcgatctggatctggagcaacaaacttctcactactcaaacaagcaggtgacgtggaggagaatcccgggcctactagtatggactggatttggcgcatccttttccttgtcggcgctgctaccggcgcgcattccttcgaagaggtgcagctggttgaatctggcggaggactggttcagcctggcggatctctgagactgtcttgtgctgccagcggcttcaccttcagctcctacgccatgagctgggtccgacaggctcctggcaaaggactggaatgggtgtccgccatctctggctcaggcggcagcacatattacgccgactctgtgaagggcagattcaccatcagccgggacaacagcaagaacaccctgtacctccagatgaactccctgagagccgaggacaccgccgtgtactattgtgccagactgggctaccccaccaccacactgctgccctttgattattggggccagggcaccctggtcaccgtttcttctacgcgtgacctgaagaacgtgttcccacctgaggtggccgtgttcgagcctagcgaggccgagatcagccacacccagaaagccaccctcgtgtgcctggctaccggcttctaccccgaccatgtggaactgtcttggtgggtcaacggcaaagaggtgcacagcggcgtgtgtaccgacccccagccactgaaagaacagcccgccctgaacgacagccggtactgcctgagcagcagactgagagtgtccgccaccttctggcagaacccccggaaccacttcagatgccaggtgcagttctacggcctgagcgagaacgacgagtggacccaggacagagccaagcccgtgacccagatcgtgtctgccgaagcctggggcagagccgattgcgacgtgaagctggtggaaaagagcttcgagacagacaccaacctgaacttccagaacctgagcgtgatcggcttcagaatcctgctgctgaaagtggccggctttaacctgctgatgaccctgcggctgtggtccagc

SEQ ID NO: 39114 - DNA, 2280 bp, synthetic construct
  source 1..2280: mol_type = other DNA
atggccttaccagtgaccgccttgctcctgccgctggccttgctgctccacgccgccaggccgcaagtcaaactggaagaaagcggtggcggcctggtgcaacctggcgaatctctgagactgagctgtagcgccagcggctccatcttcaaggtgttcagagtgttcgccatgagctggtacaggcaaggccctggcaagcagagagagctggtcgcctctatcagcagcggcgagacaaccacatacgccgaatctgtgaaaggccggttcaccatcagccgggataatgccaagaataccgcctatctccagatggactccctgaagcctgaagatacagctgtgtactactgcaacgccgaccataccttcaccggcgatttttggggccagggaacccaagtgaccgtgtctagtggtaccggcggaggcggatctggcggcggaggtagcggtggcggaggatctgaattcgacatccagatgacacagagccctagcagcctgtctgccagcgtgggagacagagtgaccatcacctgtagagccagccagagcatcagcagctacctgaactggtatcagcagaagcccggcaaggcccctaaactgctgatctatgccgccagctctctccagagcggagtgcctagcagattttctggcagcggctccggcaccgatttcaccctgacaatatccagcctccagcctgaggacttcgccacctactactgccagcagagctacagcacccctctgacctttggacagggcaccaaggtggaaatcaagctcgagatccagaaccctgatcctgccgtgtaccagctgcgggatagcaagagcagcgacaagagcgtgtgtctgttcaccgacttcgacagccagaccaacgtgtcccagagcaaggactccgacgtgtacatcaccgataagtgcgtgctggacatgcggagcatggacttcaagagcaactccgccgtggcctggtccaacaagtccgatttcgcctgcgccaacgccttcaacaacagcattatccccgaggacacattcttcccaagccccgagagcagctgcggctttaccagcgagagctaccagcagggcgtgctgagcgccaccatcctgtacgagatcctgctgggcaaggccaccctgtacgccgtgctggtgtctgccctggtgctgatggctatggtcaagcggaaggacagccggggaagggccaagcgatctggatctggagcaacaaacttctcactactcaaacaagcaggtgacgtggaggagaatcccgggcctactagtatggactggatttggcgcatccttttccttgtcggcgctgctaccggcgcgcattccttcgaagaggtgcagctggttgaatctggcggaggactggttcagcctggcggatctctgagactgtcttgtgctgccagcggcttcaccttcagctcctacgccatgagctgggtccgacaggctcctggcaaaggactggaatgggtgtccgccatctctggctcaggcggcagcacatattacgccgactctgtgaagggcagattcaccatcagccgggacaacagcaagaacaccctgtacctccagatgaactccctgagagccgaggacaccgccgtgtactattgtgccagactgggctaccccaccaccacactgctgccctttgattattggggccagggcaccctggtcaccgtttcttctacgcgtgacctgaagaacgtgttcccacctgaggtggccgtgttcgagcctagcgaggccgagatcagccacacccagaaagccaccctcgtgtgcctggctaccggcttctaccccgaccatgtggaactgtcttggtgggtcaacggcaaagaggtgcacagcggcgtgtgtaccgacccccagccactgaaagaacagcccgccctgaacgacagccggtactgcctgagcagcagactgagagtgtccgccaccttctggcagaacccccggaaccacttcagatgccaggtgcagttctacggcctgagcgagaacgacgagtggacccaggacagagccaagcccgtgacccagatcgtgtctgccgaagcctggggcagagccgattgcgacgtgaagctggtggaaaagagcttcgagacagacaccaacctgaacttccagaacctgagcgtgatcggcttcagaatcctgctgctgaaagtggccggctttaacctgctgatgaccctgcggctgtggtccagc

SEQ ID NO: 39115 - DNA, 2286 bp, synthetic construct
  source 1..2286: mol_type = other DNA
atggccttaccagtgaccgccttgctcctgccgctggccttgctgctccacgccgccaggccggacatccagatgacacagagccctagcagcctgtctgccagcgtgggagacagagtgaccatcacctgtagagccagccagagcatcagcagctacctgaactggtatcagcagaagcccggcaaggcccctaaactgctgatctatgccgccagctctctccagagcggagtgcctagcagattttctggcagcggctccggcaccgatttcaccctgacaatatccagcctccagcctgaggacttcgccacctactactgccagcagagctacagcacccctctgacctttggacagggcaccaaggtggaaatcaagctcgaggacctgaagaacgtgttcccacctgaggtggccgtgttcgagcctagcgaggccgagatcagccacacccagaaagccaccctcgtgtgcctggctaccggcttctaccccgaccatgtggaactgtcttggtgggtcaacggcaaagaggtgcacagcggcgtgtgtaccgacccccagccactgaaagaacagcccgccctgaacgacagccggtactgcctgagcagcagactgagagtgtccgccaccttctggcagaacccccggaaccacttcagatgccaggtgcagttctacggcctgagcgagaacgacgagtggacccaggacagagccaagcccgtgacccagatcgtgtctgccgaagcctggggcagagccgattgcgacgtgaagctggtggaaaagagcttcgagacagacaccaacctgaacttccagaacctgagcgtgatcggcttcagaatcctgctgctgaaagtggccggctttaacctgctgatgaccctgcggctgtggtccagcagggccaagcgatctggatctggagcaacaaacttctcactactcaaacaagcaggtgacgtggaggagaatcccgggcctactagtgccaccatggactggatttggcgcatccttttccttgtcggcgctgctaccggcgcccattccgggcccgaagtgcagctggttgaatctggcggaggactggttcaggctggcggatctctgagactgtcttgtgccgccagcggcagaacctttagcatgggctggtttagacaggcccctggcaaagagagagagttcgtcgccgccatcacatactctggcggcagcccttactacgccgactctgtgaagggcagattcaccatcagccgggacaacgccaagaacaccgtgtacctccagatgaacagcctgaagcctgaggacaccgccgtgtactactgcgccgccaatccaacatacggcagcgactggaacgccgagaattggggccagggaacccaagtgacagtgtctagcggatccggcggcggaggatctggcggaggcggatctgggggcggaggctctttcgaagaggtgcagctggttgaatctggcggaggactggttcagcctggcggatctctgagactgtcttgtgctgccagcggcttcaccttcagctcctacgccatgagctgggtccgacaggctcctggcaaaggactggaatgggtgtccgccatctctggctcaggcggcagcacatattacgccgactctgtgaagggcagattcaccatcagccgggacaacagcaagaacaccctgtacctccagatgaactccctgagagccgaggacaccgccgtgtactattgtgccagactgggctaccccaccaccacactgctgccctttgattattggggccagggcaccctggtcaccgtttcttctacgcgtatccagaaccctgatcctgccgtgtaccagctgcgggatagcaagagcagcgacaagagcgtgtgtctgttcaccgacttcgacagccagaccaacgtgtcccagagcaaggactccgacgtgtacatcaccgataagtgcgtgctggacatgcggagcatggacttcaagagcaactccgccgtggcctggtccaacaagtccgatttcgcctgcgccaacgccttcaacaacagcattatccccgaggacacattcttcccaagccccgagagcagctgcggctttaccagcgagagctaccagcagggcgtgctgagcgccaccatcctgtacgagatcctgctgggcaaggccaccctgtacgccgtgctggtgtctgccctggtgctgatggctatggtcaagcggaaggacagccggggataa

SEQ ID NO: 39116 - DNA, 2289 bp, synthetic construct
  source 1..2289: mol_type = other DNA
atggccttaccagtgaccgccttgctcctgccgctggccttgctgctccacgccgccaggccggacatccagatgacacagagccctagcagcctgtctgccagcgtgggagacagagtgaccatcacctgtagagccagccagagcatcagcagctacctgaactggtatcagcagaagcccggcaaggcccctaaactgctgatctatgccgccagctctctccagagcggagtgcctagcagattttctggcagcggctccggcaccgatttcaccctgacaatatccagcctccagcctgaggacttcgccacctactactgccagcagagctacagcacccctctgacctttggacagggcaccaaggtggaaatcaagctcgaggacctgaagaacgtgttcccacctgaggtggccgtgttcgagcctagcgaggccgagatcagccacacccagaaagccaccctcgtgtgcctggctaccggcttctaccccgaccatgtggaactgtcttggtgggtcaacggcaaagaggtgcacagcggcgtgtgtaccgacccccagccactgaaagaacagcccgccctgaacgacagccggtactgcctgagcagcagactgagagtgtccgccaccttctggcagaacccccggaaccacttcagatgccaggtgcagttctacggcctgagcgagaacgacgagtggacccaggacagagccaagcccgtgacccagatcgtgtctgccgaagcctggggcagagccgattgcgacgtgaagctggtggaaaagagcttcgagacagacaccaacctgaacttccagaacctgagcgtgatcggcttcagaatcctgctgctgaaagtggccggctttaacctgctgatgaccctgcggctgtggtccagcagggccaagcgatctggatctggagcaacaaacttctcactactcaaacaagcaggtgacgtggaggagaatcccgggcctactagtgccaccatggactggatttggcgcatccttttccttgtcggcgctgctaccggcgcccattccgggcccgaagtgcaactggtggaatctgggggcggactggtgcagccaggcggaagtctgaggctgtcttgtgccgcctccggcagcatcttcggcttcaacgacatggcctggtatcggcaggctcccggaaaacagcgcgagctggtggctctgattagcagagtgggcgtgaccagcagcgccgactctgtgaagggcagattcacaatctccagagtgaacgccaaggatacagtgtacctccagatgaactctctgaaacctgaggatacagcagtgtactattgctacatggaccagcggctggacggcagcacactggcctactggggacagggaactcaagtgacagtgtctagcggatccggcggcggaggatctggcggaggcggatctgggggcggaggctctttcgaagaggtgcagctggttgaatctggcggaggactggttcagcctggcggatctctgagactgtcttgtgctgccagcggcttcaccttcagctcctacgccatgagctgggtccgacaggctcctggcaaaggactggaatgggtgtccgccatctctggctcaggcggcagcacatattacgccgactctgtgaagggcagattcaccatcagccgggacaacagcaagaacaccctgtacctccagatgaactccctgagagccgaggacaccgccgtgtactattgtgccagactgggctaccccaccaccacactgctgccctttgattattggggccagggcaccctggtcaccgtttcttctacgcgtatccagaaccctgatcctgccgtgtaccagctgcgggatagcaagagcagcgacaagagcgtgtgtctgttcaccgacttcgacagccagaccaacgtgtcccagagcaaggactccgacgtgtacatcaccgataagtgcgtgctggacatgcggagcatggacttcaagagcaactccgccgtggcctggtccaacaagtccgatttcgcctgcgccaacgccttcaacaacagcattatccccgaggacacattcttcccaagccccgagagcagctgcggctttaccagcgagagctaccagcagggcgtgctgagcgccaccatcctgtacgagatcctgctgggcaaggccaccctgtacgccgtgctggtgtctgccctggtgctgatggctatggtcaagcggaaggacagccggggataa

SEQ ID NO: 39117 - DNA, 2277 bp, synthetic construct
  source 1..2277: mol_type = other DNA
atggccttaccagtgaccgccttgctcctgccgctggccttgctgctccacgccgccaggccggacatccagatgacacagagccctagcagcctgtctgccagcgtgggagacagagtgaccatcacctgtagagccagccagagcatcagcagctacctgaactggtatcagcagaagcccggcaaggcccctaaactgctgatctatgccgccagctctctccagagcggagtgcctagcagattttctggcagcggctccggcaccgatttcaccctgacaatatccagcctccagcctgaggacttcgccacctactactgccagcagagctacagcacccctctgacctttggacagggcaccaaggtggaaatcaagctcgaggacctgaagaacgtgttcccacctgaggtggccgtgttcgagcctagcgaggccgagatcagccacacccagaaagccaccctcgtgtgcctggctaccggcttctaccccgaccatgtggaactgtcttggtgggtcaacggcaaagaggtgcacagcggcgtgtgtaccgacccccagccactgaaagaacagcccgccctgaacgacagccggtactgcctgagcagcagactgagagtgtccgccaccttctggcagaacccccggaaccacttcagatgccaggtgcagttctacggcctgagcgagaacgacgagtggacccaggacagagccaagcccgtgacccagatcgtgtctgccgaagcctggggcagagccgattgcgacgtgaagctggtggaaaagagcttcgagacagacaccaacctgaacttccagaacctgagcgtgatcggcttcagaatcctgctgctgaaagtggccggctttaacctgctgatgaccctgcggctgtggtccagcagggccaagcgatctggatctggagcaacaaacttctcactactcaaacaagcaggtgacgtggaggagaatcccgggcctactagtgccaccatggactggatttggcgcatccttttccttgtcggcgctgctaccggcgcccattccgggcccgaggtgcagctggttgaatctggcggaggactggttcaggctggcggatctctgagactgtcttgtgccgccagcggctctgtgttcagcggcaatgtgatgggctggtacagacaggcccctggcaaagaaagagagtgggttgccgccattgccagcggcggcagcatctactacagagactctgtgaagggcagattcaccatcagccgggacaacgccaagaacaccgtgtacctccagatgaacagcctgaagcctgaggacaccgccgtgtactactgcaactctcaccctcctacactgccctattggggcctgggaacccaagtgacagtgtcctctggatccggcggcggaggatctggcggaggcggatctgggggcggaggctctttcgaagaggtgcagctggttgaatctggcggaggactggttcagcctggcggatctctgagactgtcttgtgctgccagcggcttcaccttcagctcctacgccatgagctgggtccgacaggctcctggcaaaggactggaatgggtgtccgccatctctggctcaggcggcagcacatattacgccgactctgtgaagggcagattcaccatcagccgggacaacagcaagaacaccctgtacctccagatgaactccctgagagccgaggacaccgccgtgtactattgtgccagactgggctaccccaccaccacactgctgccctttgattattggggccagggcaccctggtcaccgtttcttctacgcgtatccagaaccctgatcctgccgtgtaccagctgcgggatagcaagagcagcgacaagagcgtgtgtctgttcaccgacttcgacagccagaccaacgtgtcccagagcaaggactccgacgtgtacatcaccgataagtgcgtgctggacatgcggagcatggacttcaagagcaactccgccgtggcctggtccaacaagtccgatttcgcctgcgccaacgccttcaacaacagcattatccccgaggacacattcttcccaagccccgagagcagctgcggctttaccagcgagagctaccagcagggcgtgctgagcgccaccatcctgtacgagatcctgctgggcaaggccaccctgtacgccgtgctggtgtctgccctggtgctgatggctatggtcaagcggaaggacagccggggataa

SEQ ID NO: 39118 - DNA, 2271 bp, synthetic construct
  source 1..2271: mol_type = other DNA
atggccttaccagtgaccgccttgctcctgccgctggccttgctgctccacgccgccaggccggacatccagatgacacagagccctagcagcctgtctgccagcgtgggagacagagtgaccatcacctgtagagccagccagagcatcagcagctacctgaactggtatcagcagaagcccggcaaggcccctaaactgctgatctatgccgccagctctctccagagcggagtgcctagcagattttctggcagcggctccggcaccgatttcaccctgacaatatccagcctccagcctgaggacttcgccacctactactgccagcagagctacagcacccctctgacctttggacagggcaccaaggtggaaatcaagctcgaggacctgaagaacgtgttcccacctgaggtggccgtgttcgagcctagcgaggccgagatcagccacacccagaaagccaccctcgtgtgcctggctaccggcttctaccccgaccatgtggaactgtcttggtgggtcaacggcaaagaggtgcacagcggcgtgtgtaccgacccccagccactgaaagaacagcccgccctgaacgacagccggtactgcctgagcagcagactgagagtgtccgccaccttctggcagaacccccggaaccacttcagatgccaggtgcagttctacggcctgagcgagaacgacgagtggacccaggacagagccaagcccgtgacccagatcgtgtctgccgaagcctggggcagagccgattgcgacgtgaagctggtggaaaagagcttcgagacagacaccaacctgaacttccagaacctgagcgtgatcggcttcagaatcctgctgctgaaagtggccggctttaacctgctgatgaccctgcggctgtggtccagcagggccaagcgatctggatctggagcaacaaacttctcactactcaaacaagcaggtgacgtggaggagaatcccgggcctactagtgccaccatggactggatttggcgcatccttttccttgtcggcgctgctaccggcgcccattccgggcccgaagttcagctgctggaatctggcggaggactcgttcaacctggcggctctctgagactgagctgtgccgcttctggcttcagcttctctagctacgccctgagctgggttcgacaagctcccggaaagggccttgaatgggtgtccagcatcggcgagaatgacggcaccacagactatgccgatgccgtgaaaggccggtttaccatcagcagagacaattccaagaacacgctctatctgcaaatgaactccctgcgcgtggaagatacagccgtgtattattgcgtgaaggacggcatccactggggacagggaaccctggttacagtgtctagcggatccggcggcggaggatctggcggaggcggatctgggggcggaggctctttcgaagaggtgcagctggttgaatctggcggaggactggttcagcctggcggatctctgagactgtcttgtgctgccagcggcttcaccttcagctcctacgccatgagctgggtccgacaggctcctggcaaaggactggaatgggtgtccgccatctctggctcaggcggcagcacatattacgccgactctgtgaagggcagattcaccatcagccgggacaacagcaagaacaccctgtacctccagatgaactccctgagagccgaggacaccgccgtgtactattgtgccagactgggctaccccaccaccacactgctgccctttgattattggggccagggcaccctggtcaccgtttcttctacgcgtatccagaaccctgatcctgccgtgtaccagctgcgggatagcaagagcagcgacaagagcgtgtgtctgttcaccgacttcgacagccagaccaacgtgtcccagagcaaggactccgacgtgtacatcaccgataagtgcgtgctggacatgcggagcatggacttcaagagcaactccgccgtggcctggtccaacaagtccgatttcgcctgcgccaacgccttcaacaacagcattatccccgaggacacattcttcccaagccccgagagcagctgcggctttaccagcgagagctaccagcagggcgtgctgagcgccaccatcctgtacgagatcctgctgggcaaggccaccctgtacgccgtgctggtgtctgccctggtgctgatggctatggtcaagcggaaggacagccggggataa

SEQ ID NO: 39119 - DNA, 3378 bp, synthetic construct
  source 1..3378: mol_type = other DNA
atgggacccagactgctgttttgggctctgctgtgtctgctcggcacaggacctgttgaagctggcgtgacacagagccccacacacctgattaagaccagaggccagcaggccacactgagatgcagccctatcagcggccacaccagcgtgtactggtatcagcaggctctcggactgggcctccagttcctgctttggtacgacgagggcgaagagagaaaccggggcaacttccctcctcggttttccggcagacagttccccaactacagcagcgagctgaacgtgaacgccctggaactggaagatagcgccctgtacctgtgtgcctcttctcttggtggacctcgcggactggctggactgagaggggatgagcagtttttcggccctggcaccagactgaccgtgctggaaggtaccggcggaggcggatctggcggcggagaattcgacatccagatgacacagagccctagcagcctgtctgccagcgtgggagacagagtgaccatcacctgtagagccagccagagcatcagcagctacctgaactggtatcagcagaagcccggcaaggcccctaaactgctgatctatgccgccagctctctccagagcggagtgcctagcagattttctggcagcggctccggcaccgatttcaccctgacaatatccagcctccagcctgaggacttcgccacctactactgccagcagagctacagcacccctctgacctttggacagggcaccaaggtggaaatcaagctcgaggacctgaagaacgtgttcccacctgaggtggccgtgttcgagcctagcgaggccgagatcagccacacccagaaagccaccctcgtgtgcctggctaccggcttctaccccgaccatgtggaactgtcttggtgggtcaacggcaaagaggtgcacagcggcgtgtgtaccgacccccagccactgaaagaacagcccgccctgaacgacagccggtactgcctgagcagcagactgagagtgtccgccaccttctggcagaacccccggaaccacttcagatgccaggtgcagttctacggcctgagcgagaacgacgagtggacccaggacagagccaagcccgtgacccagatcgtgtctgccgaagcctggggcagagccgattgcgacgtgaagctggtggaaaagagcttcgagacagacaccaacctgaacttccagaacctgagcgtgatcggcttcagaatcctgctgctgaaagtggccggctttaacctgctgatgaccctgcggctgtggtccagcagggccaagcgatctggatctggagcaacaaacttctcactactcaaacaagcaggtgacgtggaggagaatcccgggcctactagtgccaccatggactggatttggcgcatccttttccttgtcggcgctgctaccggcgcccattccgggcccgaagtgcagctggttgaatctggcggaggactggttcaggctggcggatctctgagactgtcttgtgccgccagcggcagaacctttagcatgggctggtttagacaggcccctggcaaagagagagagttcgtcgccgccatcacatactctggcggcagcccttactacgccgactctgtgaagggcagattcaccatcagccgggacaacgccaagaacaccgtgtacctccagatgaacagcctgaagcctgaggacaccgccgtgtactactgcgccgccaatccaacatacggcagcgactggaacgccgagaattggggccagggaacccaagtgacagtgtctagcggatccggcggcggaggatctggcggaggcggatctgggggcggaggctctttcgaagaggtgcagctggttgaatctggcggaggactggttcagcctggcggatctctgagactgtcttgtgctgccagcggcttcaccttcagctcctacgccatgagctgggtccgacaggctcctggcaaaggactggaatgggtgtccgccatctctggctcaggcggcagcacatattacgccgactctgtgaagggcagattcaccatcagccgggacaacagcaagaacaccctgtacctccagatgaactccctgagagccgaggacaccgccgtgtactattgtgccagactgggctaccccaccaccacactgctgccctttgattattggggccagggcaccctggtcaccgtttcttctacgcgtatccagaaccctgatcctgccgtgtaccagctgcgggatagcaagagcagcgacaagagcgtgtgtctgttcaccgacttcgacagccagaccaacgtgtcccagagcaaggactccgacgtgtacatcaccgataagtgcgtgctggacatgcggagcatggacttcaagagcaactccgccgtggcctggtccaacaagtccgatttcgcctgcgccaacgccttcaacaacagcattatccccgaggacacattcttcccaagccccgagagcagctgcggctttaccagcgagagctaccagcagggcgtgctgagcgccaccatcctgtacgagatcctgctgggcaaggccaccctgtacgccgtgctggtgtctgccctggtgctgatggctatggtcaagcggaaggacagccggggacgcgccaagagaagcggatctggcgtgaagcagaccctgaatttcgacctgctgaagctggctggcgacgtggaatccaacccaggcccttctagaggccatatgaccgagtacaagcccacggtgcgcctcgccacccgcgacgacgtccccagggccgtacgcaccctcgccgccgcgttcgccgactaccccgccacgcgccacaccgtcgatccggaccgccacatcgagcgggtcaccgagctgcaagaactcttcctcacgcgcgtcgggctcgacatcggcaaggtgtgggtcgcggacgacggcgccgcggtggcggtctggaccacgccggagagcgtcgaagcgggggcggtgttcgccgagatcggcccgcgcatggccgagttgagcggttcccggctggccgcgcagcaacagatggaaggcctcctggcgccgcaccggcccaaggagcccgcgtggttcctggccaccgtcggcgtctcgcccgaccaccagggcaagggtctgggcagcgccgtcgtgctccccggagtggaggcggccgagcgcgccggggtgcccgccttcctggagacctccgcgccccgcaacctccccttctacgagcggctcggcttcaccgtcaccgccgacgtcgaggtgcccgaaggaccgcgcacctggtgcatgacccgcaagcccggtgcctga

SEQ ID NO: 39120 - DNA, 3375 bp, synthetic construct
  source 1..3375: mol_type = other DNA
atgggacccagactgctgttttgggctctgctgtgtctgctcggcacaggacctgttgaagctggcgtgacacagagccccacacacctgattaagaccagaggccagcaggccacactgagatgcagccctatcagcggccacaccagcgtgtactggtatcagcaggctctcggactgggcctccagttcctgctttggtacgacgagggcgaagagagaaaccggggcaacttccctcctcggttttccggcagacagttccccaactacagcagcgagctgaacgtgaacgccctggaactggaagatagcgccctgtacctgtgtgccagctctctcggcggagatgaactgggagccgatggcaacgagcagttctttggccctggcaccagactgaccgtgctggaaggtaccggcggaggcggatctggcggcggaagcgaattcgacatccagatgacacagagccctagcagcctgtctgccagcgtgggagacagagtgaccatcacctgtagagccagccagagcatcagcagctacctgaactggtatcagcagaagcccggcaaggcccctaaactgctgatctatgccgccagctctctccagagcggagtgcctagcagattttctggcagcggctccggcaccgatttcaccctgacaatatccagcctccagcctgaggacttcgccacctactactgccagcagagctacagcacccctctgacctttggacagggcaccaaggtggaaatcaagctcgaggacctgaagaacgtgttcccacctgaggtggccgtgttcgagcctagcgaggccgagatcagccacacccagaaagccaccctcgtgtgcctggctaccggcttctaccccgaccatgtggaactgtcttggtgggtcaacggcaaagaggtgcacagcggcgtgtgtaccgacccccagccactgaaagaacagcccgccctgaacgacagccggtactgcctgagcagcagactgagagtgtccgccaccttctggcagaacccccggaaccacttcagatgccaggtgcagttctacggcctgagcgagaacgacgagtggacccaggacagagccaagcccgtgacccagatcgtgtctgccgaagcctggggcagagccgattgcgacgtgaagctggtggaaaagagcttcgagacagacaccaacctgaacttccagaacctgagcgtgatcggcttcagaatcctgctgctgaaagtggccggctttaacctgctgatgaccctgcggctgtggtccagcagggccaagcgatctggatctggagcaacaaacttctcactactcaaacaagcaggtgacgtggaggagaatcccgggcctactagtgccaccatggactggatttggcgcatccttttccttgtcggcgctgctaccggcgcccattccgggcccgaagtgcagctggttgaatctggcggaggactggttcaggctggcggatctctgagactgtcttgtgccgccagcggcagaacctttagcatgggctggtttagacaggcccctggcaaagagagagagttcgtcgccgccatcacatactctggcggcagcccttactacgccgactctgtgaagggcagattcaccatcagccgggacaacgccaagaacaccgtgtacctccagatgaacagcctgaagcctgaggacaccgccgtgtactactgcgccgccaatccaacatacggcagcgactggaacgccgagaattggggccagggaacccaagtgacagtgtctagcggatccggcggcggaggatctggcggaggcggatctgggggcggaggctctttcgaagaggtgcagctggttgaatctggcggaggactggttcagcctggcggatctctgagactgtcttgtgctgccagcggcttcaccttcagctcctacgccatgagctgggtccgacaggctcctggcaaaggactggaatgggtgtccgccatctctggctcaggcggcagcacatattacgccgactctgtgaagggcagattcaccatcagccgggacaacagcaagaacaccctgtacctccagatgaactccctgagagccgaggacaccgccgtgtactattgtgccagactgggctaccccaccaccacactgctgccctttgattattggggccagggcaccctggtcaccgtttcttctacgcgtatccagaaccctgatcctgccgtgtaccagctgcgggatagcaagagcagcgacaagagcgtgtgtctgttcaccgacttcgacagccagaccaacgtgtcccagagcaaggactccgacgtgtacatcaccgataagtgcgtgctggacatgcggagcatggacttcaagagcaactccgccgtggcctggtccaacaagtccgatttcgcctgcgccaacgccttcaacaacagcattatccccgaggacacattcttcccaagccccgagagcagctgcggctttaccagcgagagctaccagcagggcgtgctgagcgccaccatcctgtacgagatcctgctgggcaaggccaccctgtacgccgtgctggtgtctgccctggtgctgatggctatggtcaagcggaaggacagccggggacgcgccaagagaagcggatctggcgtgaagcagaccctgaatttcgacctgctgaagctggctggcgacgtggaatccaacccaggcccttctagaggccatatgaccgagtacaagcccacggtgcgcctcgccacccgcgacgacgtccccagggccgtacgcaccctcgccgccgcgttcgccgactaccccgccacgcgccacaccgtcgatccggaccgccacatcgagcgggtcaccgagctgcaagaactcttcctcacgcgcgtcgggctcgacatcggcaaggtgtgggtcgcggacgacggcgccgcggtggcggtctggaccacgccggagagcgtcgaagcgggggcggtgttcgccgagatcggcccgcgcatggccgagttgagcggttcccggctggccgcgcagcaacagatggaaggcctcctggcgccgcaccggcccaaggagcccgcgtggttcctggccaccgtcggcgtctcgcccgaccaccagggcaagggtctgggcagcgccgtcgtgctccccggagtggaggcggccgagcgcgccggggtgcccgccttcctggagacctccgcgccccgcaacctccccttctacgagcggctcggcttcaccgtcaccgccgacgtcgaggtgcccgaaggaccgcgcacctggtgcatgacccgcaagcccggtgcctga

SEQ ID NO: 39121 - DNA, 2850 bp, synthetic construct
  source 1..2850: mol_type = other DNA
atggccttaccagtgaccgccttgctcctgccgctggccttgctgctccacgccgccaggccggacatccagatgacacagagccctagcagcctgtctgccagcgtgggagacagagtgaccatcacctgtagagccagccagagcatcagcagctacctgaactggtatcagcagaagcccggcaaggcccctaaactgctgatctatgccgccagctctctccagagcggagtgcctagcagattttctggcagcggctccggcaccgatttcaccctgacaatatccagcctccagcctgaggacttcgccacctactactgccagcagagctacagcacccctctgacctttggacagggcaccaaggtggaaatcaagctcgaggacctgaagaacgtgttcccacctgaggtggccgtgttcgagcctagcgaggccgagatcagccacacccagaaagccaccctcgtgtgcctggctaccggcttctaccccgaccatgtggaactgtcttggtgggtcaacggcaaagaggtgcacagcggcgtgtgtaccgacccccagccactgaaagaacagcccgccctgaacgacagccggtactgcctgagcagcagactgagagtgtccgccaccttctggcagaacccccggaaccacttcagatgccaggtgcagttctacggcctgagcgagaacgacgagtggacccaggacagagccaagcccgtgacccagatcgtgtctgccgaagcctggggcagagccgattgcgacgtgaagctggtggaaaagagcttcgagacagacaccaacctgaacttccagaacctgagcgtgatcggcttcagaatcctgctgctgaaagtggccggctttaacctgctgatgaccctgcggctgtggtccagcagggccaagcgatctggatctggagcaacaaacttctcactactcaaacaagcaggtgacgtggaggagaatcccgggcctactagtgccaccatggactggatttggcgcatccttttccttgtcggcgctgctaccggcgcccattccgggcccatgggaagctggcttgagttctaccacagactcaacgccattgacagcaggctgtgggcacttggcggaagcgaagctgaactcgccgcttttgaaaaagaaattgccgctttcgagtccgagcttcaggcttacaaaggcaaagggaatcctgaggtcgagagcctgagagatcacgctgcccacattagagagtggttgcaggcataccggcacaatggatccggcggcggaggatctggcggaggcggatctgggggcggaggctctttcgaagaggtgcagctggttgaatctggcggaggactggttcagcctggcggatctctgagactgtcttgtgctgccagcggcttcaccttcagctcctacgccatgagctgggtccgacaggctcctggcaaaggactggaatgggtgtccgccatctctggctcaggcggcagcacatattacgccgactctgtgaagggcagattcaccatcagccgggacaacagcaagaacaccctgtacctccagatgaactccctgagagccgaggacaccgccgtgtactattgtgccagactgggctaccccaccaccacactgctgccctttgattattggggccagggcaccctggtcaccgtttcttctacgcgtatccagaaccctgatcctgccgtgtaccagctgcgggatagcaagagcagcgacaagagcgtgtgtctgttcaccgacttcgacagccagaccaacgtgtcccagagcaaggactccgacgtgtacatcaccgataagtgcgtgctggacatgcggagcatggacttcaagagcaactccgccgtggcctggtccaacaagtccgatttcgcctgcgccaacgccttcaacaacagcattatccccgaggacacattcttcccaagccccgagagcagctgcggctttaccagcgagagctaccagcagggcgtgctgagcgccaccatcctgtacgagatcctgctgggcaaggccaccctgtacgccgtgctggtgtctgccctggtgctgatggctatggtcaagcggaaggacagccggggacgcgccaagagaagcggatctggcgtgaagcagaccctgaatttcgacctgctgaagctggctggcgacgtggaatccaacccaggcccttctagaggccatatgaccgagtacaagcccacggtgcgcctcgccacccgcgacgacgtccccagggccgtacgcaccctcgccgccgcgttcgccgactaccccgccacgcgccacaccgtcgatccggaccgccacatcgagcgggtcaccgagctgcaagaactcttcctcacgcgcgtcgggctcgacatcggcaaggtgtgggtcgcggacgacggcgccgcggtggcggtctggaccacgccggagagcgtcgaagcgggggcggtgttcgccgagatcggcccgcgcatggccgagttgagcggttcccggctggccgcgcagcaacagatggaaggcctcctggcgccgcaccggcccaaggagcccgcgtggttcctggccaccgtcggcgtctcgcccgaccaccagggcaagggtctgggcagcgccgtcgtgctccccggagtggaggcggccgagcgcgccggggtgcccgccttcctggagacctccgcgccccgcaacctccccttctacgagcggctcggcttcaccgtcaccgccgacgtcgaggtgcccgaaggaccgcgcacctggtgcatgacccgcaagcccggtgcctga

SEQ ID NO: 39122 - DNA, 2850 bp, synthetic construct
  source 1..2850: mol_type = other DNA
atggccttaccagtgaccgccttgctcctgccgctggccttgctgctccacgccgccaggccggcatgcatgggcagttggttcgagttctacgaccggctgaatgccatcgacgccagactgtgggctctcggaggatctgaagctgagctggccgccttcgagaaagagatcgccgcctttgagagcgagctgcaagcctacaaaggcaagggcaaccccgaggtggaaaacctgagagtgcacgccgctgccatcagagaatggctccaggcttacagacacaacggtaccggcggaggcggatctggcggcggaggtagcggtggcggaggatctgaattcgacatccagatgacacagagccctagcagcctgtctgccagcgtgggagacagagtgaccatcacctgtagagccagccagagcatcagcagctacctgaactggtatcagcagaagcccggcaaggcccctaaactgctgatctatgccgccagctctctccagagcggagtgcctagcagattttctggcagcggctccggcaccgatttcaccctgacaatatccagcctccagcctgaggacttcgccacctactactgccagcagagctacagcacccctctgacctttggacagggcaccaaggtggaaatcaagctcgaggacctgaagaacgtgttcccacctgaggtggccgtgttcgagcctagcgaggccgagatcagccacacccagaaagccaccctcgtgtgcctggctaccggcttctaccccgaccatgtggaactgtcttggtgggtcaacggcaaagaggtgcacagcggcgtgtgtaccgacccccagccactgaaagaacagcccgccctgaacgacagccggtactgcctgagcagcagactgagagtgtccgccaccttctggcagaacccccggaaccacttcagatgccaggtgcagttctacggcctgagcgagaacgacgagtggacccaggacagagccaagcccgtgacccagatcgtgtctgccgaagcctggggcagagccgattgcgacgtgaagctggtggaaaagagcttcgagacagacaccaacctgaacttccagaacctgagcgtgatcggcttcagaatcctgctgctgaaagtggccggctttaacctgctgatgaccctgcggctgtggtccagcagggccaagcgatctggatctggagcaacaaacttctcactactcaaacaagcaggtgacgtggaggagaatcccgggcctactagtatggactggatttggcgcatccttttccttgtcggcgctgctaccggcgcgcattccttcgaagaggtgcagctggttgaatctggcggaggactggttcagcctggcggatctctgagactgtcttgtgctgccagcggcttcaccttcagctcctacgccatgagctgggtccgacaggctcctggcaaaggactggaatgggtgtccgccatctctggctcaggcggcagcacatattacgccgactctgtgaagggcagattcaccatcagccgggacaacagcaagaacaccctgtacctccagatgaactccctgagagccgaggacaccgccgtgtactattgtgccagactgggctaccccaccaccacactgctgccctttgattattggggccagggcaccctggtcaccgtttcttctacgcgtatccagaaccctgatcctgccgtgtaccagctgcgggatagcaagagcagcgacaagagcgtgtgtctgttcaccgacttcgacagccagaccaacgtgtcccagagcaaggactccgacgtgtacatcaccgataagtgcgtgctggacatgcggagcatggacttcaagagcaactccgccgtggcctggtccaacaagtccgatttcgcctgcgccaacgccttcaacaacagcattatccccgaggacacattcttcccaagccccgagagcagctgcggctttaccagcgagagctaccagcagggcgtgctgagcgccaccatcctgtacgagatcctgctgggcaaggccaccctgtacgccgtgctggtgtctgccctggtgctgatggctatggtcaagcggaaggacagccggggacgcgccaagagaagcggatctggcgtgaagcagaccctgaatttcgacctgctgaagctggctggcgacgtggaatccaacccaggcccttctagaggccatatgaccgagtacaagcccacggtgcgcctcgccacccgcgacgacgtccccagggccgtacgcaccctcgccgccgcgttcgccgactaccccgccacgcgccacaccgtcgatccggaccgccacatcgagcgggtcaccgagctgcaagaactcttcctcacgcgcgtcgggctcgacatcggcaaggtgtgggtcgcggacgacggcgccgcggtggcggtctggaccacgccggagagcgtcgaagcgggggcggtgttcgccgagatcggcccgcgcatggccgagttgagcggttcccggctggccgcgcagcaacagatggaaggcctcctggcgccgcaccggcccaaggagcccgcgtggttcctggccaccgtcggcgtctcgcccgaccaccagggcaagggtctgggcagcgccgtcgtgctccccggagtggaggcggccgagcgcgccggggtgcccgccttcctggagacctccgcgccccgcaacctccccttctacgagcggctcggcttcaccgtcaccgccgacgtcgaggtgcccgaaggaccgcgcacctggtgcatgacccgcaagcccggtgcctga

SEQ ID NO: 39123 - DNA, 3201 bp, synthetic construct
  source 1..3201: mol_type = other DNA
atggccttaccagtgaccgccttgctcctgccgctggccttgctgctccacgccgccaggccggcatgcatggaccccgacctggaaatcagagccgccttcctgcggcagagaaacacagccctgagaacagaggtggccgagctggaacaagaggtgcagcggctggaaaacgaggtgtcccagtacgagacaagatacggccctctcggaggcggaaaaggtaccggcggaggcggatctggcggcggaggtagcggtggcggaggatctgaattcgacatccagatgacacagagccctagcagcctgtctgccagcgtgggagacagagtgaccatcacctgtagagccagccagagcatcagcagctacctgaactggtatcagcagaagcccggcaaggcccctaaactgctgatctatgccgccagctctctccagagcggagtgcctagcagattttctggcagcggctccggcaccgatttcaccctgacaatatccagcctccagcctgaggacttcgccacctactactgccagcagagctacagcacccctctgacctttggacagggcaccaaggtggaaatcaagctcgaggacctgaagaacgtgttcccacctgaggtggccgtgttcgagcctagcgaggccgagatcagccacacccagaaagccaccctcgtgtgcctggctaccggcttctaccccgaccatgtggaactgtcttggtgggtcaacggcaaagaggtgcacagcggcgtgtgtaccgacccccagccactgaaagaacagcccgccctgaacgacagccggtactgcctgagcagcagactgagagtgtccgccaccttctggcagaacccccggaaccacttcagatgccaggtgcagttctacggcctgagcgagaacgacgagtggacccaggacagagccaagcccgtgacccagatcgtgtctgccgaagcctggggcagagccgattgcgacgtgaagctggtggaaaagagcttcgagacagacaccaacctgaacttccagaacctgagcgtgatcggcttcagaatcctgctgctgaaagtggccggctttaacctgctgatgaccctgcggctgtggtccagcagggccaagcgatctggatctggagcaacaaacttctcactactcaaacaagcaggtgacgtggaggagaatcccgggcctactagtgccaccatggactggatttggcgcatccttttccttgtcggcgctgctaccggcgcccattccgggcccgaagtgcagctggttgaatctggcggaggactggttcaggctggcggatctctgagactgtcttgtgccgccagcggcagaacctttagcatgggctggtttagacaggcccctggcaaagagagagagttcgtcgccgccatcacatactctggcggcagcccttactacgccgactctgtgaagggcagattcaccatcagccgggacaacgccaagaacaccgtgtacctccagatgaacagcctgaagcctgaggacaccgccgtgtactactgcgccgccaatccaacatacggcagcgactggaacgccgagaattggggccagggaacccaagtgacagtgtctagcggatccggcggcggaggatctggcggaggcggatctgggggcggaggctctttcgaagaggtgcagctggttgaatctggcggaggactggttcagcctggcggatctctgagactgtcttgtgctgccagcggcttcaccttcagctcctacgccatgagctgggtccgacaggctcctggcaaaggactggaatgggtgtccgccatctctggctcaggcggcagcacatattacgccgactctgtgaagggcagattcaccatcagccgggacaacagcaagaacaccctgtacctccagatgaactccctgagagccgaggacaccgccgtgtactattgtgccagactgggctaccccaccaccacactgctgccctttgattattggggccagggcaccctggtcaccgtttcttctacgcgtatccagaaccctgatcctgccgtgtaccagctgcgggatagcaagagcagcgacaagagcgtgtgtctgttcaccgacttcgacagccagaccaacgtgtcccagagcaaggactccgacgtgtacatcaccgataagtgcgtgctggacatgcggagcatggacttcaagagcaactccgccgtggcctggtccaacaagtccgatttcgcctgcgccaacgccttcaacaacagcattatccccgaggacacattcttcccaagccccgagagcagctgcggctttaccagcgagagctaccagcagggcgtgctgagcgccaccatcctgtacgagatcctgctgggcaaggccaccctgtacgccgtgctggtgtctgccctggtgctgatggctatggtcaagcggaaggacagccggggacgcgccaagagaagcggatctggcgtgaagcagaccctgaatttcgacctgctgaagctggctggcgacgtggaatccaacccaggcccttctagaggccatatgaccgagtacaagcccacggtgcgcctcgccacccgcgacgacgtccccagggccgtacgcaccctcgccgccgcgttcgccgactaccccgccacgcgccacaccgtcgatccggaccgccacatcgagcgggtcaccgagctgcaagaactcttcctcacgcgcgtcgggctcgacatcggcaaggtgtgggtcgcggacgacggcgccgcggtggcggtctggaccacgccggagagcgtcgaagcgggggcggtgttcgccgagatcggcccgcgcatggccgagttgagcggttcccggctggccgcgcagcaacagatggaaggcctcctggcgccgcaccggcccaaggagcccgcgtggttcctggccaccgtcggcgtctcgcccgaccaccagggcaagggtctgggcagcgccgtcgtgctccccggagtggaggcggccgagcgcgccggggtgcccgccttcctggagacctccgcgccccgcaacctccccttctacgagcggctcggcttcaccgtcaccgccgacgtcgaggtgcccgaaggaccgcgcacctggtgcatgacccgcaagcccggtgcctga

SEQ ID NO: 39124 - DNA, 2850 bp, synthetic construct
  source 1..2850: mol_type = other DNA
atggccttaccagtgaccgccttgctcctgccgctggccttgctgctccacgccgccaggccggacatccagatgacacagagccctagcagcctgtctgccagcgtgggagacagagtgaccatcacctgtagagccagccagagcatcagcagctacctgaactggtatcagcagaagcccggcaaggcccctaaactgctgatctatgccgccagctctctccagagcggagtgcctagcagattttctggcagcggctccggcaccgatttcaccctgacaatatccagcctccagcctgaggacttcgccacctactactgccagcagagctacagcacccctctgacctttggacagggcaccaaggtggaaatcaagctcgaggacctgaagaacgtgttcccacctgaggtggccgtgttcgagcctagcgaggccgagatcagccacacccagaaagccaccctcgtgtgcctggctaccggcttctaccccgaccatgtggaactgtcttggtgggtcaacggcaaagaggtgcacagcggcgtgtgtaccgacccccagccactgaaagaacagcccgccctgaacgacagccggtactgcctgagcagcagactgagagtgtccgccaccttctggcagaacccccggaaccacttcagatgccaggtgcagttctacggcctgagcgagaacgacgagtggacccaggacagagccaagcccgtgacccagatcgtgtctgccgaagcctggggcagagccgattgcgacgtgaagctggtggaaaagagcttcgagacagacaccaacctgaacttccagaacctgagcgtgatcggcttcagaatcctgctgctgaaagtggccggctttaacctgctgatgaccctgcggctgtggtccagcagggccaagcgatctggatctggagcaacaaacttctcactactcaaacaagcaggtgacgtggaggagaatcccgggcctactagtgccaccatggactggatttggcgcatccttttccttgtcggcgctgctaccggcgcccattccgggcccatgggatcttggagcgagttttacgatcggctgcacgccattcaccaccggctgtatgctctcggaggaagcgaagctgagctggccgcttttgaaaaagaaattgccgctttcgagtccgagcttcaggcttacaaaggcaaagggaatcctgaggtcgaggccctgagagataccgccgccttcatcagaacccggttgcaggcataccggcacaacggatccggcggcggaggatctggcggaggcggatctgggggcggaggctctttcgaagaggtgcagctggttgaatctggcggaggactggttcagcctggcggatctctgagactgtcttgtgctgccagcggcttcaccttcagctcctacgccatgagctgggtccgacaggctcctggcaaaggactggaatgggtgtccgccatctctggctcaggcggcagcacatattacgccgactctgtgaagggcagattcaccatcagccgggacaacagcaagaacaccctgtacctccagatgaactccctgagagccgaggacaccgccgtgtactattgtgccagactgggctaccccaccaccacactgctgccctttgattattggggccagggcaccctggtcaccgtttcttctacgcgtatccagaaccctgatcctgccgtgtaccagctgcgggatagcaagagcagcgacaagagcgtgtgtctgttcaccgacttcgacagccagaccaacgtgtcccagagcaaggactccgacgtgtacatcaccgataagtgcgtgctggacatgcggagcatggacttcaagagcaactccgccgtggcctggtccaacaagtccgatttcgcctgcgccaacgccttcaacaacagcattatccccgaggacacattcttcccaagccccgagagcagctgcggctttaccagcgagagctaccagcagggcgtgctgagcgccaccatcctgtacgagatcctgctgggcaaggccaccctgtacgccgtgctggtgtctgccctggtgctgatggctatggtcaagcggaaggacagccggggacgcgccaagagaagcggatctggcgtgaagcagaccctgaatttcgacctgctgaagctggctggcgacgtggaatccaacccaggcccttctagaggccatatgaccgagtacaagcccacggtgcgcctcgccacccgcgacgacgtccccagggccgtacgcaccctcgccgccgcgttcgccgactaccccgccacgcgccacaccgtcgatccggaccgccacatcgagcgggtcaccgagctgcaagaactcttcctcacgcgcgtcgggctcgacatcggcaaggtgtgggtcgcggacgacggcgccgcggtggcggtctggaccacgccggagagcgtcgaagcgggggcggtgttcgccgagatcggcccgcgcatggccgagttgagcggttcccggctggccgcgcagcaacagatggaaggcctcctggcgccgcaccggcccaaggagcccgcgtggttcctggccaccgtcggcgtctcgcccgaccaccagggcaagggtctgggcagcgccgtcgtgctccccggagtggaggcggccgagcgcgccggggtgcccgccttcctggagacctccgcgccccgcaacctccccttctacgagcggctcggcttcaccgtcaccgccgacgtcgaggtgcccgaaggaccgcgcacctggtgcatgacccgcaagcccggtgcctga

SEQ ID NO: 39125 - DNA, 3480 bp, synthetic construct
  source 1..3480: mol_type = other DNA
atggccttaccagtgaccgccttgctcctgccgctggccttgctgctccacgccgccaggccggacatccagatgacacagagccctagcagcctgtctgccagcgtgggagacagagtgaccatcacctgtagagccagccagagcatcagcagctacctgaactggtatcagcagaagcccggcaaggcccctaaactgctgatctatgccgccagctctctccagagcggagtgcctagcagattttctggcagcggctccggcaccgatttcaccctgacaatatccagcctccagcctgaggacttcgccacctactactgccagcagagctacagcacccctctgacctttggacagggcaccaaggtggaaatcaagctcgaggacctgaagaacgtgttcccacctgaggtggccgtgttcgagcctagcgaggccgagatcagccacacccagaaagccaccctcgtgtgcctggctaccggcttctaccccgaccatgtggaactgtcttggtgggtcaacggcaaagaggtgcacagcggcgtgtgtaccgacccccagccactgaaagaacagcccgccctgaacgacagccggtactgcctgagcagcagactgagagtgtccgccaccttctggcagaacccccggaaccacttcagatgccaggtgcagttctacggcctgagcgagaacgacgagtggacccaggacagagccaagcccgtgacccagatcgtgtctgccgaagcctggggcagagccgattgcgacgtgaagctggtggaaaagagcttcgagacagacaccaacctgaacttccagaacctgagcgtgatcggcttcagaatcctgctgctgaaagtggccggctttaacctgctgatgaccctgcggctgtggtccagcagggccaagcgatctggatctggagcaacaaacttctcactactcaaacaagcaggtgacgtggaggagaatcccgggcctactagtaccatggactggatttggcgcatccttttccttgtcggcgctgctaccggcgcccattccctgttcaatcaagaggtgcagatccctctgaccgagagctactgtggcccctgtcctaagaactggatctgctacaagaacaactgctaccagttcttcgacgagagcaagaattggtacgagagccaggccagctgcatgagccagaatgccagcctgctgaaggtgtacagcaaagaggaccaggacctgctgaaactggtcaagagcgcccactggatgggccttgtgcacatccccaccaatggctcttggcagtgggaggacggcagcattctgagccctaacctgctgaccatcatcgagatgcagaagggcgactgcgccctgtacgccagcagctttaagggctacatcgagaattgcagcaccccgaacacctacatctgtatgcagagaaccgtttctggcggaggcggctctggaggaggcggaagtggcggcggaggcgacctctttaatcaagaagtccagattccactcaccgaatcctactgcggaccttgtccaaaaaattggatttgttataagaacaactgttatcaattctttgatgagtctaaaaattggtatgagtcccaggcttcctgcatgtctcagaacgcttctctgctgaaagtctactctaaagaagatcaggatctcctgaagctcgtcaagtctgcccattggatggggctcgtccacattcctaccaacggaagctggcaatgggaagatggctccatcctgtctccaaatctgctcacgattattgaaatgcagaaaggggattgtgctctctacgccagctccttcaagggatatattgagaactgtagcacgcccaatacttatatctgtatgcaacggaccgtgggatccggcggcggaggatctggcggaggcggatctgggggcggaggctctttcgaagaggtgcagctggttgaatctggcggaggactggttcagcctggcggatctctgagactgtcttgtgctgccagcggcttcaccttcagctcctacgccatgagctgggtccgacaggctcctggcaaaggactggaatgggtgtccgccatctctggctcaggcggcagcacatattacgccgactctgtgaagggcagattcaccatcagccgggacaacagcaagaacaccctgtacctccagatgaactccctgagagccgaggacaccgccgtgtactattgtgccagactgggctaccccaccaccacactgctgccctttgattattggggccagggcaccctggtcaccgtttcttctacgcgtatccagaaccctgatcctgccgtgtaccagctgcgggatagcaagagcagcgacaagagcgtgtgtctgttcaccgacttcgacagccagaccaacgtgtcccagagcaaggactccgacgtgtacatcaccgataagtgcgtgctggacatgcggagcatggacttcaagagcaactccgccgtggcctggtccaacaagtccgatttcgcctgcgccaacgccttcaacaacagcattatccccgaggacacattcttcccaagccccgagagcagctgcggctttaccagcgagagctaccagcagggcgtgctgagcgccaccatcctgtacgagatcctgctgggcaaggccaccctgtacgccgtgctggtgtctgccctggtgctgatggctatggtcaagcggaaggacagccggggacgcgccaagagaagcggatctggcgtgaagcagaccctgaatttcgacctgctgaagctggctggcgacgtggaatccaacccaggcccttctagaggccatatgaccgagtacaagcccacggtgcgcctcgccacccgcgacgacgtccccagggccgtacgcaccctcgccgccgcgttcgccgactaccccgccacgcgccacaccgtcgatccggaccgccacatcgagcgggtcaccgagctgcaagaactcttcctcacgcgcgtcgggctcgacatcggcaaggtgtgggtcgcggacgacggcgccgcggtggcggtctggaccacgccggagagcgtcgaagcgggggcggtgttcgccgagatcggcccgcgcatggccgagttgagcggttcccggctggccgcgcagcaacagatggaaggcctcctggcgccgcaccggcccaaggagcccgcgtggttcctggccaccgtcggcgtctcgcccgaccaccagggcaagggtctgggcagcgccgtcgtgctccccggagtggaggcggccgagcgcgccggggtgcccgccttcctggagacctccgcgccccgcaacctccccttctacgagcggctcggcttcaccgtcaccgccgacgtcgaggtgcccgaaggaccgcgcacctggtgcatgacccgcaagcccggtgcctga

SEQ ID NO: 39126 - DNA, 1866 bp, synthetic construct
  source 1..1866: mol_type = other DNA
atggccttaccagtgaccgccttgctcctgccgctggccttgctgctccacgccgccaggccggacatccagatgacacagagccctagcagcctgtctgccagcgtgggagacagagtgaccatcacctgtagagccagccagagcatcagcagctacctgaactggtatcagcagaagcccggcaaggcccctaaactgctgatctatgccgccagctctctccagagcggagtgcctagcagattttctggcagcggctccggcaccgatttcaccctgacaatatccagcctccagcctgaggacttcgccacctactactgccagcagagctacagcacccctctgacctttggacagggcaccaaggtggaaatcaagctcgaggacctgaagaacgtgttcccacctgaggtggccgtgttcgagcctagcgaggccgagatcagccacacccagaaagccaccctcgtgtgcctggctaccggcttctaccccgaccatgtggaactgtcttggtgggtcaacggcaaagaggtgcacagcggcgtgtgtaccgacccccagccactgaaagaacagcccgccctgaacgacagccggtactgcctgagcagcagactgagagtgtccgccaccttctggcagaacccccggaaccacttcagatgccaggtgcagttctacggcctgagcgagaacgacgagtggacccaggacagagccaagcccgtgacccagatcgtgtctgccgaagcctggggcagagccgattgcggctttaccagcgagagctaccagcagggcgtgctgagcgccaccaacctgagcgtgatcggcttcagaatcctgctgctgaaagtggccggctttaacctgctgatgaccctgcggctgtggtccagcagggccaagcgatctggatctggagcaacaaacttctcactactcaaacaagcaggtgacgtggaggagaatcccgggcctactagtatggactggatttggcgcatccttttccttgtcggcgctgctaccggcgcgcattccttcgaagaggtgcagctggttgaatctggcggaggactggttcagcctggcggatctctgagactgtcttgtgctgccagcggcttcaccttcagctcctacgccatgagctgggtccgacaggctcctggcaaaggactggaatgggtgtccgccatctctggctcaggcggcagcacatattacgccgactctgtgaagggcagattcaccatcagccgggacaacagcaagaacaccctgtacctccagatgaactccctgagagccgaggacaccgccgtgtactattgtgccagactgggctaccccaccaccacactgctgccctttgattattggggccagggcaccctggtcaccgtttcttctacgcgtatccagaaccctgatcctgccgtgtaccagctgcgggatagcaagagcagcgacaagagcgtgtgtctgttcaccgacttcgacagccagaccaacgtgtcccagagcaaggactccgacgtgtacatcaccgataagtgcgtgctggacatgcggagcatggacttcaagagcaactccgccgtggcctggtccaacaagtccgatttcgcctgcgccaacgccttcaacaacagcattatccccgaggacacattcttcccaagccccgagagcagctgcgacgtgaagctggtggaaaagagcttcgagacagacaccaacctgaacttccagatcctgtacgagatcctgctgggcaaggccaccctgtacgccgtgctggtgtctgccctggtgctgatggctatggtcaagcggaaggacagccgggga

SEQ ID NO: 39127 - DNA, 1878 bp, synthetic construct
  source 1..1878: mol_type = other DNA
atggccttaccagtgaccgccttgctcctgccgctggccttgctgctccacgccgccaggccggacatccagatgacacagagccctagcagcctgtctgccagcgtgggagacagagtgaccatcacctgtagagccagccagagcatcagcagctacctgaactggtatcagcagaagcccggcaaggcccctaaactgctgatctatgccgccagctctctccagagcggagtgcctagcagattttctggcagcggctccggcaccgatttcaccctgacaatatccagcctccagcctgaggacttcgccacctactactgccagcagagctacagcacccctctgacctttggacagggcaccaaggtggaaatcaagctcgagatccagaaccctgatcctgccgtgtaccagctgcgggatagcaagagcagcgacaagagcgtgtgtctgttcaccgacttcgacagccagaccaacgtgtcccagagcaaggactccgacgtgtacatcaccgataagtgcgtgctggacatgcggagcatggacttcaagagcaactccgccgtggcctggtccaacaagtccgatttcgcctgcgccaacgccttcaacaacagcattatccccgaggacacattcttcccaagccccgagagcagctgcgacgtgaagctggtggaaaagagcttcgagacagacaccaacctgaacttccagatcctgtacgagatcctgctgggcaaggccaccctgtacgccgtgctggtgtctgccctggtgctgatggctatggtcaagcggaaggacagccggggacgcgccaagagaagcggatctggcgtgaagcagaccctgaatttcgacctgctgaagctggctggcgacgtggaatccaacccaggccctactagtatggactggatttggcgcatccttttccttgtcggcgctgctaccggcgcgcattccttcgaagaggtgcagctggttgaatctggcggaggactggttcagcctggcggatctctgagactgtcttgtgctgccagcggcttcaccttcagctcctacgccatgagctgggtccgacaggctcctggcaaaggactggaatgggtgtccgccatctctggctcaggcggcagcacatattacgccgactctgtgaagggcagattcaccatcagccgggacaacagcaagaacaccctgtacctccagatgaactccctgagagccgaggacaccgccgtgtactattgtgccagactgggctaccccaccaccacactgctgccctttgattattggggccagggcaccctggtcaccgtttcttctacgcgtgaggacctgaagaacgtgttcccacctgaggtggccgtgttcgagcctagcgaggccgagatcagccacacccagaaagccaccctcgtgtgcctggctaccggcttctaccccgaccatgtggaactgtcttggtgggtcaacggcaaagaggtgcacagcggcgtgtgtaccgacccccagccactgaaagaacagcccgccctgaacgacagccggtactgcctgagcagcagactgagagtgtccgccaccttctggcagaacccccggaaccacttcagatgccaggtgcagttctacggcctgagcgagaacgacgagtggacccaggacagagccaagcccgtgacccagatcgtgtctgccgaagcctggggcagagccgattgcggctttaccagcgagagctaccagcagggcgtgctgagcgccaccaacctgagcgtgatcggcttcagaatcctgctgctgaaagtggccggctttaacctgctgatgaccctgcggctgtggtccagc

SEQ ID NO: 39128 - DNA, 2271 bp, synthetic construct
  source 1..2271: mol_type = other DNA
atggccttaccagtgaccgccttgctcctgccgctggccttgctgctccacgccgccaggccggaagtgcagctggttgaatctggcggaggactggttcagcctggcggatctctgagactgtcttgtgccgccagcggcttcagcttcagcgacttttggatgagctgggtccgacaggcccctggcaaaggacttgaatgggtcgccacaatcagccaggccggcagcgagaaggactacgtggactctgtgaagggcagattcaccatcagccgggacaacgccaagaagtccctgtacctccagatgaacagcctgagagccgaggacaccgccgtgtactattgtgcctctggcgtgtacagcttcgactacagaggccagggcaccctggtcacagtctcttctggtaccggcggaggcggatctggcggcggaggtagcggtggcggaggatctgaattcgacatccagatgacacagagccctagcagcctgtctgccagcgtgggagacagagtgaccatcacctgtagagccagccagagcatcagcagctacctgaactggtatcagcagaagcccggcaaggcccctaaactgctgatctatgccgccagctctctccagagcggagtgcctagcagattttctggcagcggctccggcaccgatttcaccctgacaatatccagcctccagcctgaggacttcgccacctactactgccagcagagctacagcacccctctgacctttggacagggcaccaaggtggaaatcaagctcgaggacctgaagaacgtgttcccacctgaggtggccgtgttcgagcctagcgaggccgagatcagccacacccagaaagccaccctcgtgtgcctggctaccggcttctaccccgaccatgtggaactgtcttggtgggtcaacggcaaagaggtgcacagcggcgtgtgtaccgacccccagccactgaaagaacagcccgccctgaacgacagccggtactgcctgagcagcagactgagagtgtccgccaccttctggcagaacccccggaaccacttcagatgccaggtgcagttctacggcctgagcgagaacgacgagtggacccaggacagagccaagcccgtgacccagatcgtgtctgccgaagcctggggcagagccgattgcggctttaccagcgagagctaccagcagggcgtgctgagcgccaccaacctgagcgtgatcggcttcagaatcctgctgctgaaagtggccggctttaacctgctgatgaccctgcggctgtggtccagcagggccaagcgatctggatctggagcaacaaacttctcactactcaaacaagcaggtgacgtggaggagaatcccgggcctactagtatggactggatttggcgcatccttttccttgtcggcgctgctaccggcgcgcattccttcgaagaggtgcagctggttgaatctggcggaggactggttcagcctggcggatctctgagactgtcttgtgctgccagcggcttcaccttcagctcctacgccatgagctgggtccgacaggctcctggcaaaggactggaatgggtgtccgccatctctggctcaggcggcagcacatattacgccgactctgtgaagggcagattcaccatcagccgggacaacagcaagaacaccctgtacctccagatgaactccctgagagccgaggacaccgccgtgtactattgtgccagactgggctaccccaccaccacactgctgccctttgattattggggccagggcaccctggtcaccgtttcttctacgcgtatccagaaccctgatcctgccgtgtaccagctgcgggatagcaagagcagcgacaagagcgtgtgtctgttcaccgacttcgacagccagaccaacgtgtcccagagcaaggactccgacgtgtacatcaccgataagtgcgtgctggacatgcggagcatggacttcaagagcaactccgccgtggcctggtccaacaagtccgatttcgcctgcgccaacgccttcaacaacagcattatccccgaggacacattcttcccaagccccgagagcagctgcgacgtgaagctggtggaaaagagcttcgagacagacaccaacctgaacttccagatcctgtacgagatcctgctgggcaaggccaccctgtacgccgtgctggtgtctgccctggtgctgatggctatggtcaagcggaaggacagccgggga

SEQ ID NO: 39129 - DNA, 2283 bp, synthetic construct
  source 1..2283: mol_type = other DNA
atggccttaccagtgaccgccttgctcctgccgctggccttgctgctccacgccgccaggccggaagtgcagctggttgaatctggcggaggactggttcagcctggcggatctctgagactgtcttgtgccgccagcggcttcagcttcagcgacttttggatgagctgggtccgacaggcccctggcaaaggacttgaatgggtcgccacaatcagccaggccggcagcgagaaggactacgtggactctgtgaagggcagattcaccatcagccgggacaacgccaagaagtccctgtacctccagatgaacagcctgagagccgaggacaccgccgtgtactattgtgcctctggcgtgtacagcttcgactacagaggccagggcaccctggtcacagtctcttctggtaccggcggaggcggatctggcggcggaggtagcggtggcggaggatctgaattcgacatccagatgacacagagccctagcagcctgtctgccagcgtgggagacagagtgaccatcacctgtagagccagccagagcatcagcagctacctgaactggtatcagcagaagcccggcaaggcccctaaactgctgatctatgccgccagctctctccagagcggagtgcctagcagattttctggcagcggctccggcaccgatttcaccctgacaatatccagcctccagcctgaggacttcgccacctactactgccagcagagctacagcacccctctgacctttggacagggcaccaaggtggaaatcaagctcgagatccagaaccctgatcctgccgtgtaccagctgcgggatagcaagagcagcgacaagagcgtgtgtctgttcaccgacttcgacagccagaccaacgtgtcccagagcaaggactccgacgtgtacatcaccgataagtgcgtgctggacatgcggagcatggacttcaagagcaactccgccgtggcctggtccaacaagtccgatttcgcctgcgccaacgccttcaacaacagcattatccccgaggacacattcttcccaagccccgagagcagctgcgacgtgaagctggtggaaaagagcttcgagacagacaccaacctgaacttccagatcctgtacgagatcctgctgggcaaggccaccctgtacgccgtgctggtgtctgccctggtgctgatggctatggtcaagcggaaggacagccggggacgcgccaagagaagcggatctggcgtgaagcagaccctgaatttcgacctgctgaagctggctggcgacgtggaatccaacccaggccctactagtatggactggatttggcgcatccttttccttgtcggcgctgctaccggcgcgcattccttcgaagaggtgcagctggttgaatctggcggaggactggttcagcctggcggatctctgagactgtcttgtgctgccagcggcttcaccttcagctcctacgccatgagctgggtccgacaggctcctggcaaaggactggaatgggtgtccgccatctctggctcaggcggcagcacatattacgccgactctgtgaagggcagattcaccatcagccgggacaacagcaagaacaccctgtacctccagatgaactccctgagagccgaggacaccgccgtgtactattgtgccagactgggctaccccaccaccacactgctgccctttgattattggggccagggcaccctggtcaccgtttcttctacgcgtgaggacctgaagaacgtgttcccacctgaggtggccgtgttcgagcctagcgaggccgagatcagccacacccagaaagccaccctcgtgtgcctggctaccggcttctaccccgaccatgtggaactgtcttggtgggtcaacggcaaagaggtgcacagcggcgtgtgtaccgacccccagccactgaaagaacagcccgccctgaacgacagccggtactgcctgagcagcagactgagagtgtccgccaccttctggcagaacccccggaaccacttcagatgccaggtgcagttctacggcctgagcgagaacgacgagtggacccaggacagagccaagcccgtgacccagatcgtgtctgccgaagcctggggcagagccgattgcggctttaccagcgagagctaccagcagggcgtgctgagcgccaccaacctgagcgtgatcggcttcagaatcctgctgctgaaagtggccggctttaacctgctgatgaccctgcggctgtggtccagc

SEQ ID NO: 39130 - DNA, 2682 bp, synthetic construct
  source 1..2682: mol_type = other DNA
atggccttaccagtgaccgccttgctcctgccgctggccttgctgctccacgccgccaggccggaagtgcagctggttgaatctggcggaggactggttcagcctggcggatctctgagactgtcttgtgccgccagcggcttcagcttcagcgacttttggatgagctgggtccgacaggcccctggcaaaggacttgaatgggtcgccacaatcagccaggccggcagcgagaaggactacgtggactctgtgaagggcagattcaccatcagccgggacaacgccaagaagtccctgtacctccagatgaacagcctgagagccgaggacaccgccgtgtactattgtgcctctggcgtgtacagcttcgactacagaggccagggcaccctggtcacagtctcttctggtaccggcggaggcggatctggcggcggaggtagcggtggcggaggatctgaattcgacatccagatgacacagagccctagcagcctgtctgccagcgtgggagacagagtgaccatcacctgtagagccagccagagcatcagcagctacctgaactggtatcagcagaagcccggcaaggcccctaaactgctgatctatgccgccagctctctccagagcggagtgcctagcagattttctggcagcggctccggcaccgatttcaccctgacaatatccagcctccagcctgaggacttcgccacctactactgccagcagagctacagcacccctctgacctttggacagggcaccaaggtggaaatcaagctcgaggacctgaagaacgtgttcccacctgaggtggccgtgttcgagcctagcgaggccgagatcagccacacccagaaagccaccctcgtgtgcctggctaccggcttctaccccgaccatgtggaactgtcttggtgggtcaacggcaaagaggtgcacagcggcgtgtgtaccgacccccagccactgaaagaacagcccgccctgaacgacagccggtactgcctgagcagcagactgagagtgtccgccaccttctggcagaacccccggaaccacttcagatgccaggtgcagttctacggcctgagcgagaacgacgagtggacccaggacagagccaagcccgtgacccagatcgtgtctgccgaagcctggggcagagccgattgcggctttaccagcgagagctaccagcagggcgtgctgagcgccaccaacctgagcgtgatcggcttcagaatcctgctgctgaaagtggccggctttaacctgctgatgaccctgcggctgtggtccagcagggccaagcgatctggatctggagcaacaaacttctcactactcaaacaagcaggtgacgtggaggagaatcccgggcctactagtatggactggatttggcgcatccttttccttgtcggcgctgctaccggcgcgcattccgggccccagctccagctgcaagagtctggacctggcctggtcaagcctagcgagacactgagcctgacctgtaccgtgtccggcgatagcatcagcagcggcgattactactggggctggatcagacagcctcctggcaaaggactggaatggatcggccacatctactacagcggcgtgacctactacaaccccagcctgaagtccagagtgaccatcagcgtggacaccagccggaaccagttctccctgaagctgtctagcgtgacagccgccgataccgccgtgtactactgcaccagagaggacagcagcaactggcggagtagaggccagggaacactggtcacagttagctctggatccggcggaggcggaagtggaggcggaggatctggcggcggaggctctttcgaagaggtgcagctggttgaatctggcggaggactggttcagcctggcggatctctgagactgtcttgtgctgccagcggcttcaccttcagctcctacgccatgagctgggtccgacaggctcctggcaaaggactggaatgggtgtccgccatctctggctcaggcggcagcacatattacgccgactctgtgaagggcagattcaccatcagccgggacaacagcaagaacaccctgtacctccagatgaactccctgagagccgaggacaccgccgtgtactattgtgccagactgggctaccccaccaccacactgctgccctttgattattggggccagggcaccctggtcaccgtttcttctacgcgtatccagaaccctgatcctgccgtgtaccagctgcgggatagcaagagcagcgacaagagcgtgtgtctgttcaccgacttcgacagccagaccaacgtgtcccagagcaaggactccgacgtgtacatcaccgataagtgcgtgctggacatgcggagcatggacttcaagagcaactccgccgtggcctggtccaacaagtccgatttcgcctgcgccaacgccttcaacaacagcattatccccgaggacacattcttcccaagccccgagagcagctgcgacgtgaagctggtggaaaagagcttcgagacagacaccaacctgaacttccagatcctgtacgagatcctgctgggcaaggccaccctgtacgccgtgctggtgtctgccctggtgctgatggctatggtcaagcggaaggacagccgggga

SEQ ID NO: 39131 - DNA, 2694 bp, synthetic construct
  source 1..2694: mol_type = other DNA
atggccttaccagtgaccgccttgctcctgccgctggccttgctgctccacgccgccaggccggaagtgcagctggttgaatctggcggaggactggttcagcctggcggatctctgagactgtcttgtgccgccagcggcttcagcttcagcgacttttggatgagctgggtccgacaggcccctggcaaaggacttgaatgggtcgccacaatcagccaggccggcagcgagaaggactacgtggactctgtgaagggcagattcaccatcagccgggacaacgccaagaagtccctgtacctccagatgaacagcctgagagccgaggacaccgccgtgtactattgtgcctctggcgtgtacagcttcgactacagaggccagggcaccctggtcacagtctcttctggtaccggcggaggcggatctggcggcggaggtagcggtggcggaggatctgaattcgacatccagatgacacagagccctagcagcctgtctgccagcgtgggagacagagtgaccatcacctgtagagccagccagagcatcagcagctacctgaactggtatcagcagaagcccggcaaggcccctaaactgctgatctatgccgccagctctctccagagcggagtgcctagcagattttctggcagcggctccggcaccgatttcaccctgacaatatccagcctccagcctgaggacttcgccacctactactgccagcagagctacagcacccctctgacctttggacagggcaccaaggtggaaatcaagctcgagatccagaaccctgatcctgccgtgtaccagctgcgggatagcaagagcagcgacaagagcgtgtgtctgttcaccgacttcgacagccagaccaacgtgtcccagagcaaggactccgacgtgtacatcaccgataagtgcgtgctggacatgcggagcatggacttcaagagcaactccgccgtggcctggtccaacaagtccgatttcgcctgcgccaacgccttcaacaacagcattatccccgaggacacattcttcccaagccccgagagcagctgcgacgtgaagctggtggaaaagagcttcgagacagacaccaacctgaacttccagatcctgtacgagatcctgctgggcaaggccaccctgtacgccgtgctggtgtctgccctggtgctgatggctatggtcaagcggaaggacagccggggacgcgccaagagaagcggatctggcgtgaagcagaccctgaatttcgacctgctgaagctggctggcgacgtggaatccaacccaggccctactagtatggactggatttggcgcatccttttccttgtcggcgctgctaccggcgcgcattccgggccccagctccagctgcaagagtctggacctggcctggtcaagcctagcgagacactgagcctgacctgtaccgtgtccggcgatagcatcagcagcggcgattactactggggctggatcagacagcctcctggcaaaggactggaatggatcggccacatctactacagcggcgtgacctactacaaccccagcctgaagtccagagtgaccatcagcgtggacaccagccggaaccagttctccctgaagctgtctagcgtgacagccgccgataccgccgtgtactactgcaccagagaggacagcagcaactggcggagtagaggccagggaacactggtcacagttagctctggatccggcggaggcggaagtggaggcggaggatctggcggcggaggctctttcgaagaggtgcagctggttgaatctggcggaggactggttcagcctggcggatctctgagactgtcttgtgctgccagcggcttcaccttcagctcctacgccatgagctgggtccgacaggctcctggcaaaggactggaatgggtgtccgccatctctggctcaggcggcagcacatattacgccgactctgtgaagggcagattcaccatcagccgggacaacagcaagaacaccctgtacctccagatgaactccctgagagccgaggacaccgccgtgtactattgtgccagactgggctaccccaccaccacactgctgccctttgattattggggccagggcaccctggtcaccgtttcttctacgcgtgaggacctgaagaacgtgttcccacctgaggtggccgtgttcgagcctagcgaggccgagatcagccacacccagaaagccaccctcgtgtgcctggctaccggcttctaccccgaccatgtggaactgtcttggtgggtcaacggcaaagaggtgcacagcggcgtgtgtaccgacccccagccactgaaagaacagcccgccctgaacgacagccggtactgcctgagcagcagactgagagtgtccgccaccttctggcagaacccccggaaccacttcagatgccaggtgcagttctacggcctgagcgagaacgacgagtggacccaggacagagccaagcccgtgacccagatcgtgtctgccgaagcctggggcagagccgattgcggctttaccagcgagagctaccagcagggcgtgctgagcgccaccaacctgagcgtgatcggcttcagaatcctgctgctgaaagtggccggctttaacctgctgatgaccctgcggctgtggtccagc

SEQ ID NO: 39132 - DNA, 2178 bp, synthetic construct
  source 1..2178: mol_type = other DNA
atggccttaccagtgaccgccttgctcctgccgctggccttgctgctccacgccgccaggccggacatccagatgacacagagccctagcagcctgtctgccagcgtgggagacagagtgaccatcacctgtagagccagccagagcatcagcagctacctgaactggtatcagcagaagcccggcaaggcccctaaactgctgatctatgccgccagctctctccagagcggagtgcctagcagattttctggcagcggctccggcaccgatttcaccctgacaatatccagcctccagcctgaggacttcgccacctactactgccagcagagctacagcacccctctgacctttggacagggcaccaaggtggaaatcaagctcgaggacctgaagaacgtgttcccacctgaggtggccgtgttcgagcctagcgaggccgagatcagccacacccagaaagccaccctcgtgtgcctggctaccggcttctaccccgaccatgtggaactgtcttggtgggtcaacggcaaagaggtgcacagcggcgtgtgtaccgacccccagccactgaaagaacagcccgccctgaacgacagccggtactgcctgagcagcagactgagagtgtccgccaccttctggcagaacccccggaaccacttcagatgccaggtgcagttctacggcctgagcgagaacgacgagtggacccaggacagagccaagcccgtgacccagatcgtgtctgccgaagcctggggcagagccgatgatgtgattaagatccactggcaggaaaagaagtccaacaccatcctgggcagccaggaaggcaacaccatgaagaccaacgacacctacatgaagttcagctggctgaccgtgcccgagaagtccctggacaaagaacacagatgcatcgtgcggcacgaaaacaacaagaacggcgtggaccaggaaatcatcttcccacccatcaagaccgatgtgattacaatggaccccaaggacaactgctccaaggacgccaacgataccctgctgctccagctgaccaacaccagcgcctactacatgtacttgttgctgctgctgaagtccgtggtgtacttcgccatcatcacatgctgcctgctgatggctatggtcaagcggaaggacagccggggaagggccaagcgatctggatctggagcaacaaacttctcactactcaaacaagcaggtgacgtggaggagaatcccgggcctactagtatggactggatttggcgcatccttttccttgtcggcgctgctaccggcgcgcattccttcgaagaggtgcagctggttgaatctggcggaggactggttcagcctggcggatctctgagactgtcttgtgctgccagcggcttcaccttcagctcctacgccatgagctgggtccgacaggctcctggcaaaggactggaatgggtgtccgccatctctggctcaggcggcagcacatattacgccgactctgtgaagggcagattcaccatcagccgggacaacagcaagaacaccctgtacctccagatgaactccctgagagccgaggacaccgccgtgtactattgtgccagactgggctaccccaccaccacactgctgccctttgattattggggccagggcaccctggtcaccgtttcttctacgcgtatccagaaccctgatcctgccgtgtaccagctgcgggatagcaagagcagcgacaagagcgtgtgtctgttcaccgacttcgacagccagaccaacgtgtcccagagcaaggactccgacgtgtacatcaccgataagtgcgtgctggacatgcggagcatggacttcaagagcaactccgccgtggcctggtccaacaagtccgatttcgcctgcgccaacgccttcaacaacagcattatccccgaggacacattcttcccaagccccgagagcagcgactccaccgaccacgtgaagcccaaagagacagagaacaccaagcagcccagcaagagctgccacaagcccaaggccatcgtgcacaccgagaaagtgaacatgatgagcctgaccgtgctgggcctgcggatgctgttcgccaaaaccgtggccgtgaacttcctgctgaccgccaagctgttcttcctcctcaccgcc

SEQ ID NO: 39133 - DNA, 2190 bp, synthetic construct
  source 1..2190: mol_type = other DNA
atggccttaccagtgaccgccttgctcctgccgctggccttgctgctccacgccgccaggccggacatccagatgacacagagccctagcagcctgtctgccagcgtgggagacagagtgaccatcacctgtagagccagccagagcatcagcagctacctgaactggtatcagcagaagcccggcaaggcccctaaactgctgatctatgccgccagctctctccagagcggagtgcctagcagattttctggcagcggctccggcaccgatttcaccctgacaatatccagcctccagcctgaggacttcgccacctactactgccagcagagctacagcacccctctgacctttggacagggcaccaaggtggaaatcaagctcgagatccagaaccctgatcctgccgtgtaccagctgcgggatagcaagagcagcgacaagagcgtgtgtctgttcaccgacttcgacagccagaccaacgtgtcccagagcaaggactccgacgtgtacatcaccgataagtgcgtgctggacatgcggagcatggacttcaagagcaactccgccgtggcctggtccaacaagtccgatttcgcctgcgccaacgccttcaacaacagcattatccccgaggacacattcttcccaagccccgagagcagcgactccaccgaccacgtgaagcccaaagagacagagaacaccaagcagcccagcaagagctgccacaagcccaaggccatcgtgcacaccgagaaagtgaacatgatgagcctgaccgtgctgggcctgcggatgctgttcgccaaaaccgtggccgtgaacttcctgctgaccgccaagctgttcttcctcctcaccgcccgcgccaagagaagcggatctggcgtgaagcagaccctgaatttcgacctgctgaagctggctggcgacgtggaatccaacccaggccctactagtatggactggatttggcgcatccttttccttgtcggcgctgctaccggcgcgcattccttcgaagaggtgcagctggttgaatctggcggaggactggttcagcctggcggatctctgagactgtcttgtgctgccagcggcttcaccttcagctcctacgccatgagctgggtccgacaggctcctggcaaaggactggaatgggtgtccgccatctctggctcaggcggcagcacatattacgccgactctgtgaagggcagattcaccatcagccgggacaacagcaagaacaccctgtacctccagatgaactccctgagagccgaggacaccgccgtgtactattgtgccagactgggctaccccaccaccacactgctgccctttgattattggggccagggcaccctggtcaccgtttcttctacgcgtgaggacctgaagaacgtgttcccacctgaggtggccgtgttcgagcctagcgaggccgagatcagccacacccagaaagccaccctcgtgtgcctggctaccggcttctaccccgaccatgtggaactgtcttggtgggtcaacggcaaagaggtgcacagcggcgtgtgtaccgacccccagccactgaaagaacagcccgccctgaacgacagccggtactgcctgagcagcagactgagagtgtccgccaccttctggcagaacccccggaaccacttcagatgccaggtgcagttctacggcctgagcgagaacgacgagtggacccaggacagagccaagcccgtgacccagatcgtgtctgccgaagcctggggcagagccgatgatgtgattaagatccactggcaggaaaagaagtccaacaccatcctgggcagccaggaaggcaacaccatgaagaccaacgacacctacatgaagttcagctggctgaccgtgcccgagaagtccctggacaaagaacacagatgcatcgtgcggcacgaaaacaacaagaacggcgtggaccaggaaatcatcttcccacccatcaagaccgatgtgattacaatggaccccaaggacaactgctccaaggacgccaacgataccctgctgctccagctgaccaacaccagcgcctactacatgtacttgttgctgctgctgaagtccgtggtgtacttcgccatcatcacatgctgcctgctgatggctatggtcaagcggaaggacagccgggga

SEQ ID NO: 39134 - DNA, 2583 bp, synthetic construct
  source 1..2583: mol_type = other DNA
atggccttaccagtgaccgccttgctcctgccgctggccttgctgctccacgccgccaggccggaagtgcagctggttgaatctggcggaggactggttcagcctggcggatctctgagactgtcttgtgccgccagcggcttcagcttcagcgacttttggatgagctgggtccgacaggcccctggcaaaggacttgaatgggtcgccacaatcagccaggccggcagcgagaaggactacgtggactctgtgaagggcagattcaccatcagccgggacaacgccaagaagtccctgtacctccagatgaacagcctgagagccgaggacaccgccgtgtactattgtgcctctggcgtgtacagcttcgactacagaggccagggcaccctggtcacagtctcttctggtaccggcggaggcggatctggcggcggaggtagcggtggcggaggatctgaattcgacatccagatgacacagagccctagcagcctgtctgccagcgtgggagacagagtgaccatcacctgtagagccagccagagcatcagcagctacctgaactggtatcagcagaagcccggcaaggcccctaaactgctgatctatgccgccagctctctccagagcggagtgcctagcagattttctggcagcggctccggcaccgatttcaccctgacaatatccagcctccagcctgaggacttcgccacctactactgccagcagagctacagcacccctctgacctttggacagggcaccaaggtggaaatcaagctcgaggacctgaagaacgtgttcccacctgaggtggccgtgttcgagcctagcgaggccgagatcagccacacccagaaagccaccctcgtgtgcctggctaccggcttctaccccgaccatgtggaactgtcttggtgggtcaacggcaaagaggtgcacagcggcgtgtgtaccgacccccagccactgaaagaacagcccgccctgaacgacagccggtactgcctgagcagcagactgagagtgtccgccaccttctggcagaacccccggaaccacttcagatgccaggtgcagttctacggcctgagcgagaacgacgagtggacccaggacagagccaagcccgtgacccagatcgtgtctgccgaagcctggggcagagccgatgatgtgattaagatccactggcaggaaaagaagtccaacaccatcctgggcagccaggaaggcaacaccatgaagaccaacgacacctacatgaagttcagctggctgaccgtgcccgagaagtccctggacaaagaacacagatgcatcgtgcggcacgaaaacaacaagaacggcgtggaccaggaaatcatcttcccacccatcaagaccgatgtgattacaatggaccccaaggacaactgctccaaggacgccaacgataccctgctgctccagctgaccaacaccagcgcctactacatgtacttgttgctgctgctgaagtccgtggtgtacttcgccatcatcacatgctgcctgctgatggctatggtcaagcggaaggacagccggggaagggccaagcgatctggatctggagcaacaaacttctcactactcaaacaagcaggtgacgtggaggagaatcccgggcctactagtatggactggatttggcgcatccttttccttgtcggcgctgctaccggcgcgcattccttcgaagaggtgcagctggttgaatctggcggaggactggttcagcctggcggatctctgagactgtcttgtgctgccagcggcttcaccttcagctcctacgccatgagctgggtccgacaggctcctggcaaaggactggaatgggtgtccgccatctctggctcaggcggcagcacatattacgccgactctgtgaagggcagattcaccatcagccgggacaacagcaagaacaccctgtacctccagatgaactccctgagagccgaggacaccgccgtgtactattgtgccagactgggctaccccaccaccacactgctgccctttgattattggggccagggcaccctggtcaccgtttcttctacgcgtatccagaaccctgatcctgccgtgtaccagctgcgggatagcaagagcagcgacaagagcgtgtgtctgttcaccgacttcgacagccagaccaacgtgtcccagagcaaggactccgacgtgtacatcaccgataagtgcgtgctggacatgcggagcatggacttcaagagcaactccgccgtggcctggtccaacaagtccgatttcgcctgcgccaacgccttcaacaacagcattatccccgaggacacattcttcccaagccccgagagcagcgactccaccgaccacgtgaagcccaaagagacagagaacaccaagcagcccagcaagagctgccacaagcccaaggccatcgtgcacaccgagaaagtgaacatgatgagcctgaccgtgctgggcctgcggatgctgttcgccaaaaccgtggccgtgaacttcctgctgaccgccaagctgttcttcctcctcaccgcc

SEQ ID NO: 39135 - DNA, 2595 bp, synthetic construct
  source 1..2595: mol_type = other DNA
atggccttaccagtgaccgccttgctcctgccgctggccttgctgctccacgccgccaggccggaagtgcagctggttgaatctggcggaggactggttcagcctggcggatctctgagactgtcttgtgccgccagcggcttcagcttcagcgacttttggatgagctgggtccgacaggcccctggcaaaggacttgaatgggtcgccacaatcagccaggccggcagcgagaaggactacgtggactctgtgaagggcagattcaccatcagccgggacaacgccaagaagtccctgtacctccagatgaacagcctgagagccgaggacaccgccgtgtactattgtgcctctggcgtgtacagcttcgactacagaggccagggcaccctggtcacagtctcttctggtaccggcggaggcggatctggcggcggaggtagcggtggcggaggatctgaattcgacatccagatgacacagagccctagcagcctgtctgccagcgtgggagacagagtgaccatcacctgtagagccagccagagcatcagcagctacctgaactggtatcagcagaagcccggcaaggcccctaaactgctgatctatgccgccagctctctccagagcggagtgcctagcagattttctggcagcggctccggcaccgatttcaccctgacaatatccagcctccagcctgaggacttcgccacctactactgccagcagagctacagcacccctctgacctttggacagggcaccaaggtggaaatcaagctcgagatccagaaccctgatcctgccgtgtaccagctgcgggatagcaagagcagcgacaagagcgtgtgtctgttcaccgacttcgacagccagaccaacgtgtcccagagcaaggactccgacgtgtacatcaccgataagtgcgtgctggacatgcggagcatggacttcaagagcaactccgccgtggcctggtccaacaagtccgatttcgcctgcgccaacgccttcaacaacagcattatccccgaggacacattcttcccaagccccgagagcagcgactccaccgaccacgtgaagcccaaagagacagagaacaccaagcagcccagcaagagctgccacaagcccaaggccatcgtgcacaccgagaaagtgaacatgatgagcctgaccgtgctgggcctgcggatgctgttcgccaaaaccgtggccgtgaacttcctgctgaccgccaagctgttcttcctcctcaccgcccgcgccaagagaagcggatctggcgtgaagcagaccctgaatttcgacctgctgaagctggctggcgacgtggaatccaacccaggccctactagtatggactggatttggcgcatccttttccttgtcggcgctgctaccggcgcgcattccttcgaagaggtgcagctggttgaatctggcggaggactggttcagcctggcggatctctgagactgtcttgtgctgccagcggcttcaccttcagctcctacgccatgagctgggtccgacaggctcctggcaaaggactggaatgggtgtccgccatctctggctcaggcggcagcacatattacgccgactctgtgaagggcagattcaccatcagccgggacaacagcaagaacaccctgtacctccagatgaactccctgagagccgaggacaccgccgtgtactattgtgccagactgggctaccccaccaccacactgctgccctttgattattggggccagggcaccctggtcaccgtttcttctacgcgtgaggacctgaagaacgtgttcccacctgaggtggccgtgttcgagcctagcgaggccgagatcagccacacccagaaagccaccctcgtgtgcctggctaccggcttctaccccgaccatgtggaactgtcttggtgggtcaacggcaaagaggtgcacagcggcgtgtgtaccgacccccagccactgaaagaacagcccgccctgaacgacagccggtactgcctgagcagcagactgagagtgtccgccaccttctggcagaacccccggaaccacttcagatgccaggtgcagttctacggcctgagcgagaacgacgagtggacccaggacagagccaagcccgtgacccagatcgtgtctgccgaagcctggggcagagccgatgatgtgattaagatccactggcaggaaaagaagtccaacaccatcctgggcagccaggaaggcaacaccatgaagaccaacgacacctacatgaagttcagctggctgaccgtgcccgagaagtccctggacaaagaacacagatgcatcgtgcggcacgaaaacaacaagaacggcgtggaccaggaaatcatcttcccacccatcaagaccgatgtgattacaatggaccccaaggacaactgctccaaggacgccaacgataccctgctgctccagctgaccaacaccagcgcctactacatgtacttgttgctgctgctgaagtccgtggtgtacttcgccatcatcacatgctgcctgctgatggctatggtcaagcggaaggacagccgggga

SEQ ID NO: 39136 - DNA, 2994 bp, synthetic construct
  source 1..2994: mol_type = other DNA
atggccttaccagtgaccgccttgctcctgccgctggccttgctgctccacgccgccaggccggaagtgcagctggttgaatctggcggaggactggttcagcctggcggatctctgagactgtcttgtgccgccagcggcttcagcttcagcgacttttggatgagctgggtccgacaggcccctggcaaaggacttgaatgggtcgccacaatcagccaggccggcagcgagaaggactacgtggactctgtgaagggcagattcaccatcagccgggacaacgccaagaagtccctgtacctccagatgaacagcctgagagccgaggacaccgccgtgtactattgtgcctctggcgtgtacagcttcgactacagaggccagggcaccctggtcacagtctcttctggtaccggcggaggcggatctggcggcggaggtagcggtggcggaggatctgaattcgacatccagatgacacagagccctagcagcctgtctgccagcgtgggagacagagtgaccatcacctgtagagccagccagagcatcagcagctacctgaactggtatcagcagaagcccggcaaggcccctaaactgctgatctatgccgccagctctctccagagcggagtgcctagcagattttctggcagcggctccggcaccgatttcaccctgacaatatccagcctccagcctgaggacttcgccacctactactgccagcagagctacagcacccctctgacctttggacagggcaccaaggtggaaatcaagctcgaggacctgaagaacgtgttcccacctgaggtggccgtgttcgagcctagcgaggccgagatcagccacacccagaaagccaccctcgtgtgcctggctaccggcttctaccccgaccatgtggaactgtcttggtgggtcaacggcaaagaggtgcacagcggcgtgtgtaccgacccccagccactgaaagaacagcccgccctgaacgacagccggtactgcctgagcagcagactgagagtgtccgccaccttctggcagaacccccggaaccacttcagatgccaggtgcagttctacggcctgagcgagaacgacgagtggacccaggacagagccaagcccgtgacccagatcgtgtctgccgaagcctggggcagagccgatgatgtgattaagatccactggcaggaaaagaagtccaacaccatcctgggcagccaggaaggcaacaccatgaagaccaacgacacctacatgaagttcagctggctgaccgtgcccgagaagtccctggacaaagaacacagatgcatcgtgcggcacgaaaacaacaagaacggcgtggaccaggaaatcatcttcccacccatcaagaccgatgtgattacaatggaccccaaggacaactgctccaaggacgccaacgataccctgctgctccagctgaccaacaccagcgcctactacatgtacttgttgctgctgctgaagtccgtggtgtacttcgccatcatcacatgctgcctgctgatggctatggtcaagcggaaggacagccggggaagggccaagcgatctggatctggagcaacaaacttctcactactcaaacaagcaggtgacgtggaggagaatcccgggcctactagtatggactggatttggcgcatccttttccttgtcggcgctgctaccggcgcgcattccgggccccagctccagctgcaagagtctggacctggcctggtcaagcctagcgagacactgagcctgacctgtaccgtgtccggcgatagcatcagcagcggcgattactactggggctggatcagacagcctcctggcaaaggactggaatggatcggccacatctactacagcggcgtgacctactacaaccccagcctgaagtccagagtgaccatcagcgtggacaccagccggaaccagttctccctgaagctgtctagcgtgacagccgccgataccgccgtgtactactgcaccagagaggacagcagcaactggcggagtagaggccagggaacactggtcacagttagctctggatccggcggaggcggaagtggaggcggaggatctggcggcggaggctctttcgaagaggtgcagctggttgaatctggcggaggactggttcagcctggcggatctctgagactgtcttgtgctgccagcggcttcaccttcagctcctacgccatgagctgggtccgacaggctcctggcaaaggactggaatgggtgtccgccatctctggctcaggcggcagcacatattacgccgactctgtgaagggcagattcaccatcagccgggacaacagcaagaacaccctgtacctccagatgaactccctgagagccgaggacaccgccgtgtactattgtgccagactgggctaccccaccaccacactgctgccctttgattattggggccagggcaccctggtcaccgtttcttctacgcgtatccagaaccctgatcctgccgtgtaccagctgcgggatagcaagagcagcgacaagagcgtgtgtctgttcaccgacttcgacagccagaccaacgtgtcccagagcaaggactccgacgtgtacatcaccgataagtgcgtgctggacatgcggagcatggacttcaagagcaactccgccgtggcctggtccaacaagtccgatttcgcctgcgccaacgccttcaacaacagcattatccccgaggacacattcttcccaagccccgagagcagcgactccaccgaccacgtgaagcccaaagagacagagaacaccaagcagcccagcaagagctgccacaagcccaaggccatcgtgcacaccgagaaagtgaacatgatgagcctgaccgtgctgggcctgcggatgctgttcgccaaaaccgtggccgtgaacttcctgctgaccgccaagctgttcttcctcctcaccgcc

SEQ ID NO: 39137 - DNA, 3006 bp, synthetic construct
  source 1..3006: mol_type = other DNA
atggccttaccagtgaccgccttgctcctgccgctggccttgctgctccacgccgccaggccggaagtgcagctggttgaatctggcggaggactggttcagcctggcggatctctgagactgtcttgtgccgccagcggcttcagcttcagcgacttttggatgagctgggtccgacaggcccctggcaaaggacttgaatgggtcgccacaatcagccaggccggcagcgagaaggactacgtggactctgtgaagggcagattcaccatcagccgggacaacgccaagaagtccctgtacctccagatgaacagcctgagagccgaggacaccgccgtgtactattgtgcctctggcgtgtacagcttcgactacagaggccagggcaccctggtcacagtctcttctggtaccggcggaggcggatctggcggcggaggtagcggtggcggaggatctgaattcgacatccagatgacacagagccctagcagcctgtctgccagcgtgggagacagagtgaccatcacctgtagagccagccagagcatcagcagctacctgaactggtatcagcagaagcccggcaaggcccctaaactgctgatctatgccgccagctctctccagagcggagtgcctagcagattttctggcagcggctccggcaccgatttcaccctgacaatatccagcctccagcctgaggacttcgccacctactactgccagcagagctacagcacccctctgacctttggacagggcaccaaggtggaaatcaagctcgagatccagaaccctgatcctgccgtgtaccagctgcgggatagcaagagcagcgacaagagcgtgtgtctgttcaccgacttcgacagccagaccaacgtgtcccagagcaaggactccgacgtgtacatcaccgataagtgcgtgctggacatgcggagcatggacttcaagagcaactccgccgtggcctggtccaacaagtccgatttcgcctgcgccaacgccttcaacaacagcattatccccgaggacacattcttcccaagccccgagagcagcgactccaccgaccacgtgaagcccaaagagacagagaacaccaagcagcccagcaagagctgccacaagcccaaggccatcgtgcacaccgagaaagtgaacatgatgagcctgaccgtgctgggcctgcggatgctgttcgccaaaaccgtggccgtgaacttcctgctgaccgccaagctgttcttcctcctcaccgcccgcgccaagagaagcggatctggcgtgaagcagaccctgaatttcgacctgctgaagctggctggcgacgtggaatccaacccaggccctactagtatggactggatttggcgcatccttttccttgtcggcgctgctaccggcgcgcattccgggccccagctccagctgcaagagtctggacctggcctggtcaagcctagcgagacactgagcctgacctgtaccgtgtccggcgatagcatcagcagcggcgattactactggggctggatcagacagcctcctggcaaaggactggaatggatcggccacatctactacagcggcgtgacctactacaaccccagcctgaagtccagagtgaccatcagcgtggacaccagccggaaccagttctccctgaagctgtctagcgtgacagccgccgataccgccgtgtactactgcaccagagaggacagcagcaactggcggagtagaggccagggaacactggtcacagttagctctggatccggcggaggcggaagtggaggcggaggatctggcggcggaggctctttcgaagaggtgcagctggttgaatctggcggaggactggttcagcctggcggatctctgagactgtcttgtgctgccagcggcttcaccttcagctcctacgccatgagctgggtccgacaggctcctggcaaaggactggaatgggtgtccgccatctctggctcaggcggcagcacatattacgccgactctgtgaagggcagattcaccatcagccgggacaacagcaagaacaccctgtacctccagatgaactccctgagagccgaggacaccgccgtgtactattgtgccagactgggctaccccaccaccacactgctgccctttgattattggggccagggcaccctggtcaccgtttcttctacgcgtgaggacctgaagaacgtgttcccacctgaggtggccgtgttcgagcctagcgaggccgagatcagccacacccagaaagccaccctcgtgtgcctggctaccggcttctaccccgaccatgtggaactgtcttggtgggtcaacggcaaagaggtgcacagcggcgtgtgtaccgacccccagccactgaaagaacagcccgccctgaacgacagccggtactgcctgagcagcagactgagagtgtccgccaccttctggcagaacccccggaaccacttcagatgccaggtgcagttctacggcctgagcgagaacgacgagtggacccaggacagagccaagcccgtgacccagatcgtgtctgccgaagcctggggcagagccgatgatgtgattaagatccactggcaggaaaagaagtccaacaccatcctgggcagccaggaaggcaacaccatgaagaccaacgacacctacatgaagttcagctggctgaccgtgcccgagaagtccctggacaaagaacacagatgcatcgtgcggcacgaaaacaacaagaacggcgtggaccaggaaatcatcttcccacccatcaagaccgatgtgattacaatggaccccaaggacaactgctccaaggacgccaacgataccctgctgctccagctgaccaacaccagcgcctactacatgtacttgttgctgctgctgaagtccgtggtgtacttcgccatcatcacatgctgcctgctgatggctatggtcaagcggaaggacagccgggga

SEQ ID NO: 39138 - DNA, 2172 bp, synthetic construct
  source 1..2172: mol_type = other DNA
atggccttaccagtgaccgccttgctcctgccgctggccttgctgctccacgccgccaggccggacatccagatgacacagagccctagcagcctgtctgccagcgtgggagacagagtgaccatcacctgtagagccagccagagcatcagcagctacctgaactggtatcagcagaagcccggcaaggcccctaaactgctgatctatgccgccagctctctccagagcggagtgcctagcagattttctggcagcggctccggcaccgatttcaccctgacaatatccagcctccagcctgaggacttcgccacctactactgccagcagagctacagcacccctctgacctttggacagggcaccaaggtggaaatcaagctcgaggacctgaagaacgtgttcccacctgaggtggccgtgttcgagcctagcgaggccgagatcagccacacccagaaagccaccctcgtgtgcctggctaccggcttctaccccgaccatgtggaactgtcttggtgggtcaacggcaaagaggtgcacagcggcgtgtgtaccgacccccagccactgaaagaacagcccgccctgaacgacagccggtactgcctgagcagcagactgagagtgtccgccaccttctggcagaacccccggaaccacttcagatgccaggtgcagttctacggcctgagcgagaacgacgagtggacccaggacagagccaagcccgtgacccagatcgtgtctgccgaagcctggggcagagccgatgatgtgattaagatccactggcaggaaaagaagtccaacaccatcctgggcagccaggaaggcaacaccatgaagaccaacgacacctacatgaagttcagctggctgaccgtgcccgagaagtccctggacaaagaacacagatgcatcgtgcggcacgaaaacaacaagaacggcgtggaccaggaaatcatcttcccacccatcaagaccgatgtgattacaatggaccccaaggacaactgctccaaggacgccaacgataccctgctgctccagctgaccaacaccagcgcctactacatgtacttgttgctgctgctgaagtccgtggtgtacttcgccatcatcacatgctgcctgctgcggagaaccgccttctgctgcaacggcgagaagtctagggccaagcgatctggatctggagcaacaaacttctcactactcaaacaagcaggtgacgtggaggagaatcccgggcctactagtatggactggatttggcgcatccttttccttgtcggcgctgctaccggcgcgcattccttcgaagaggtgcagctggttgaatctggcggaggactggttcagcctggcggatctctgagactgtcttgtgctgccagcggcttcaccttcagctcctacgccatgagctgggtccgacaggctcctggcaaaggactggaatgggtgtccgccatctctggctcaggcggcagcacatattacgccgactctgtgaagggcagattcaccatcagccgggacaacagcaagaacaccctgtacctccagatgaactccctgagagccgaggacaccgccgtgtactattgtgccagactgggctaccccaccaccacactgctgccctttgattattggggccagggcaccctggtcaccgtttcttctacgcgtatccagaaccctgatcctgccgtgtaccagctgcgggatagcaagagcagcgacaagagcgtgtgtctgttcaccgacttcgacagccagaccaacgtgtcccagagcaaggactccgacgtgtacatcaccgataagtgcgtgctggacatgcggagcatggacttcaagagcaactccgccgtggcctggtccaacaagtccgatttcgcctgcgccaacgccttcaacaacagcattatccccgaggacacattcttcccaagccccgagagcagcgactccaccgaccacgtgaagcccaaagagacagagaacaccaagcagcccagcaagagctgccacaagcccaaggccatcgtgcacaccgagaaagtgaacatgatgagcctgaccgtgctgggcctgcggatgctgttcgccaaaaccgtggccgtgaacttcctgctgaccgccaagctgttcttcctc

SEQ ID NO: 39139 - DNA, 2184 bp, synthetic construct
  source 1..2184: mol_type = other DNA
atggccttaccagtgaccgccttgctcctgccgctggccttgctgctccacgccgccaggccggacatccagatgacacagagccctagcagcctgtctgccagcgtgggagacagagtgaccatcacctgtagagccagccagagcatcagcagctacctgaactggtatcagcagaagcccggcaaggcccctaaactgctgatctatgccgccagctctctccagagcggagtgcctagcagattttctggcagcggctccggcaccgatttcaccctgacaatatccagcctccagcctgaggacttcgccacctactactgccagcagagctacagcacccctctgacctttggacagggcaccaaggtggaaatcaagctcgagatccagaaccctgatcctgccgtgtaccagctgcgggatagcaagagcagcgacaagagcgtgtgtctgttcaccgacttcgacagccagaccaacgtgtcccagagcaaggactccgacgtgtacatcaccgataagtgcgtgctggacatgcggagcatggacttcaagagcaactccgccgtggcctggtccaacaagtccgatttcgcctgcgccaacgccttcaacaacagcattatccccgaggacacattcttcccaagccccgagagcagcgactccaccgaccacgtgaagcccaaagagacagagaacaccaagcagcccagcaagagctgccacaagcccaaggccatcgtgcacaccgagaaagtgaacatgatgagcctgaccgtgctgggcctgcggatgctgttcgccaaaaccgtggccgtgaacttcctgctgaccgccaagctgttcttcctccgcgccaagagaagcggatctggcgtgaagcagaccctgaatttcgacctgctgaagctggctggcgacgtggaatccaacccaggccctactagtatggactggatttggcgcatccttttccttgtcggcgctgctaccggcgcgcattccttcgaagaggtgcagctggttgaatctggcggaggactggttcagcctggcggatctctgagactgtcttgtgctgccagcggcttcaccttcagctcctacgccatgagctgggtccgacaggctcctggcaaaggactggaatgggtgtccgccatctctggctcaggcggcagcacatattacgccgactctgtgaagggcagattcaccatcagccgggacaacagcaagaacaccctgtacctccagatgaactccctgagagccgaggacaccgccgtgtactattgtgccagactgggctaccccaccaccacactgctgccctttgattattggggccagggcaccctggtcaccgtttcttctacgcgtgaggacctgaagaacgtgttcccacctgaggtggccgtgttcgagcctagcgaggccgagatcagccacacccagaaagccaccctcgtgtgcctggctaccggcttctaccccgaccatgtggaactgtcttggtgggtcaacggcaaagaggtgcacagcggcgtgtgtaccgacccccagccactgaaagaacagcccgccctgaacgacagccggtactgcctgagcagcagactgagagtgtccgccaccttctggcagaacccccggaaccacttcagatgccaggtgcagttctacggcctgagcgagaacgacgagtggacccaggacagagccaagcccgtgacccagatcgtgtctgccgaagcctggggcagagccgatgatgtgattaagatccactggcaggaaaagaagtccaacaccatcctgggcagccaggaaggcaacaccatgaagaccaacgacacctacatgaagttcagctggctgaccgtgcccgagaagtccctggacaaagaacacagatgcatcgtgcggcacgaaaacaacaagaacggcgtggaccaggaaatcatcttcccacccatcaagaccgatgtgattacaatggaccccaaggacaactgctccaaggacgccaacgataccctgctgctccagctgaccaacaccagcgcctactacatgtacttgttgctgctgctgaagtccgtggtgtacttcgccatcatcacatgctgcctgctgcggagaaccgccttctgctgcaacggcgagaagtct

SEQ ID NO: 39140 - DNA, 2577 bp, synthetic construct
  source 1..2577: mol_type = other DNA
atggccttaccagtgaccgccttgctcctgccgctggccttgctgctccacgccgccaggccggaagtgcagctggttgaatctggcggaggactggttcagcctggcggatctctgagactgtcttgtgccgccagcggcttcagcttcagcgacttttggatgagctgggtccgacaggcccctggcaaaggacttgaatgggtcgccacaatcagccaggccggcagcgagaaggactacgtggactctgtgaagggcagattcaccatcagccgggacaacgccaagaagtccctgtacctccagatgaacagcctgagagccgaggacaccgccgtgtactattgtgcctctggcgtgtacagcttcgactacagaggccagggcaccctggtcacagtctcttctggtaccggcggaggcggatctggcggcggaggtagcggtggcggaggatctgaattcgacatccagatgacacagagccctagcagcctgtctgccagcgtgggagacagagtgaccatcacctgtagagccagccagagcatcagcagctacctgaactggtatcagcagaagcccggcaaggcccctaaactgctgatctatgccgccagctctctccagagcggagtgcctagcagattttctggcagcggctccggcaccgatttcaccctgacaatatccagcctccagcctgaggacttcgccacctactactgccagcagagctacagcacccctctgacctttggacagggcaccaaggtggaaatcaagctcgaggacctgaagaacgtgttcccacctgaggtggccgtgttcgagcctagcgaggccgagatcagccacacccagaaagccaccctcgtgtgcctggctaccggcttctaccccgaccatgtggaactgtcttggtgggtcaacggcaaagaggtgcacagcggcgtgtgtaccgacccccagccactgaaagaacagcccgccctgaacgacagccggtactgcctgagcagcagactgagagtgtccgccaccttctggcagaacccccggaaccacttcagatgccaggtgcagttctacggcctgagcgagaacgacgagtggacccaggacagagccaagcccgtgacccagatcgtgtctgccgaagcctggggcagagccgatgatgtgattaagatccactggcaggaaaagaagtccaacaccatcctgggcagccaggaaggcaacaccatgaagaccaacgacacctacatgaagttcagctggctgaccgtgcccgagaagtccctggacaaagaacacagatgcatcgtgcggcacgaaaacaacaagaacggcgtggaccaggaaatcatcttcccacccatcaagaccgatgtgattacaatggaccccaaggacaactgctccaaggacgccaacgataccctgctgctccagctgaccaacaccagcgcctactacatgtacttgttgctgctgctgaagtccgtggtgtacttcgccatcatcacatgctgcctgctgcggagaaccgccttctgctgcaacggcgagaagtctagggccaagcgatctggatctggagcaacaaacttctcactactcaaacaagcaggtgacgtggaggagaatcccgggcctactagtatggactggatttggcgcatccttttccttgtcggcgctgctaccggcgcgcattccttcgaagaggtgcagctggttgaatctggcggaggactggttcagcctggcggatctctgagactgtcttgtgctgccagcggcttcaccttcagctcctacgccatgagctgggtccgacaggctcctggcaaaggactggaatgggtgtccgccatctctggctcaggcggcagcacatattacgccgactctgtgaagggcagattcaccatcagccgggacaacagcaagaacaccctgtacctccagatgaactccctgagagccgaggacaccgccgtgtactattgtgccagactgggctaccccaccaccacactgctgccctttgattattggggccagggcaccctggtcaccgtttcttctacgcgtatccagaaccctgatcctgccgtgtaccagctgcgggatagcaagagcagcgacaagagcgtgtgtctgttcaccgacttcgacagccagaccaacgtgtcccagagcaaggactccgacgtgtacatcaccgataagtgcgtgctggacatgcggagcatggacttcaagagcaactccgccgtggcctggtccaacaagtccgatttcgcctgcgccaacgccttcaacaacagcattatccccgaggacacattcttcccaagccccgagagcagcgactccaccgaccacgtgaagcccaaagagacagagaacaccaagcagcccagcaagagctgccacaagcccaaggccatcgtgcacaccgagaaagtgaacatgatgagcctgaccgtgctgggcctgcggatgctgttcgccaaaaccgtggccgtgaacttcctgctgaccgccaagctgttcttcctc

SEQ ID NO: 39141 - DNA, 2988 bp, synthetic construct
  source 1..2988: mol_type = other DNA
atggccttaccagtgaccgccttgctcctgccgctggccttgctgctccacgccgccaggccggaagtgcagctggttgaatctggcggaggactggttcagcctggcggatctctgagactgtcttgtgccgccagcggcttcagcttcagcgacttttggatgagctgggtccgacaggcccctggcaaaggacttgaatgggtcgccacaatcagccaggccggcagcgagaaggactacgtggactctgtgaagggcagattcaccatcagccgggacaacgccaagaagtccctgtacctccagatgaacagcctgagagccgaggacaccgccgtgtactattgtgcctctggcgtgtacagcttcgactacagaggccagggcaccctggtcacagtctcttctggtaccggcggaggcggatctggcggcggaggtagcggtggcggaggatctgaattcgacatccagatgacacagagccctagcagcctgtctgccagcgtgggagacagagtgaccatcacctgtagagccagccagagcatcagcagctacctgaactggtatcagcagaagcccggcaaggcccctaaactgctgatctatgccgccagctctctccagagcggagtgcctagcagattttctggcagcggctccggcaccgatttcaccctgacaatatccagcctccagcctgaggacttcgccacctactactgccagcagagctacagcacccctctgacctttggacagggcaccaaggtggaaatcaagctcgaggacctgaagaacgtgttcccacctgaggtggccgtgttcgagcctagcgaggccgagatcagccacacccagaaagccaccctcgtgtgcctggctaccggcttctaccccgaccatgtggaactgtcttggtgggtcaacggcaaagaggtgcacagcggcgtgtgtaccgacccccagccactgaaagaacagcccgccctgaacgacagccggtactgcctgagcagcagactgagagtgtccgccaccttctggcagaacccccggaaccacttcagatgccaggtgcagttctacggcctgagcgagaacgacgagtggacccaggacagagccaagcccgtgacccagatcgtgtctgccgaagcctggggcagagccgatgatgtgattaagatccactggcaggaaaagaagtccaacaccatcctgggcagccaggaaggcaacaccatgaagaccaacgacacctacatgaagttcagctggctgaccgtgcccgagaagtccctggacaaagaacacagatgcatcgtgcggcacgaaaacaacaagaacggcgtggaccaggaaatcatcttcccacccatcaagaccgatgtgattacaatggaccccaaggacaactgctccaaggacgccaacgataccctgctgctccagctgaccaacaccagcgcctactacatgtacttgttgctgctgctgaagtccgtggtgtacttcgccatcatcacatgctgcctgctgcggagaaccgccttctgctgcaacggcgagaagtctagggccaagcgatctggatctggagcaacaaacttctcactactcaaacaagcaggtgacgtggaggagaatcccgggcctactagtatggactggatttggcgcatccttttccttgtcggcgctgctaccggcgcgcattccgggccccagctccagctgcaagagtctggacctggcctggtcaagcctagcgagacactgagcctgacctgtaccgtgtccggcgatagcatcagcagcggcgattactactggggctggatcagacagcctcctggcaaaggactggaatggatcggccacatctactacagcggcgtgacctactacaaccccagcctgaagtccagagtgaccatcagcgtggacaccagccggaaccagttctccctgaagctgtctagcgtgacagccgccgataccgccgtgtactactgcaccagagaggacagcagcaactggcggagtagaggccagggaacactggtcacagttagctctggatccggcggaggcggaagtggaggcggaggatctggcggcggaggctctttcgaagaggtgcagctggttgaatctggcggaggactggttcagcctggcggatctctgagactgtcttgtgctgccagcggcttcaccttcagctcctacgccatgagctgggtccgacaggctcctggcaaaggactggaatgggtgtccgccatctctggctcaggcggcagcacatattacgccgactctgtgaagggcagattcaccatcagccgggacaacagcaagaacaccctgtacctccagatgaactccctgagagccgaggacaccgccgtgtactattgtgccagactgggctaccccaccaccacactgctgccctttgattattggggccagggcaccctggtcaccgtttcttctacgcgtatccagaaccctgatcctgccgtgtaccagctgcgggatagcaagagcagcgacaagagcgtgtgtctgttcaccgacttcgacagccagaccaacgtgtcccagagcaaggactccgacgtgtacatcaccgataagtgcgtgctggacatgcggagcatggacttcaagagcaactccgccgtggcctggtccaacaagtccgatttcgcctgcgccaacgccttcaacaacagcattatccccgaggacacattcttcccaagccccgagagcagcgactccaccgaccacgtgaagcccaaagagacagagaacaccaagcagcccagcaagagctgccacaagcccaaggccatcgtgcacaccgagaaagtgaacatgatgagcctgaccgtgctgggcctgcggatgctgttcgccaaaaccgtggccgtgaacttcctgctgaccgccaagctgttcttcctc

SEQ ID NO: 39142 - DNA, 1866 bp, synthetic construct
  source 1..1866: mol_type = other DNA
atggccttaccagtgaccgccttgctcctgccgctggccttgctgctccacgccgccaggccggacatccagatgacacagagccctagcagcctgtctgccagcgtgggagacagagtgaccatcacctgtagagccagccagagcatcagcagctacctgaactggtatcagcagaagcccggcaaggcccctaaactgctgatctatgccgccagctctctccagagcggagtgcctagcagattttctggcagcggctccggcaccgatttcaccctgacaatatccagcctccagcctgaggacttcgccacctactactgccagcagagctacagcacccctctgacctttggacagggcaccaaggtggaaatcaagctcgaggacctgaagaacgtgttcccacctgaggtggccgtgttcgagcctagcgaggccgagatcagccacacccagaaagccaccctcgtgtgcctggctaccggcttctaccccgaccatgtggaactgtcttggtgggtcaacggcaaagaggtgcacagcggcgtgtctaccgacccccagccactgaaagaacagcccgccctgaacgacagccggtactgcctgagcagcagactgagagtgtccgccaccttctggcagaacccccggaaccacttcagatgccaggtgcagttctacggcctgagcgagaacgacgagtggacccaggacagagccaagcccgtgacccagatcgtgtctgccgaagcctggggcagagccgattgcgacgtgaagctggtggaaaagagcttcgagacagacaccaacctgaacttccagaacctgagcgtgatcggcttcagaatcctgctgctgaaagtggccggctttaacctgctgatgaccctgcggctgtggtccagcagggccaagcgatctggatctggagcaacaaacttctcactactcaaacaagcaggtgacgtggaggagaatcccgggcctactagtatggactggatttggcgcatccttttccttgtcggcgctgctaccggcgcgcattccttcgaagaggtgcagctggttgaatctggcggaggactggttcagcctggcggatctctgagactgtcttgtgctgccagcggcttcaccttcagctcctacgccatgagctgggtccgacaggctcctggcaaaggactggaatgggtgtccgccatctctggctcaggcggcagcacatattacgccgactctgtgaagggcagattcaccatcagccgggacaacagcaagaacaccctgtacctccagatgaactccctgagagccgaggacaccgccgtgtactattgtgccagactgggctaccccaccaccacactgctgccctttgattattggggccagggcaccctggtcaccgtttcttctacgcgtatccagaaccctgatcctgccgtgtaccagctgcgggatagcaagagcagcgacaagagcgtgtgtctgttcaccgacttcgacagccagaccaacgtgtcccagagcaaggactccgacgtgtacatcaccgataagaccgtgctggacatgcggagcatggacttcaagagcaactccgccgtggcctggtccaacaagtccgatttcgcctgcgccaacgccttcaacaacagcattatccccgaggacacattcttcccaagccccgagagcagctgcggctttaccagcgagagctaccagcagggcgtgctgagcgccaccatcctgtacgagatcctgctgggcaaggccaccctgtacgccgtgctggtgtctgccctggtgctgatggctatggtcaagcggaaggacagccgggga

SEQ ID NO: 39143 - DNA, 1866 bp, synthetic construct
  source 1..1866: mol_type = other DNA
atggccttaccagtgaccgccttgctcctgccgctggccttgctgctccacgccgccaggccggacatccagatgacacagagccctagcagcctgtctgccagcgtgggagacagagtgaccatcacctgtagagccagccagagcatcagcagctacctgaactggtatcagcagaagcccggcaaggcccctaaactgctgatctatgccgccagctctctccagagcggagtgcctagcagattttctggcagcggctccggcaccgatttcaccctgacaatatccagcctccagcctgaggacttcgccacctactactgccagcagagctacagcacccctctgacctttggacagggcaccaaggtggaaatcaagctcgaggacctgaagaacgtgttcccacctgaggtggccgtgttcgagcctagcgaggccgagatcagccacacccagaaagccaccctcgtgtgcctggctaccggcttctaccccgaccatgtggaactgtcttggtgggtcaacggcaaagaggtgcacagcggcgtgtctaccgacccccagccactgaaagaacagcccgccctgaacgacagccggtactgcctgagcagcagactgagagtgtccgccaccttctggcagaacccccggaaccacttcagatgccaggtgcagttctacggcctgagcgagaacgacgagtggacccaggacagagccaagcccgtgacccagatcgtgtctgccgaagcctggggcagagccgattgcggctttaccagcgagagctaccagcagggcgtgctgagcgccaccaacctgagcgtgatcggcttcagaatcctgctgctgaaagtggccggctttaacctgctgatgaccctgcggctgtggtccagcagggccaagcgatctggatctggagcaacaaacttctcactactcaaacaagcaggtgacgtggaggagaatcccgggcctactagtatggactggatttggcgcatccttttccttgtcggcgctgctaccggcgcgcattccttcgaagaggtgcagctggttgaatctggcggaggactggttcagcctggcggatctctgagactgtcttgtgctgccagcggcttcaccttcagctcctacgccatgagctgggtccgacaggctcctggcaaaggactggaatgggtgtccgccatctctggctcaggcggcagcacatattacgccgactctgtgaagggcagattcaccatcagccgggacaacagcaagaacaccctgtacctccagatgaactccctgagagccgaggacaccgccgtgtactattgtgccagactgggctaccccaccaccacactgctgccctttgattattggggccagggcaccctggtcaccgtttcttctacgcgtatccagaaccctgatcctgccgtgtaccagctgcgggatagcaagagcagcgacaagagcgtgtgtctgttcaccgacttcgacagccagaccaacgtgtcccagagcaaggactccgacgtgtacatcaccgataagaccgtgctggacatgcggagcatggacttcaagagcaactccgccgtggcctggtccaacaagtccgatttcgcctgcgccaacgccttcaacaacagcattatccccgaggacacattcttcccaagccccgagagcagctgcgacgtgaagctggtggaaaagagcttcgagacagacaccaacctgaacttccagatcctgtacgagatcctgctgggcaaggccaccctgtacgccgtgctggtgtctgccctggtgctgatggctatggtcaagcggaaggacagccgggga

SEQ ID NO: 39144 - DNA, 2178 bp, synthetic construct
  source 1..2178: mol_type = other DNA
atggccttaccagtgaccgccttgctcctgccgctggccttgctgctccacgccgccaggccggacatccagatgacacagagccctagcagcctgtctgccagcgtgggagacagagtgaccatcacctgtagagccagccagagcatcagcagctacctgaactggtatcagcagaagcccggcaaggcccctaaactgctgatctatgccgccagctctctccagagcggagtgcctagcagattttctggcagcggctccggcaccgatttcaccctgacaatatccagcctccagcctgaggacttcgccacctactactgccagcagagctacagcacccctctgacctttggacagggcaccaaggtggaaatcaagctcgaggacctgaagaacgtgttcccacctgaggtggccgtgttcgagcctagcgaggccgagatcagccacacccagaaagccaccctcgtgtgcctggctaccggcttctaccccgaccatgtggaactgtcttggtgggtcaacggcaaagaggtgcacagcggcgtgtctaccgacccccagccactgaaagaacagcccgccctgaacgacagccggtactgcctgagcagcagactgagagtgtccgccaccttctggcagaacccccggaaccacttcagatgccaggtgcagttctacggcctgagcgagaacgacgagtggacccaggacagagccaagcccgtgacccagatcgtgtctgccgaagcctggggcagagccgatgatgtgattaagatccactggcaggaaaagaagtccaacaccatcctgggcagccaggaaggcaacaccatgaagaccaacgacacctacatgaagttcagctggctgaccgtgcccgagaagtccctggacaaagaacacagatgcatcgtgcggcacgaaaacaacaagaacggcgtggaccaggaaatcatcttcccacccatcaagaccgatgtgattacaatggaccccaaggacaactgctccaaggacgccaacgataccctgctgctccagctgaccaacaccagcgcctactacatgtacttgttgctgctgctgaagtccgtggtgtacttcgccatcatcacatgctgcctgctgatggctatggtcaagcggaaggacagccggggaagggccaagcgatctggatctggagcaacaaacttctcactactcaaacaagcaggtgacgtggaggagaatcccgggcctactagtatggactggatttggcgcatccttttccttgtcggcgctgctaccggcgcgcattccttcgaagaggtgcagctggttgaatctggcggaggactggttcagcctggcggatctctgagactgtcttgtgctgccagcggcttcaccttcagctcctacgccatgagctgggtccgacaggctcctggcaaaggactggaatgggtgtccgccatctctggctcaggcggcagcacatattacgccgactctgtgaagggcagattcaccatcagccgggacaacagcaagaacaccctgtacctccagatgaactccctgagagccgaggacaccgccgtgtactattgtgccagactgggctaccccaccaccacactgctgccctttgattattggggccagggcaccctggtcaccgtttcttctacgcgtatccagaaccctgatcctgccgtgtaccagctgcgggatagcaagagcagcgacaagagcgtgtgtctgttcaccgacttcgacagccagaccaacgtgtcccagagcaaggactccgacgtgtacatcaccgataagaccgtgctggacatgcggagcatggacttcaagagcaactccgccgtggcctggtccaacaagtccgatttcgcctgcgccaacgccttcaacaacagcattatccccgaggacacattcttcccaagccccgagagcagcgactccaccgaccacgtgaagcccaaagagacagagaacaccaagcagcccagcaagagctgccacaagcccaaggccatcgtgcacaccgagaaagtgaacatgatgagcctgaccgtgctgggcctgcggatgctgttcgccaaaaccgtggccgtgaacttcctgctgaccgccaagctgttcttcctcctcaccgcc

SEQ ID NO: 39145 - DNA, 2172 bp, synthetic construct
  source 1..2172: mol_type = other DNA
atggccttaccagtgaccgccttgctcctgccgctggccttgctgctccacgccgccaggccggacatccagatgacacagagccctagcagcctgtctgccagcgtgggagacagagtgaccatcacctgtagagccagccagagcatcagcagctacctgaactggtatcagcagaagcccggcaaggcccctaaactgctgatctatgccgccagctctctccagagcggagtgcctagcagattttctggcagcggctccggcaccgatttcaccctgacaatatccagcctccagcctgaggacttcgccacctactactgccagcagagctacagcacccctctgacctttggacagggcaccaaggtggaaatcaagctcgaggacctgaagaacgtgttcccacctgaggtggccgtgttcgagcctagcgaggccgagatcagccacacccagaaagccaccctcgtgtgcctggctaccggcttctaccccgaccatgtggaactgtcttggtgggtcaacggcaaagaggtgcacagcggcgtgtctaccgacccccagccactgaaagaacagcccgccctgaacgacagccggtactgcctgagcagcagactgagagtgtccgccaccttctggcagaacccccggaaccacttcagatgccaggtgcagttctacggcctgagcgagaacgacgagtggacccaggacagagccaagcccgtgacccagatcgtgtctgccgaagcctggggcagagccgatgatgtgattaagatccactggcaggaaaagaagtccaacaccatcctgggcagccaggaaggcaacaccatgaagaccaacgacacctacatgaagttcagctggctgaccgtgcccgagaagtccctggacaaagaacacagatgcatcgtgcggcacgaaaacaacaagaacggcgtggaccaggaaatcatcttcccacccatcaagaccgatgtgattacaatggaccccaaggacaactgctccaaggacgccaacgataccctgctgctccagctgaccaacaccagcgcctactacatgtacttgttgctgctgctgaagtccgtggtgtacttcgccatcatcacatgctgcctgctgcggagaaccgccttctgctgcaacggcgagaagtctagggccaagcgatctggatctggagcaacaaacttctcactactcaaacaagcaggtgacgtggaggagaatcccgggcctactagtatggactggatttggcgcatccttttccttgtcggcgctgctaccggcgcgcattccttcgaagaggtgcagctggttgaatctggcggaggactggttcagcctggcggatctctgagactgtcttgtgctgccagcggcttcaccttcagctcctacgccatgagctgggtccgacaggctcctggcaaaggactggaatgggtgtccgccatctctggctcaggcggcagcacatattacgccgactctgtgaagggcagattcaccatcagccgggacaacagcaagaacaccctgtacctccagatgaactccctgagagccgaggacaccgccgtgtactattgtgccagactgggctaccccaccaccacactgctgccctttgattattggggccagggcaccctggtcaccgtttcttctacgcgtatccagaaccctgatcctgccgtgtaccagctgcgggatagcaagagcagcgacaagagcgtgtgtctgttcaccgacttcgacagccagaccaacgtgtcccagagcaaggactccgacgtgtacatcaccgataagaccgtgctggacatgcggagcatggacttcaagagcaactccgccgtggcctggtccaacaagtccgatttcgcctgcgccaacgccttcaacaacagcattatccccgaggacacattcttcccaagccccgagagcagcgactccaccgaccacgtgaagcccaaagagacagagaacaccaagcagcccagcaagagctgccacaagcccaaggccatcgtgcacaccgagaaagtgaacatgatgagcctgaccgtgctgggcctgcggatgctgttcgccaaaaccgtggccgtgaacttcctgctgaccgccaagctgttcttcctc

SEQ ID NO: 39146 - DNA, 2604 bp, synthetic construct
  source 1..2604: mol_type = other DNA
atggccttaccagtgaccgccttgctcctgccgctggccttgctgctccacgccgccaggccgctcgaggaggacctgaagaacgtgttcccacctgaggtggccgtgttcgagcctagcgaggccgagatcagccacacccagaaagccaccctcgtgtgcctggctaccggcttctaccccgaccatgtggaactgtcttggtgggtcaacggcaaagaggtgcacagcggcgtgtgtaccgacccccagccactgaaagaacagcccgccctgaacgacagccggtactgcctgagcagcagactgagagtgtccgccaccttctggcagaacccccggaaccacttcagatgccaggtgcagttctacggcctgagcgagaacgacgagtggacccaggacagagccaagcccgtgacccagatcgtgtctgccgaagcctggggcagagccgattgcggctttaccagcgagagctaccagcagggcgtgctgagcgccaccaacctgagcgtgatcggcttcagaatcctgctgctgaaagtggccggctttaacctgctgatgaccctgcggctgtggtccagcagggccaagcgatctggatctggagcaacaaacttctcactactcaaacaagcaggtgacgtggaggagaatcccgggcctactagcatggccttaccagtgaccgccttgctcctgccgctggccttgctgctccacgccgccaggccggacatccagatgacacagagccctagcagcctgtctgccagcgtgggagacagagtgaccatcacctgtagagccagccagagcatcagcagctacctgaactggtatcagcagaagcccggcaaggcccctaaactgctgatctatgccgccagctctctccagagcggagtgcctagcagattttctggcagcggctccggcaccgatttcaccctgacaatatccagcctccagcctgaggacttcgccacctactactgccagcagagctacagcacccctctgacctttggacagggcaccaaggtggaaatcaagggcggaggcggaagtggaggcggaggatctggcggcggaggctctgaggtgcagctggttgaatctggcggaggactggttcagcctggcggatctctgagactgtcttgtgctgccagcggcttcaccttcagctcctacgccatgagctgggtccgacaggctcctggcaaaggactggaatgggtgtccgccatctctggctcaggcggcagcacatattacgccgactctgtgaagggcagattcaccatcagccgggacaacagcaagaacaccctgtacctccagatgaactccctgagagccgaggacaccgccgtgtactattgtgccagactgggctaccccaccaccacactgctgccctttgattattggggccagggcaccctggtcaccgtttcttctacgcgtatccagaaccctgatcctgccgtgtaccagctgcgggatagcaagagcagcgacaagagcgtgtgtctgttcaccgacttcgacagccagaccaacgtgtcccagagcaaggactccgacgtgtacatcaccgataagtgcgtgctggacatgcggagcatggacttcaagagcaactccgccgtggcctggtccaacaagtccgatttcgcctgcgccaacgccttcaacaacagcattatccccgaggacacattcttcccaagccccgagagcagctgcgacgtgaagctggtggaaaagagcttcgagacagacaccaacctgaacttccagatcctgtacgaggtgatcggcttcagaatcctgctgctgaaagtggccggctttaacctgctgatgaccctgcggctgtggtccagccgcgccaagagaagcggatctggcgtgaagcagaccctgaatttcgacctgctgaagctggctggcgacgtggaatccaacccaggcccttctagaggccatatgaccgagtacaagcccacggtgcgcctcgccacccgcgacgacgtccccagggccgtacgcaccctcgccgccgcgttcgccgactaccccgccacgcgccacaccgtcgatccggaccgccacatcgagcgggtcaccgagctgcaagaactcttcctcacgcgcgtcgggctcgacatcggcaaggtgtgggtcgcggacgacggcgccgcggtggcggtctggaccacgccggagagcgtcgaagcgggggcggtgttcgccgagatcggcccgcgcatggccgagttgagcggttcccggctggccgcgcagcaacagatggaaggcctcctggcgccgcaccggcccaaggagcccgcgtggttcctggccaccgtcggcgtctcgcccgaccaccagggcaagggtctgggcagcgccgtcgtgctccccggagtggaggcggccgagcgcgccggggtgcccgccttcctggagacctccgcgccccgcaacctccccttctacgagcggctcggcttcaccgtcaccgccgacgtcgaggtgcccgaaggaccgcgcacctggtgcatgacccgcaagcccggtgcctga

SEQ ID NO: 39147 - DNA, 2604 bp, synthetic construct
  source 1..2604: mol_type = other DNA
atggccttaccagtgaccgccttgctcctgccgctggccttgctgctccacgccgccaggccgctcgagatccagaaccctgatcctgccgtgtaccagctgcgggatagcaagagcagcgacaagagcgtgtgtctgttcaccgacttcgacagccagaccaacgtgtcccagagcaaggactccgacgtgtacatcaccgataagtgcgtgctggacatgcggagcatggacttcaagagcaactccgccgtggcctggtccaacaagtccgatttcgcctgcgccaacgccttcaacaacagcattatccccgaggacacattcttcccaagccccgagagcagctgcgacgtgaagctggtggaaaagagcttcgagacagacaccaacctgaacttccagatcctgtacgaggtgatcggcttcagaatcctgctgctgaaagtggccggctttaacctgctgatgaccctgcggctgtggtccagcagggccaagcgatctggatctggagcaacaaacttctcactactcaaacaagcaggtgacgtggaggagaatcccgggcctactagcatggccttaccagtgaccgccttgctcctgccgctggccttgctgctccacgccgccaggccggacatccagatgacacagagccctagcagcctgtctgccagcgtgggagacagagtgaccatcacctgtagagccagccagagcatcagcagctacctgaactggtatcagcagaagcccggcaaggcccctaaactgctgatctatgccgccagctctctccagagcggagtgcctagcagattttctggcagcggctccggcaccgatttcaccctgacaatatccagcctccagcctgaggacttcgccacctactactgccagcagagctacagcacccctctgacctttggacagggcaccaaggtggaaatcaagggcggaggcggaagtggaggcggaggatctggcggcggaggctctgaggtgcagctggttgaatctggcggaggactggttcagcctggcggatctctgagactgtcttgtgctgccagcggcttcaccttcagctcctacgccatgagctgggtccgacaggctcctggcaaaggactggaatgggtgtccgccatctctggctcaggcggcagcacatattacgccgactctgtgaagggcagattcaccatcagccgggacaacagcaagaacaccctgtacctccagatgaactccctgagagccgaggacaccgccgtgtactattgtgccagactgggctaccccaccaccacactgctgccctttgattattggggccagggcaccctggtcaccgtttcttctacgcgtgaggacctgaagaacgtgttcccacctgaggtggccgtgttcgagcctagcgaggccgagatcagccacacccagaaagccaccctcgtgtgcctggctaccggcttctaccccgaccatgtggaactgtcttggtgggtcaacggcaaagaggtgcacagcggcgtgtgtaccgacccccagccactgaaagaacagcccgccctgaacgacagccggtactgcctgagcagcagactgagagtgtccgccaccttctggcagaacccccggaaccacttcagatgccaggtgcagttctacggcctgagcgagaacgacgagtggacccaggacagagccaagcccgtgacccagatcgtgtctgccgaagcctggggcagagccgattgcggctttaccagcgagagctaccagcagggcgtgctgagcgccaccaacctgagcgtgatcggcttcagaatcctgctgctgaaagtggccggctttaacctgctgatgaccctgcggctgtggtccagccgcgccaagagaagcggatctggcgtgaagcagaccctgaatttcgacctgctgaagctggctggcgacgtggaatccaacccaggcccttctagaggccatatgaccgagtacaagcccacggtgcgcctcgccacccgcgacgacgtccccagggccgtacgcaccctcgccgccgcgttcgccgactaccccgccacgcgccacaccgtcgatccggaccgccacatcgagcgggtcaccgagctgcaagaactcttcctcacgcgcgtcgggctcgacatcggcaaggtgtgggtcgcggacgacggcgccgcggtggcggtctggaccacgccggagagcgtcgaagcgggggcggtgttcgccgagatcggcccgcgcatggccgagttgagcggttcccggctggccgcgcagcaacagatggaaggcctcctggcgccgcaccggcccaaggagcccgcgtggttcctggccaccgtcggcgtctcgcccgaccaccagggcaagggtctgggcagcgccgtcgtgctccccggagtggaggcggccgagcgcgccggggtgcccgccttcctggagacctccgcgccccgcaacctccccttctacgagcggctcggcttcaccgtcaccgccgacgtcgaggtgcccgaaggaccgcgcacctggtgcatgacccgcaagcccggtgcctga

SEQ ID NO: 39148 - DNA, 2604 bp, synthetic construct; identical to SEQ ID NO: 39146
  source 1..2604: mol_type = other DNA

SEQ ID NO: 39149 - DNA, 2928 bp, synthetic construct
  source 1..2928: mol_type = other DNA
atggccttaccagtgaccgccttgctcctgccgctggccttgctgctccacgccgccaggccgctcgaggaggacctgaagaacgtgttcccacctgaggtggccgtgttcgagcctagcgaggccgagatcagccacacccagaaagccaccctcgtgtgcctggctaccggcttctaccccgaccatgtggaactgtcttggtgggtcaacggcaaagaggtgcacagcggcgtgtctaccgacccccagccactgaaagaacagcccgccctgaacgacagccggtactgcctgagcagcagactgagagtgtccgccaccttctggcagaacccccggaaccacttcagatgccaggtgcagttctacggcctgagcgagaacgacgagtggacccaggacagagccaagcccgtgacccagatcgtgtctgccgaagcctggggcagagccgatgatgtgattaagatccactggcaggaaaagaagtccaacaccatcctgggcagccaggaaggcaacaccatgaagaccaacgacacctacatgaagttcagctggctgaccgtgcccgagaagtccctggacaaagaacacagatgcatcgtgcggcacgaaaacaacaagaacggcgtggaccaggaaatcatcttcccacccatcaagaccgatgtgattacaatggaccccaaggacaactgctccaaggacgccaacgataccctgctgctccagctgaccaacaccagcgcctactacatgtacttgttgctgctgctgaagtccgtggtgtacttcgccatcatcacatgctgcctgctgatggctatggtcaagcggaaggacagccggggaagggccaagcgatctggatctggagcaacaaacttctcactactcaaacaagcaggtgacgtggaggagaatcccgggcctactagcatggccttaccagtgaccgccttgctcctgccgctggccttgctgctccacgccgccaggccggacatccagatgacacagagccctagcagcctgtctgccagcgtgggagacagagtgaccatcacctgtagagccagccagagcatcagcagctacctgaactggtatcagcagaagcccggcaaggcccctaaactgctgatctatgccgccagctctctccagagcggagtgcctagcagattttctggcagcggctccggcaccgatttcaccctgacaatatccagcctccagcctgaggacttcgccacctactactgccagcagagctacagcacccctctgacctttggacagggcaccaaggtggaaatcaagggcggaggcggaagtggaggcggaggatctggcggcggaggctctgaggtgcagctggttgaatctggcggaggactggttcagcctggcggatctctgagactgtcttgtgctgccagcggcttcaccttcagctcctacgccatgagctgggtccgacaggctcctggcaaaggactggaatgggtgtccgccatctctggctcaggcggcagcacatattacgccgactctgtgaagggcagattcaccatcagccgggacaacagcaagaacaccctgtacctccagatgaactccctgagagccgaggacaccgccgtgtactattgtgccagactgggctaccccaccaccacactgctgccctttgattattggggccagggcaccctggtcaccgtttcttctacgcgtatccagaaccctgatcctgccgtgtaccagctgcgggatagcaagagcagcgacaagagcgtgtgtctgttcaccgacttcgacagccagaccaacgtgtcccagagcaaggactccgacgtgtacatcaccgataagaccgtgctggacatgcggagcatggacttcaagagcaactccgccgtggcctggtccaacaagtccgatttcgcctgcgccaacgccttcaacaacagcattatccccgaggacacattcttcccaagccccgagagcagcgactccaccgaccacgtgaagcccaaagagacagagaacaccaagcagcccagcaagagctgccacaagcccaaggccatcgtgcacaccgagaaagtgaacatgatgagcctgaccgtgctgggcctgcggatgctgttcgccaaaaccgtggccgtgaacttcctgctgaccgccaagctgttcttcctcctcaccgcccgcgccaagagaagcggatctggcgtgaagcagaccctgaatttcgacctgctgaagctggctggcgacgtggaatccaacccaggcccttctagaggccatatgaccgagtacaagcccacggtgcgcctcgccacccgcgacgacgtccccagggccgtacgcaccctcgccgccgcgttcgccgactaccccgccacgcgccacaccgtcgatccggaccgccacatcgagcgggtcaccgagctgcaagaactcttcctcacgcgcgtcgggctcgacatcggcaaggtgtgggtcgcggacgacggcgccgcggtggcggtctggaccacgccggagagcgtcgaagcgggggcggtgttcgccgagatcggcccgcgcatggccgagttgagcggttcccggctggccgcgcagcaacagatggaaggcctcctggcgccgcaccggcccaaggagcccgcgtggttcctggccaccgtcggcgtctcgcccgaccaccagggcaagggtctgggcagcgccgtcgtgctccccggagtggaggcggccgagcgcgccggggtgcccgccttcctggagacctccgcgccccgcaacctccccttctacgagcggctcggcttcaccgtcaccgccgacgtcgaggtgcccgaaggaccgcgcacctggtgcatgacccgcaagcccggtgcctga

SEQ ID NO: 39150 - DNA, 2928 bp, synthetic construct
  source 1..2928: mol_type = other DNA
atggccttaccagtgaccgccttgctcctgccgctggccttgctgctccacgccgccaggccgctcgagatccagaaccctgatcctgccgtgtaccagctgcgggatagcaagagcagcgacaagagcgtgtgtctgttcaccgacttcgacagccagaccaacgtgtcccagagcaaggactccgacgtgtacatcaccgataagaccgtgctggacatgcggagcatggacttcaagagcaactccgccgtggcctggtccaacaagtccgatttcgcctgcgccaacgccttcaacaacagcattatccccgaggacacattcttcccaagccccgagagcagcgactccaccgaccacgtgaagcccaaagagacagagaacaccaagcagcccagcaagagctgccacaagcccaaggccatcgtgcacaccgagaaagtgaacatgatgagcctgaccgtgctgggcctgcggatgctgttcgccaaaaccgtggccgtgaacttcctgctgaccgccaagctgttcttcctcctcaccgccagggccaagcgatctggatctggagcaacaaacttctcactactcaaacaagcaggtgacgtggaggagaatcccgggcctactagcatggccttaccagtgaccgccttgctcctgccgctggccttgctgctccacgccgccaggccggacatccagatgacacagagccctagcagcctgtctgccagcgtgggagacagagtgaccatcacctgtagagccagccagagcatcagcagctacctgaactggtatcagcagaagcccggcaaggcccctaaactgctgatctatgccgccagctctctccagagcggagtgcctagcagattttctggcagcggctccggcaccgatttcaccctgacaatatccagcctccagcctgaggacttcgccacctactactgccagcagagctacagcacccctctgacctttggacagggcaccaaggtggaaatcaagggcggaggcggaagtggaggcggaggatctggcggcggaggctctgaggtgcagctggttgaatctggcggaggactggttcagcctggcggatctctgagactgtcttgtgctgccagcggcttcaccttcagctcctacgccatgagctgggtccgacaggctcctggcaaaggactggaatgggtgtccgccatctctggctcaggcggcagcacatattacgccgactctgtgaagggcagattcaccatcagccgggacaacagcaagaacaccctgtacctccagatgaactccctgagagccgaggacaccgccgtgtactattgtgccagactgggctaccccaccaccacactgctgccctttgattattggggccagggcaccctggtcaccgtttcttctacgcgtgaggacctgaagaacgtgttcccacctgaggtggccgtgttcgagcctagcgaggccgagatcagccacacccagaaagccaccctcgtgtgcctggctaccggcttctaccccgaccatgtggaactgtcttggtgggtcaacggcaaagaggtgcacagcggcgtgtctaccgacccccagccactgaaagaacagcccgccctgaacgacagccggtactgcctgagcagcagactgagagtgtccgccaccttctggcagaacccccggaaccacttcagatgccaggtgcagttctacggcctgagcgagaacgacgagtggacccaggacagagccaagcccgtgacccagatcgtgtctgccgaagcctggggcagagccgatgatgtgattaagatccactggcaggaaaagaagtccaacaccatcctgggcagccaggaaggcaacaccatgaagaccaacgacacctacatgaagttcagctggctgaccgtgcccgagaagtccctggacaaagaacacagatgcatcgtgcggcacgaaaacaacaagaacggcgtggaccaggaaatcatcttcccacccatcaagaccgatgtgattacaatggaccccaaggacaactgctccaaggacgccaacgataccctgctgctccagctgaccaacaccagcgcctactacatgtacttgttgctgctgctgaagtccgtggtgtacttcgccatcatcacatgctgcctgctgatggctatggtcaagcggaaggacagccggggacgcgccaagagaagcggatctggcgtgaagcagaccctgaatttcgacctgctgaagctggctggcgacgtggaatccaacccaggcccttctagaggccatatgaccgagtacaagcccacggtgcgcctcgccacccgcgacgacgtccccagggccgtacgcaccctcgccgccgcgttcgccgactaccccgccacgcgccacaccgtcgatccggaccgccacatcgagcgggtcaccgagctgcaagaactcttcctcacgcgcgtcgggctcgacatcggcaaggtgtgggtcgcggacgacggcgccgcggtggcggtctggaccacgccggagagcgtcgaagcgggggcggtgttcgccgagatcggcccgcgcatggccgagttgagcggttcccggctggccgcgcagcaacagatggaaggcctcctggcgccgcaccggcccaaggagcccgcgtggttcctggccaccgtcggcgtctcgcccgaccaccagggcaagggtctgggcagcgccgtcgtgctccccggagtggaggcggccgagcgcgccggggtgcccgccttcctggagacctccgcgccccgcaacctccccttctacgagcggctcggcttcaccgtcaccgccgacgtcgaggtgcccgaaggaccgcgcacctggtgcatgacccgcaagcccggtgcctga

SEQ ID NO: 39151 - DNA, 2922 bp, synthetic construct
  source 1..2922: mol_type = other DNA
atggccttaccagtgaccgccttgctcctgccgctggccttgctgctccacgccgccaggccgctcgaggaggacctgaagaacgtgttcccacctgaggtggccgtgttcgagcctagcgaggccgagatcagccacacccagaaagccaccctcgtgtgcctggctaccggcttctaccccgaccatgtggaactgtcttggtgggtcaacggcaaagaggtgcacagcggcgtgtgtaccgacccccagccactgaaagaacagcccgccctgaacgacagccggtactgcctgagcagcagactgagagtgtccgccaccttctggcagaacccccggaaccacttcagatgccaggtgcagttctacggcctgagcgagaacgacgagtggacccaggacagagccaagcccgtgacccagatcgtgtctgccgaagcctggggcagagccgatgatgtgattaagatccactggcaggaaaagaagtccaacaccatcctgggcagccaggaaggcaacaccatgaagaccaacgacacctacatgaagttcagctggctgaccgtgcccgagaagtccctggacaaagaacacagatgcatcgtgcggcacgaaaacaacaagaacggcgtggaccaggaaatcatcttcccacccatcaagaccgatgtgattacaatggaccccaaggacaactgctccaaggacgccaacgataccctgctgctccagctgaccaacaccagcgcctactacatgtacttgttgctgctgctgaagtccgtggtgtacttcgccatcatcacatgctgcctgctgcggagaaccgccttctgctgcaacggcgagaagtctagggccaagcgatctggatctggagcaacaaacttctcactactcaaacaagcaggtgacgtggaggagaatcccgggcctactagcatggccttaccagtgaccgccttgctcctgccgctggccttgctgctccacgccgccaggccggacatccagatgacacagagccctagcagcctgtctgccagcgtgggagacagagtgaccatcacctgtagagccagccagagcatcagcagctacctgaactggtatcagcagaagcccggcaaggcccctaaactgctgatctatgccgccagctctctccagagcggagtgcctagcagattttctggcagcggctccggcaccgatttcaccctgacaatatccagcctccagcctgaggacttcgccacctactactgccagcagagctacagcacccctctgacctttggacagggcaccaaggtggaaatcaagggcggaggcggaagtggaggcggaggatctggcggcggaggctctgaggtgcagctggttgaatctggcggaggactggttcagcctggcggatctctgagactgtcttgtgctgccagcggcttcaccttcagctcctacgccatgagctgggtccgacaggctcctggcaaaggactggaatgggtgtccgccatctctggctcaggcggcagcacatattacgccgactctgtgaagggcagattcaccatcagccgggacaacagcaagaacaccctgtacctccagatgaactccctgagagccgaggacaccgccgtgtactattgtgccagactgggctaccccaccaccacactgctgccctttgattattggggccagggcaccctggtcaccgtttcttctacgcgtatccagaaccctgatcctgccgtgtaccagctgcgggatagcaagagcagcgacaagagcgtgtgtctgttcaccgacttcgacagccagaccaacgtgtcccagagcaaggactccgacgtgtacatcaccgataagtgcgtgctggacatgcggagcatggacttcaagagcaactccgccgtggcctggtccaacaagtccgatttcgcctgcgccaacgccttcaacaacagcattatccccgaggacacattcttcccaagccccgagagcagcgactccaccgaccacgtgaagcccaaagagacagagaacaccaagcagcccagcaagagctgccacaagcccaaggccatcgtgcacaccgagaaagtgaacatgatgagcctgaccgtgctgggcctgcggatgctgttcgccaaaaccgtggccgtgaacttcctgctgaccgccaagctgttcttcctccgcgccaagagaagcggatctggcgtgaagcagaccctgaatttcgacctgctgaagctggctggcgacgtggaatccaacccaggcccttctagaggccatatgaccgagtacaagcccacggtgcgcctcgccacccgcgacgacgtccccagggccgtacgcaccctcgccgccgcgttcgccgactaccccgccacgcgccacaccgtcgatccggaccgccacatcgagcgggtcaccgagctgcaagaactcttcctcacgcgcgtcgggctcgacatcggcaaggtgtgggtcgcggacgacggcgccgcggtggcggtctggaccacgccggagagcgtcgaagcgggggcggtgttcgccgagatcggcccgcgcatggccgagttgagcggttcccggctggccgcgcagcaacagatggaaggcctcctggcgccgcaccggcccaaggagcccgcgtggttcctggccaccgtcggcgtctcgcccgaccaccagggcaagggtctgggcagcgccgtcgtgctccccggagtggaggcggccgagcgcgccggggtgcccgccttcctggagacctccgcgccccgcaacctccccttctacgagcggctcggcttcaccgtcaccgccgacgtcgaggtgcccgaaggaccgcgcacctggtgcatgacccgcaagcccggtgcctga

SEQ ID NO: 39152 - DNA, 2922 bp, synthetic construct
  source 1..2922: mol_type = other DNA
atggccttaccagtgaccgccttgctcctgccgctggccttgctgctccacgccgccaggccgctcgagatccagaaccctgatcctgccgtgtaccagctgcgggatagcaagagcagcgacaagagcgtgtgtctgttcaccgacttcgacagccagaccaacgtgtcccagagcaaggactccgacgtgtacatcaccgataagtgcgtgctggacatgcggagcatggacttcaagagcaactccgccgtggcctggtccaacaagtccgatttcgcctgcgccaacgccttcaacaacagcattatccccgaggacacattcttcccaagccccgagagcagcgactccaccgaccacgtgaagcccaaagagacagagaacaccaagcagcccagcaagagctgccacaagcccaaggccatcgtgcacaccgagaaagtgaacatgatgagcctgaccgtgctgggcctgcggatgctgttcgccaaaaccgtggccgtgaacttcctgctgaccgccaagctgttcttcctcagggccaagcgatctggatctggagcaacaaacttctcactactcaaacaagcaggtgacgtggaggagaatcccgggcctactagcatggccttaccagtgaccgccttgctcctgccgctggccttgctgctccacgccgccaggccggacatccagatgacacagagccctagcagcctgtctgccagcgtgggagacagagtgaccatcacctgtagagccagccagagcatcagcagctacctgaactggtatcagcagaagcccggcaaggcccctaaactgctgatctatgccgccagctctctccagagcggagtgcctagcagattttctggcagcggctccggcaccgatttcaccctgacaatatccagcctccagcctgaggacttcgccacctactactgccagcagagctacagcacccctctgacctttggacagggcaccaaggtggaaatcaagggcggaggcggaagtggaggcggaggatctggcggcggaggctctgaggtgcagctggttgaatctggcggaggactggttcagcctggcggatctctgagactgtcttgtgctgccagcggcttcaccttcagctcctacgccatgagctgggtccgacaggctcctggcaaaggactggaatgggtgtccgccatctctggctcaggcggcagcacatattacgccgactctgtgaagggcagattcaccatcagccgggacaacagcaagaacaccctgtacctccagatgaactccctgagagccgaggacaccgccgtgtactattgtgccagactgggctaccccaccaccacactgctgccctttgattattggggccagggcaccctggtcaccgtttcttctacgcgtgaggacctgaagaacgtgttcccacctgaggtggccgtgttcgagcctagcgaggccgagatcagccacacccagaaagccaccctcgtgtgcctggctaccggcttctaccccgaccatgtggaactgtcttggtgggtcaacggcaaagaggtgcacagcggcgtgtgtaccgacccccagccactgaaagaacagcccgccctgaacgacagccggtactgcctgagcagcagactgagagtgtccgccaccttctggcagaacccccggaaccacttcagatgccaggtgcagttctacggcctgagcgagaacgacgagtggacccaggacagagccaagcccgtgacccagatcgtgtctgccgaagcctggggcagagccgatgatgtgattaagatccactggcaggaaaagaagtccaacaccatcctgggcagccaggaaggcaacaccatgaagaccaacgacacctacatgaagttcagctggctgaccgtgcccgagaagtccctggacaaagaacacagatgcatcgtgcggcacgaaaacaacaagaacggcgtggaccaggaaatcatcttcccacccatcaagaccgatgtgattacaatggaccccaaggacaactgctccaaggacgccaacgataccctgctgctccagctgaccaacaccagcgcctactacatgtacttgttgctgctgctgaagtccgtggtgtacttcgccatcatcacatgctgcctgctgcggagaaccgccttctgctgcaacggcgagaagtctcgcgccaagagaagcggatctggcgtgaagcagaccctgaatttcgacctgctgaagctggctggcgacgtggaatccaacccaggcccttctagaggccatatgaccgagtacaagcccacggtgcgcctcgccacccgcgacgacgtccccagggccgtacgcaccctcgccgccgcgttcgccgactaccccgccacgcgccacaccgtcgatccggaccgccacatcgagcgggtcaccgagctgcaagaactcttcctcacgcgcgtcgggctcgacatcggcaaggtgtgggtcgcggacgacggcgccgcggtggcggtctggaccacgccggagagcgtcgaagcgggggcggtgttcgccgagatcggcccgcgcatggccgagttgagcggttcccggctggccgcgcagcaacagatggaaggcctcctggcgccgcaccggcccaaggagcccgcgtggttcctggccaccgtcggcgtctcgcccgaccaccagggcaagggtctgggcagcgccgtcgtgctccccggagtggaggcggccgagcgcgccggggtgcccgccttcctggagacctccgcgccccgcaacctccccttctacgagcggctcggcttcaccgtcaccgccgacgtcgaggtgcccgaaggaccgcgcacctggtgcatgacccgcaagcccggtgcctga

SEQ ID NO: 39153 - DNA, 2922 bp, synthetic construct
  source 1..2922: mol_type = other DNA
atggccttaccagtgaccgccttgctcctgccgctggccttgctgctccacgccgccaggccgctcgaggaggacctgaagaacgtgttcccacctgaggtggccgtgttcgagcctagcgaggccgagatcagccacacccagaaagccaccctcgtgtgcctggctaccggcttctaccccgaccatgtggaactgtcttggtgggtcaacggcaaagaggtgcacagcggcgtgtctaccgacccccagccactgaaagaacagcccgccctgaacgacagccggtactgcctgagcagcagactgagagtgtccgccaccttctggcagaacccccggaaccacttcagatgccaggtgcagttctacggcctgagcgagaacgacgagtggacccaggacagagccaagcccgtgacccagatcgtgtctgccgaagcctggggcagagccgatgatgtgattaagatccactggcaggaaaagaagtccaacaccatcctgggcagccaggaaggcaacaccatgaagaccaacgacacctacatgaagttcagctggctgaccgtgcccgagaagtccctggacaaagaacacagatgcatcgtgcggcacgaaaacaacaagaacggcgtggaccaggaaatcatcttcccacccatcaagaccgatgtgattacaatggaccccaaggacaactgctccaaggacgccaacgataccctgctgctccagctgaccaacaccagcgcctactacatgtacttgttgctgctgctgaagtccgtggtgtacttcgccatcatcacatgctgcctgctgcggagaaccgccttctgctgcaacggcgagaagtctagggccaagcgatctggatctggagcaacaaacttctcactactcaaacaagcaggtgacgtggaggagaatcccgggcctactagcatggccttaccagtgaccgccttgctcctgccgctggccttgctgctccacgccgccaggccggacatccagatgacacagagccctagcagcctgtctgccagcgtgggagacagagtgaccatcacctgtagagccagccagagcatcagcagctacctgaactggtatcagcagaagcccggcaaggcccctaaactgctgatctatgccgccagctctctccagagcggagtgcctagcagattttctggcagcggctccggcaccgatttcaccctgacaatatccagcctccagcctgaggacttcgccacctactactgccagcagagctacagcacccctctgacctttggacagggcaccaaggtggaaatcaagggcggaggcggaagtggaggcggaggatctggcggcggaggctctgaggtgcagctggttgaatctggcggaggactggttcagcctggcggatctctgagactgtcttgtgctgccagcggcttcaccttcagctcctacgccatgagctgggtccgacaggctcctggcaaaggactggaatgggtgtccgccatctctggctcaggcggcagcacatattacgccgactctgtgaagggcagattcaccatcagccgggacaacagcaagaacaccctgtacctccagatgaactccctgagagccgaggacaccgccgtgtactattgtgccagactgggctaccccaccaccacactgctgccctttgattattggggccagggcaccctggtcaccgtttcttctacgcgtatccagaaccctgatcctgccgtgtaccagctgcgggatagcaagagcagcgacaagagcgtgtgtctgttcaccgacttcgacagccagaccaacgtgtcccagagcaaggactccgacgtgtacatcaccgataagaccgtgctggacatgcggagcatggacttcaagagcaactccgccgtggcctggtccaacaagtccgatttcgcctgcgccaacgccttcaacaacagcattatccccgaggacacattcttcccaagccccgagagcagcgactccaccgaccacgtgaagcccaaagagacagagaacaccaagcagcccagcaagagctgccacaagcccaaggccatcgtgcacaccgagaaagtgaacatgatgagcctgaccgtgctgggcctgcggatgctgttcgccaaaaccgtggccgtgaacttcctgctgaccgccaagctgttcttcctccgcgccaagagaagcggatctggcgtgaagcagaccctgaatttcgacctgctgaagctggctggcgacgtggaatccaacccaggcccttctagaggccatatgaccgagtacaagcccacggtgcgcctcgccacccgcgacgacgtccccagggccgtacgcaccctcgccgccgcgttcgccgactaccccgccacgcgccacaccgtcgatccggaccgccacatcgagcgggtcaccgagctgcaagaactcttcctcacgcgcgtcgggctcgacatcggcaaggtgtgggtcgcggacgacggcgccgcggtggcggtctggaccacgccggagagcgtcgaagcgggggcggtgttcgccgagatcggcccgcgcatggccgagttgagcggttcccggctggccgcgcagcaacagatggaaggcctcctggcgccgcaccggcccaaggagcccgcgtggttcctggccaccgtcggcgtctcgcccgaccaccagggcaagggtctgggcagcgccgtcgtgctccccggagtggaggcggccgagcgcgccggggtgcccgccttcctggagacctccgcgccccgcaacctccccttctacgagcggctcggcttcaccgtcaccgccgacgtcgaggtgcccgaaggaccgcgcacctggtgcatgacccgcaagcccggtgcctga

SEQ ID NO: 39154 - DNA, 2922 bp, synthetic construct
  source 1..2922: mol_type = other DNA
atggccttaccagtgaccgccttgctcctgccgctggccttgctgctccacgccgccaggccgctcgagatccagaaccctgatcctgccgtgtaccagctgcgggatagcaagagcagcgacaagagcgtgtgtctgttcaccgacttcgacagccagaccaacgtgtcccagagcaaggactccgacgtgtacatcaccgataagaccgtgctggacatgcggagcatggacttcaagagcaactccgccgtggcctggtccaacaagtccgatttcgcctgcgccaacgccttcaacaacagcattatccccgaggacacattcttcccaagccccgagagcagcgactccaccgaccacgtgaagcccaaagagacagagaacaccaagcagcccagcaagagctgccacaagcccaaggccatcgtgcacaccgagaaagtgaacatgatgagcctgaccgtgctgggcctgcggatgctgttcgccaaaaccgtggccgtgaacttcctgctgaccgccaagctgttcttcctcagggccaagcgatctggatctggagcaacaaacttctcactactcaaacaagcaggtgacgtggaggagaatcccgggcctactagcatggccttaccagtgaccgccttgctcctgccgctggccttgctgctccacgccgccaggccggacatccagatgacacagagccctagcagcctgtctgccagcgtgggagacagagtgaccatcacctgtagagccagccagagcatcagcagctacctgaactggtatcagcagaagcccggcaaggcccctaaactgctgatctatgccgccagctctctccagagcggagtgcctagcagattttctggcagcggctccggcaccgatttcaccctgacaatatccagcctccagcctgaggacttcgccacctactactgccagcagagctacagcacccctctgacctttggacagggcaccaaggtggaaatcaagggcggaggcggaagtggaggcggaggatctggcggcggaggctctgaggtgcagctggttgaatctggcggaggactggttcagcctggcggatctctgagactgtcttgtgctgccagcggcttcaccttcagctcctacgccatgagctgggtccgacaggctcctggcaaaggactggaatgggtgtccgccatctctggctcaggcggcagcacatattacgccgactctgtgaagggcagattcaccatcagccgggacaacagcaagaacaccctgtacctccagatgaactccctgagagccgaggacaccgccgtgtactattgtgccagactgggctaccccaccaccacactgctgccctttgattattggggccagggcaccctggtcaccgtttcttctacgcgtgaggacctgaagaacgtgttcccacctgaggtggccgtgttcgagcctagcgaggccgagatcagccacacccagaaagccaccctcgtgtgcctggctaccggcttctaccccgaccatgtggaactgtcttggtgggtcaacggcaaagaggtgcacagcggcgtgtctaccgacccccagccactgaaagaacagcccgccctgaacgacagccggtactgcctgagcagcagactgagagtgtccgccaccttctggcagaacccccggaaccacttcagatgccaggtgcagttctacggcctgagcgagaacgacgagtggacccaggacagagccaagcccgtgacccagatcgtgtctgccgaagcctggggcagagccgatgatgtgattaagatccactggcaggaaaagaagtccaacaccatcctgggcagccaggaaggcaacaccatgaagaccaacgacacctacatgaagttcagctggctgaccgtgcccgagaagtccctggacaaagaacacagatgcatcgtgcggcacgaaaacaacaagaacggcgtggaccaggaaatcatcttcccacccatcaagaccgatgtgattacaatggaccccaaggacaactgctccaaggacgccaacgataccctgctgctccagctgaccaacaccagcgcctactacatgtacttgttgctgctgctgaagtccgtggtgtacttcgccatcatcacatgctgcctgctgcggagaaccgccttctgctgcaacggcgagaagtctcgcgccaagagaagcggatctggcgtgaagcagaccctgaatttcgacctgctgaagctggctggcgacgtggaatccaacccaggcccttctagaggccatatgaccgagtacaagcccacggtgcgcctcgccacccgcgacgacgtccccagggccgtacgcaccctcgccgccgcgttcgccgactaccccgccacgcgccacaccgtcgatccggaccgccacatcgagcgggtcaccgagctgcaagaactcttcctcacgcgcgtcgggctcgacatcggcaaggtgtgggtcgcggacgacggcgccgcggtggcggtctggaccacgccggagagcgtcgaagcgggggcggtgttcgccgagatcggcccgcgcatggccgagttgagcggttcccggctggccgcgcagcaacagatggaaggcctcctggcgccgcaccggcccaaggagcccgcgtggttcctggccaccgtcggcgtctcgcccgaccaccagggcaagggtctgggcagcgccgtcgtgctccccggagtggaggcggccgagcgcgccggggtgcccgccttcctggagacctccgcgccccgcaacctccccttctacgagcggctcggcttcaccgtcaccgccgacgtcgaggtgcccgaaggaccgcgcacctggtgcatgacccgcaagcccggtgcctga

SEQ ID NO: 39155 - DNA, 2616 bp, synthetic construct
  source 1..2616: mol_type = other DNA
atggccttaccagtgaccgccttgctcctgccgctggccttgctgctccacgccgccaggccgctcgaggaggacctgaagaacgtgttcccacctgaggtggccgtgttcgagcctagcaaggccgagatcgcccacacccagaaagccaccctcgtgtgcctggctaccggcttctaccccgaccatgtggaactgtcttggtgggtcaacggcaaagaggtgcacagcggcgtgtgtaccgacccccagccactgaaagaacagcccgccctgaacgacagccggtactgcctgagcagcagactgagagtgtccgccaccttctggcagaacccccggaaccacttcagatgccaggtgcagttctacggcctgagcgagaacgacgagtggacccaggacagagccaagcccgtgacccagatcgtgtctgccgaagcctggggcagagccgattgcggcatcaccagcgccagctaccaccagggcgtgctgagcgccaccatcctgtacgagatcctgctgggcaaggccaccctgtacgccgtgctggtgtctgccctggtgctgatggctatggtcaagcggaaggacagccggggaagggccaagcgatctggatctggagcaacaaacttctcactactcaaacaagcaggtgacgtggaggagaatcccgggcctactagcatggccttaccagtgaccgccttgctcctgccgctggccttgctgctccacgccgccaggccggacatccagatgacacagagccctagcagcctgtctgccagcgtgggagacagagtgaccatcacctgtagagccagccagagcatcagcagctacctgaactggtatcagcagaagcccggcaaggcccctaaactgctgatctatgccgccagctctctccagagcggagtgcctagcagattttctggcagcggctccggcaccgatttcaccctgacaatatccagcctccagcctgaggacttcgccacctactactgccagcagagctacagcacccctctgacctttggacagggcaccaaggtggaaatcaagggcggaggcggaagtggaggcggaggatctggcggcggaggctctgaggtgcagctggttgaatctggcggaggactggttcagcctggcggatctctgagactgtcttgtgctgccagcggcttcaccttcagctcctacgccatgagctgggtccgacaggctcctggcaaaggactggaatgggtgtccgccatctctggctcaggcggcagcacatattacgccgactctgtgaagggcagattcaccatcagccgggacaacagcaagaacaccctgtacctccagatgaactccctgagagccgaggacaccgccgtgtactattgtgccagactgggctaccccaccaccacactgctgccctttgattattggggccagggcaccctggtcaccgtttcttctacgcgtatccagaaccctgatcctgccgtgtaccagctgcgggatagcaagagcagcgacaagagcgtgtgtctgttcaccgacttcgacagccagaccaacgtgtcccagagcaaggactccgacgtgtacatcaccgataagtgcgtgctggacatgcggagcatggacttcaagagcaactccgccgtggcctggtccaacaagtccgatttcgcctgcgccaacgccttcaacaacagcattatccccgaggacacattcttcccaagcagcgacgtgccctgcgacgtgaagctggtggaaaagagcttcgagacagacaccaacctgaacttccagaacctgagcgtgatcggcttcagaatcctgctgctgaaagtggccggctttaacctgctgatgaccctgcggctgtggtccagccgcgccaagagaagcggatctggcgtgaagcagaccctgaatttcgacctgctgaagctggctggcgacgtggaatccaacccaggcccttctagaggccatatgaccgagtacaagcccacggtgcgcctcgccacccgcgacgacgtccccagggccgtacgcaccctcgccgccgcgttcgccgactaccccgccacgcgccacaccgtcgatccggaccgccacatcgagcgggtcaccgagctgcaagaactcttcctcacgcgcgtcgggctcgacatcggcaaggtgtgggtcgcggacgacggcgccgcggtggcggtctggaccacgccggagagcgtcgaagcgggggcggtgttcgccgagatcggcccgcgcatggccgagttgagcggttcccggctggccgcgcagcaacagatggaaggcctcctggcgccgcaccggcccaaggagcccgcgtggttcctggccaccgtcggcgtctcgcccgaccaccagggcaagggtctgggcagcgccgtcgtgctccccggagtggaggcggccgagcgcgccggggtgcccgccttcctggagacctccgcgccccgcaacctccccttctacgagcggctcggcttcaccgtcaccgccgacgtcgaggtgcccgaaggaccgcgcacctggtgcatgacccgcaagcccggtgcctga

SEQ ID NO: 39156 - DNA, 2616 bp, synthetic construct
  source 1..2616: mol_type = other DNA
atggccttaccagtgaccgccttgctcctgccgctggccttgctgctccacgccgccaggccgctcgagatccagaaccctgatcctgccgtgtaccagctgcgggatagcaagagcagcgacaagagcgtgtgtctgttcaccgacttcgacagccagaccaacgtgtcccagagcaaggactccgacgtgtacatcaccgataagtgcgtgctggacatgcggagcatggacttcaagagcaactccgccgtggcctggtccaacaagtccgatttcgcctgcgccaacgccttcaacaacagcattatccccgaggacacattcttcccaagcagcgacgtgccctgcgacgtgaagctggtggaaaagagcttcgagacagacaccaacctgaacttccagaacctgagcgtgatcggcttcagaatcctgctgctgaaagtggccggctttaacctgctgatgaccctgcggctgtggtccagcagggccaagcgatctggatctggagcaacaaacttctcactactcaaacaagcaggtgacgtggaggagaatcccgggcctactagcatggccttaccagtgaccgccttgctcctgccgctggccttgctgctccacgccgccaggccggacatccagatgacacagagccctagcagcctgtctgccagcgtgggagacagagtgaccatcacctgtagagccagccagagcatcagcagctacctgaactggtatcagcagaagcccggcaaggcccctaaactgctgatctatgccgccagctctctccagagcggagtgcctagcagattttctggcagcggctccggcaccgatttcaccctgacaatatccagcctccagcctgaggacttcgccacctactactgccagcagagctacagcacccctctgacctttggacagggcaccaaggtggaaatcaagggcggaggcggaagtggaggcggaggatctggcggcggaggctctgaggtgcagctggttgaatctggcggaggactggttcagcctggcggatctctgagactgtcttgtgctgccagcggcttcaccttcagctcctacgccatgagctgggtccgacaggctcctggcaaaggactggaatgggtgtccgccatctctggctcaggcggcagcacatattacgccgactctgtgaagggcagattcaccatcagccgggacaacagcaagaacaccctgtacctccagatgaactccctgagagccgaggacaccgccgtgtactattgtgccagactgggctaccccaccaccacactgctgccctttgattattggggccagggcaccctggtcaccgtttcttctacgcgtgaggacctgaagaacgtgttcccacctgaggtggccgtgttcgagcctagcaaggccgagatcgcccacacccagaaagccaccctcgtgtgcctggctaccggcttctaccccgaccatgtggaactgtcttggtgggtcaacggcaaagaggtgcacagcggcgtgtgtaccgacccccagccactgaaagaacagcccgccctgaacgacagccggtactgcctgagcagcagactgagagtgtccgccaccttctggcagaacccccggaaccacttcagatgccaggtgcagttctacggcctgagcgagaacgacgagtggacccaggacagagccaagcccgtgacccagatcgtgtctgccgaagcctggggcagagccgattgcggcatcaccagcgccagctaccaccagggcgtgctgagcgccaccatcctgtacgagatcctgctgggcaaggccaccctgtacgccgtgctggtgtctgccctggtgctgatggctatggtcaagcggaaggacagccggggacgcgccaagagaagcggatctggcgtgaagcagaccctgaatttcgacctgctgaagctggctggcgacgtggaatccaacccaggcccttctagaggccatatgaccgagtacaagcccacggtgcgcctcgccacccgcgacgacgtccccagggccgtacgcaccctcgccgccgcgttcgccgactaccccgccacgcgccacaccgtcgatccggaccgccacatcgagcgggtcaccgagctgcaagaactcttcctcacgcgcgtcgggctcgacatcggcaaggtgtgggtcgcggacgacggcgccgcggtggcggtctggaccacgccggagagcgtcgaagcgggggcggtgttcgccgagatcggcccgcgcatggccgagttgagcggttcccggctggccgcgcagcaacagatggaaggcctcctggcgccgcaccggcccaaggagcccgcgtggttcctggccaccgtcggcgtctcgcccgaccaccagggcaagggtctgggcagcgccgtcgtgctccccggagtggaggcggccgagcgcgccggggtgcccgccttcctggagacctccgcgccccgcaacctccccttctacgagcggctcggcttcaccgtcaccgccgacgtcgaggtgcccgaaggaccgcgcacctggtgcatgacccgcaagcccggtgcctga

SEQ ID NO: 39157 - DNA, 2295 bp, synthetic construct
  source 1..2295: mol_type = other DNA
atggccttaccagtgaccgccttgctcctgccgctggccttgctgctccacgccgccaggccgctcgagcagagttttgggttgttggaccctaaattgtgctatctgttggacggaatcctgttcatttacggagtgatcctgaccgcattgttcctgcgggttaagttttccagatccgcagacgcacccgcttaccaacaagggcagaaccaactctacaatgaacttaatttggggcggagggaagagtacgacgttctggacaaaaggaggggacgagatcccgagatgggcggaaagcctcagcgaaggaagaatccgcaagaggggctttataacgaactccagaaagataaaatggcagaagcctatagtgagattgggatgaagggagaaaggaggaggggtaaaggtcacgatgggttgtaccaaggattgagcacagccactaaagatacctatgatgcgctccacatgcaggccctgccgccaagaagggccaagcgatctggatctggagcaacaaacttctcactactcaaacaagcaggtgacgtggaggagaatcccgggcctactagcatggccttaccagtgaccgccttgctcctgccgctggccttgctgctccacgccgccaggccggacatccagatgacacagagccctagcagcctgtctgccagcgtgggagacagagtgaccatcacctgtagagccagccagagcatcagcagctacctgaactggtatcagcagaagcccggcaaggcccctaaactgctgatctatgccgccagctctctccagagcggagtgcctagcagattttctggcagcggctccggcaccgatttcaccctgacaatatccagcctccagcctgaggacttcgccacctactactgccagcagagctacagcacccctctgacctttggacagggcaccaaggtggaaatcaagggcggaggcggaagtggaggcggaggatctggcggcggaggctctgaggtgcagctggttgaatctggcggaggactggttcagcctggcggatctctgagactgtcttgtgctgccagcggcttcaccttcagctcctacgccatgagctgggtccgacaggctcctggcaaaggactggaatgggtgtccgccatctctggctcaggcggcagcacatattacgccgactctgtgaagggcagattcaccatcagccgggacaacagcaagaacaccctgtacctccagatgaactccctgagagccgaggacaccgccgtgtactattgtgccagactgggctaccccaccaccacactgctgccctttgattattggggccagggcaccctggtcaccgtttcttctacgcgtgagctgggagagcctcagctgtgctatatcctggacgccatcctgtttctgtacggcatcgtgctgaccctgctgtactgccggctgaagatccaagtgcggaaggccgccatcaccagctacgagaaatccgacggcgtgtacaccggcctgagcaccagaaatcaagagacatacgagacactgaagcacgaaaagcctccacaacgcgccaagagaagcggatctggcgtgaagcagaccctgaatttcgacctgctgaagctggctggcgacgtggaatccaacccaggcccttctagaggccatatgaccgagtacaagcccacggtgcgcctcgccacccgcgacgacgtccccagggccgtacgcaccctcgccgccgcgttcgccgactaccccgccacgcgccacaccgtcgatccggaccgccacatcgagcgggtcaccgagctgcaagaactcttcctcacgcgcgtcgggctcgacatcggcaaggtgtgggtcgcggacgacggcgccgcggtggcggtctggaccacgccggagagcgtcgaagcgggggcggtgttcgccgagatcggcccgcgcatggccgagttgagcggttcccggctggccgcgcagcaacagatggaaggcctcctggcgccgcaccggcccaaggagcccgcgtggttcctggccaccgtcggcgtctcgcccgaccaccagggcaagggtctgggcagcgccgtcgtgctccccggagtggaggcggccgagcgcgccggggtgcccgccttcctggagacctccgcgccccgcaacctccccttctacgagcggctcggcttcaccgtcaccgccgacgtcgaggtgcccgaaggaccgcgcacctggtgcatgacccgcaagcccggtgcctga

SEQ ID NO: 39158 - DNA, 2928 bp, synthetic construct; identical to SEQ ID NO: 39149
  source 1..2928: mol_type = other DNA

SEQ ID NO: 39159 - DNA, 2928 bp, synthetic construct; identical to SEQ ID NO: 39150
  source 1..2928: mol_type = other DNA

SEQ ID NO: 39160 - DNA, 2925 bp, synthetic construct
  source 1..2925: mol_type = other DNA
atggccttaccagtgaccgccttgctcctgccgctggccttgctgctccacgccgccaggccgctcgaggaggaggacctgaagaacgtgttcccacctgaggtggccgtgttcgagcctagcgaggccgagatcagccacacccagaaagccaccctcgtgtgcctggctaccggcttctaccccgaccatgtggaactgtcttggtgggtcaacggcaaagaggtgcacagcggcgtgtgtaccgacccccagccactgaaagaacagcccgccctgaacgacagccggtactgcctgagcagcagactgagagtgtccgccaccttctggcagaacccccggaaccacttcagatgccaggtgcagttctacggcctgagcgagaacgacgagtggacccaggacagagccaagcccgtgacccagatcgtgtctgccgaagcctggggcagagccgatgatgtgattaagatccactggcaggaaaagaagtccaacaccatcctgggcagccaggaaggcaacaccatgaagaccaacgacacctacatgaagttcagctggctgaccgtgcccgagaagtccctggacaaagaacacagatgcatcgtgcggcacgaaaacaacaagaacggcgtggaccaggaaatcatcttcccacccatcaagaccgatgtgattacaatggaccccaaggacaactgctccaaggacgccaacgataccctgctgctccagctgaccaacaccagcgcctactacatgtacttgttgctgctgctgaagtccgtggtgtacttcgccatcatcacatgctgcctgctgcggagaaccgccttctgctgcaacggcgagaagtctagggccaagcgatctggatctggagcaacaaacttctcactactcaaacaagcaggtgacgtggaggagaatcccgggcctactagcatggccttaccagtgaccgccttgctcctgccgctggccttgctgctccacgccgccaggccggacatccagatgacacagagccctagcagcctgtctgccagcgtgggagacagagtgaccatcacctgtagagccagccagagcatcagcagctacctgaactggtatcagcagaagcccggcaaggcccctaaactgctgatctatgccgccagctctctccagagcggagtgcctagcagattttctggcagcggctccggcaccgatttcaccctgacaatatccagcctccagcctgaggacttcgccacctactactgccagcagagctacagcacccctctgacctttggacagggcaccaaggtggaaatcaagggcggaggcggaagtggaggcggaggatctggcggcggaggctctgaggtgcagctggttgaatctggcggaggactggttcagcctggcggatctctgagactgtcttgtgctgccagcggcttcaccttcagctcctacgccatgagctgggtccgacaggctcctggcaaaggactggaatgggtgtccgccatctctggctcaggcggcagcacatattacgccgactctgtgaagggcagattcaccatcagccgggacaacagcaagaacaccctgtacctccagatgaactccctgagagccgaggacaccgccgtgtactattgtgccagactgggctaccccaccaccacactgctgccctttgattattggggccagggcaccctggtcaccgtttcttctacgcgtatccagaaccctgatcctgccgtgtaccagctgcgggatagcaagagcagcgacaagagcgtgtgtctgttcaccgacttcgacagccagaccaacgtgtcccagagcaaggactccgacgtgtacatcaccgataagtgcgtgctggacatgcggagcatggacttcaagagcaactccgccgtggcctggtccaacaagtccgatttcgcctgcgccaacgccttcaacaacagcattatccccgaggacacattcttcccaagccccgagagcagcgactccaccgaccacgtgaagcccaaagagacagagaacaccaagcagcccagcaagagctgccacaagcccaaggccatcgtgcacaccgagaaagtgaacatgatgagcctgaccgtgctgggcctgcggatgctgttcgccaaaaccgtggccgtgaacttcctgctgaccgccaagctgttcttcctccgcgccaagagaagcggatctggcgtgaagcagaccctgaatttcgacctgctgaagctggctggcgacgtggaatccaacccaggcccttctagaggccatatgaccgagtacaagcccacggtgcgcctcgccacccgcgacgacgtccccagggccgtacgcaccctcgccgccgcgttcgccgactaccccgccacgcgccacaccgtcgatccggaccgccacatcgagcgggtcaccgagctgcaagaactcttcctcacgcgcgtcgggctcgacatcggcaaggtgtgggtcgcggacgacggcgccgcggtggcggtctggaccacgccggagagcgtcgaagcgggggcggtgttcgccgagatcggcccgcgcatggccgagttgagcggttcccggctggccgcgcagcaacagatggaaggcctcctggcgccgcaccggcccaaggagcccgcgtggttcctggccaccgtcggcgtctcgcccgaccaccagggcaagggtctgggcagcgccgtcgtgctccccggagtggaggcggccgagcgcgccggggtgcccgccttcctggagacctccgcgccccgcaacctccccttctacgagcggctcggcttcaccgtcaccgccgacgtcgaggtgcccgaaggaccgcgcacctggtgcatgacccgcaagcccggtgcctga

SEQ ID NO: 39161 - DNA, 2925 bp, synthetic construct
  source 1..2925: mol_type = other DNA
atggccttaccagtgaccgccttgctcctgccgctggccttgctgctccacgccgccaggccgctcgagatccagaaccctgatcctgccgtgtaccagctgcgggatagcaagagcagcgacaagagcgtgtgtctgttcaccgacttcgacagccagaccaacgtgtcccagagcaaggactccgacgtgtacatcaccgataagtgcgtgctggacatgcggagcatggacttcaagagcaactccgccgtggcctggtccaacaagtccgatttcgcctgcgccaacgccttcaacaacagcattatccccgaggacacattcttcccaagccccgagagcagcgactccaccgaccacgtgaagcccaaagagacagagaacaccaagcagcccagcaagagctgccacaagcccaaggccatcgtgcacaccgagaaagtgaacatgatgagcctgaccgtgctgggcctgcggatgctgttcgccaaaaccgtggccgtgaacttcctgctgaccgccaagctgttcttcctcagggccaagcgatctggatctggagcaacaaacttctcactactcaaacaagcaggtgacgtggaggagaatcccgggcctactagcatggccttaccagtgaccgccttgctcctgccgctggccttgctgctccacgccgccaggccggacatccagatgacacagagccctagcagcctgtctgccagcgtgggagacagagtgaccatcacctgtagagccagccagagcatcagcagctacctgaactggtatcagcagaagcccggcaaggcccctaaactgctgatctatgccgccagctctctccagagcggagtgcctagcagattttctggcagcggctccggcaccgatttcaccctgacaatatccagcctccagcctgaggacttcgccacctactactgccagcagagctacagcacccctctgacctttggacagggcaccaaggtggaaatcaagggcggaggcggaagtggaggcggaggatctggcggcggaggctctgaggtgcagctggttgaatctggcggaggactggttcagcctggcggatctctgagactgtcttgtgctgccagcggcttcaccttcagctcctacgccatgagctgggtccgacaggctcctggcaaaggactggaatgggtgtccgccatctctggctcaggcggcagcacatattacgccgactctgtgaagggcagattcaccatcagccgggacaacagcaagaacaccctgtacctccagatgaactccctgagagccgaggacaccgccgtgtactattgtgccagactgggctaccccaccaccacactgctgccctttgattattggggccagggcaccctggtcaccgtttcttctacgcgtgaggaggacctgaagaacgtgttcccacctgaggtggccgtgttcgagcctagcgaggccgagatcagccacacccagaaagccaccctcgtgtgcctggctaccggcttctaccccgaccatgtggaactgtcttggtgggtcaacggcaaagaggtgcacagcggcgtgtgtaccgacccccagccactgaaagaacagcccgccctgaacgacagccggtactgcctgagcagcagactgagagtgtccgccaccttctggcagaacccccggaaccacttcagatgccaggtgcagttctacggcctgagcgagaacgacgagtggacccaggacagagccaagcccgtgacccagatcgtgtctgccgaagcctggggcagagccgatgatgtgattaagatccactggcaggaaaagaagtccaacaccatcctgggcagccaggaaggcaacaccatgaagaccaacgacacctacatgaagttcagctggctgaccgtgcccgagaagtccctggacaaagaacacagatgcatcgtgcggcacgaaaacaacaagaacggcgtggaccaggaaatcatcttcccacccatcaagaccgatgtgattacaatggaccccaaggacaactgctccaaggacgccaacgataccctgctgctccagctgaccaacaccagcgcctactacatgtacttgttgctgctgctgaagtccgtggtgtacttcgccatcatcacatgctgcctgctgcggagaaccgccttctgctgcaacggcgagaagtctcgcgccaagagaagcggatctggcgtgaagcagaccctgaatttcgacctgctgaagctggctggcgacgtggaatccaacccaggcccttctagaggccatatgaccgagtacaagcccacggtgcgcctcgccacccgcgacgacgtccccagggccgtacgcaccctcgccgccgcgttcgccgactaccccgccacgcgccacaccgtcgatccggaccgccacatcgagcgggtcaccgagctgcaagaactcttcctcacgcgcgtcgggctcgacatcggcaaggtgtgggtcgcggacgacggcgccgcggtggcggtctggaccacgccggagagcgtcgaagcgggggcggtgttcgccgagatcggcccgcgcatggccgagttgagcggttcccggctggccgcgcagcaacagatggaaggcctcctggcgccgcaccggcccaaggagcccgcgtggttcctggccaccgtcggcgtctcgcccgaccaccagggcaagggtctgggcagcgccgtcgtgctccccggagtggaggcggccgagcgcgccggggtgcccgccttcctggagacctccgcgccccgcaacctccccttctacgagcggctcggcttcaccgtcaccgccgacgtcgaggtgcccgaaggaccgcgcacctggtgcatgacccgcaagcccggtgcctga

SEQ ID NO: 39162 - DNA, 2616 bp, synthetic construct
  source 1..2616: mol_type = other DNA
atggccttaccagtgaccgccttgctcctgccgctggccttgctgctccacgccgccaggccgctcgaggaggacctgaagaacgtgttcccacctgaggtggccgtgttcgagcctagcgaggccgagatcagccacacccagaaagccaccctcgtgtgcctggctaccggcttctaccccgaccatgtggaactgtcttggtgggtcaacggcaaagaggtgcacagcggcgtgtctaccgacccccagccactgaaagaacagcccgccctgaacgacagccggtactgcctgagcagcagactgagagtgtccgccaccttctggcagaacccccggaaccacttcagatgccaggtgcagttctacggcctgagcgagaacgacgagtggacccaggacagagccaagcccgtgacccagatcgtgtctgccgaagcctggggcagagccgattgcggctttaccagcgagagctaccagcagggcgtgctgagcgccaccaacctgagcgtgatcggcttcagaatcctgctgctgaaagtggccggctttaacctgctgatgaccctgcggctgtggtccagcagggccaagcgatctggatctggagcaacaaacttctcactactcaaacaagcaggtgacgtggaggagaatcccgggcctactagcatggccttaccagtgaccgccttgctcctgccgctggccttgctgctccacgccgccaggccggacatccagatgacacagagccctagcagcctgtctgccagcgtgggagacagagtgaccatcacctgtagagccagccagagcatcagcagctacctgaactggtatcagcagaagcccggcaaggcccctaaactgctgatctatgccgccagctctctccagagcggagtgcctagcagattttctggcagcggctccggcaccgatttcaccctgacaatatccagcctccagcctgaggacttcgccacctactactgccagcagagctacagcacccctctgacctttggacagggcaccaaggtggaaatcaagggcggaggcggaagtggaggcggaggatctggcggcggaggctctgaggtgcagctggttgaatctggcggaggactggttcagcctggcggatctctgagactgtcttgtgctgccagcggcttcaccttcagctcctacgccatgagctgggtccgacaggctcctggcaaaggactggaatgggtgtccgccatctctggctcaggcggcagcacatattacgccgactctgtgaagggcagattcaccatcagccgggacaacagcaagaacaccctgtacctccagatgaactccctgagagccgaggacaccgccgtgtactattgtgccagactgggctaccccaccaccacactgctgccctttgattattggggccagggcaccctggtcaccgtttcttctacgcgtatccagaaccctgatcctgccgtgtaccagctgcgggatagcaagagcagcgacaagagcgtgtgtctgttcaccgacttcgacagccagaccaacgtgtcccagagcaaggactccgacgtgtacatcaccgataagaccgtgctggacatgcggagcatggacttcaagagcaactccgccgtggcctggtccaacaagtccgatttcgcctgcgccaacgccttcaacaacagcattatccccgaggacacattcttcccaagccccgagagcagctgcgacgtgaagctggtggaaaagagcttcgagacagacaccaacctgaacttccagatcctgtacgagatcctgctgggcaaggccaccctgtacgccgtgctggtgtctgccctggtgctgatggctatggtcaagcggaaggacagccggggacgcgccaagagaagcggatctggcgtgaagcagaccctgaatttcgacctgctgaagctggctggcgacgtggaatccaacccaggcccttctagaggccatatgaccgagtacaagcccacggtgcgcctcgccacccgcgacgacgtccccagggccgtacgcaccctcgccgccgcgttcgccgactaccccgccacgcgccacaccgtcgatccggaccgccacatcgagcgggtcaccgagctgcaagaactcttcctcacgcgcgtcgggctcgacatcggcaaggtgtgggtcgcggacgacggcgccgcggtggcggtctggaccacgccggagagcgtcgaagcgggggcggtgttcgccgagatcggcccgcgcatggccgagttgagcggttcccggctggccgcgcagcaacagatggaaggcctcctggcgccgcaccggcccaaggagcccgcgtggttcctggccaccgtcggcgtctcgcccgaccaccagggcaagggtctgggcagcgccgtcgtgctccccggagtggaggcggccgagcgcgccggggtgcccgccttcctggagacctccgcgccccgcaacctccccttctacgagcggctcggcttcaccgtcaccgccgacgtcgaggtgcccgaaggaccgcgcacctggtgcatgacccgcaagcccggtgcctga

SEQ ID NO: 39163 - DNA, 2616 bp, synthetic construct
  source 1..2616: mol_type = other DNA
atggccttaccagtgaccgccttgctcctgccgctggccttgctgctccacgccgccaggccgctcgagatccagaaccctgatcctgccgtgtaccagctgcgggatagcaagagcagcgacaagagcgtgtgtctgttcaccgacttcgacagccagaccaacgtgtcccagagcaaggactccgacgtgtacatcaccgataagaccgtgctggacatgcggagcatggacttcaagagcaactccgccgtggcctggtccaacaagtccgatttcgcctgcgccaacgccttcaacaacagcattatccccgaggacacattcttcccaagccccgagagcagctgcgacgtgaagctggtggaaaagagcttcgagacagacaccaacctgaacttccagatcctgtacgagatcctgctgggcaaggccaccctgtacgccgtgctggtgtctgccctggtgctgatggctatggtcaagcggaaggacagccggggaagggccaagcgatctggatctggagcaacaaacttctcactactcaaacaagcaggtgacgtggaggagaatcccgggcctactagcatggccttaccagtgaccgccttgctcctgccgctggccttgctgctccacgccgccaggccggacatccagatgacacagagccctagcagcctgtctgccagcgtgggagacagagtgaccatcacctgtagagccagccagagcatcagcagctacctgaactggtatcagcagaagcccggcaaggcccctaaactgctgatctatgccgccagctctctccagagcggagtgcctagcagattttctggcagcggctccggcaccgatttcaccctgacaatatccagcctccagcctgaggacttcgccacctactactgccagcagagctacagcacccctctgacctttggacagggcaccaaggtggaaatcaagggcggaggcggaagtggaggcggaggatctggcggcggaggctctgaggtgcagctggttgaatctggcggaggactggttcagcctggcggatctctgagactgtcttgtgctgccagcggcttcaccttcagctcctacgccatgagctgggtccgacaggctcctggcaaaggactggaatgggtgtccgccatctctggctcaggcggcagcacatattacgccgactctgtgaagggcagattcaccatcagccgggacaacagcaagaacaccctgtacctccagatgaactccctgagagccgaggacaccgccgtgtactattgtgccagactgggctaccccaccaccacactgctgccctttgattattggggccagggcaccctggtcaccgtttcttctacgcgtgaggacctgaagaacgtgttcccacctgaggtggccgtgttcgagcctagcgaggccgagatcagccacacccagaaagccaccctcgtgtgcctggctaccggcttctaccccgaccatgtggaactgtcttggtgggtcaacggcaaagaggtgcacagcggcgtgtctaccgacccccagccactgaaagaacagcccgccctgaacgacagccggtactgcctgagcagcagactgagagtgtccgccaccttctggcagaacccccggaaccacttcagatgccaggtgcagttctacggcctgagcgagaacgacgagtggacccaggacagagccaagcccgtgacccagatcgtgtctgccgaagcctggggcagagccgattgcggctttaccagcgagagctaccagcagggcgtgctgagcgccaccaacctgagcgtgatcggcttcagaatcctgctgctgaaagtggccggctttaacctgctgatgaccctgcggctgtggtccagccgcgccaagagaagcggatctggcgtgaagcagaccctgaatttcgacctgctgaagctggctggcgacgtggaatccaacccaggcccttctagaggccatatgaccgagtacaagcccacggtgcgcctcgccacccgcgacgacgtccccagggccgtacgcaccctcgccgccgcgttcgccgactaccccgccacgcgccacaccgtcgatccggaccgccacatcgagcgggtcaccgagctgcaagaactcttcctcacgcgcgtcgggctcgacatcggcaaggtgtgggtcgcggacgacggcgccgcggtggcggtctggaccacgccggagagcgtcgaagcgggggcggtgttcgccgagatcggcccgcgcatggccgagttgagcggttcccggctggccgcgcagcaacagatggaaggcctcctggcgccgcaccggcccaaggagcccgcgtggttcctggccaccgtcggcgtctcgcccgaccaccagggcaagggtctgggcagcgccgtcgtgctccccggagtggaggcggccgagcgcgccggggtgcccgccttcctggagacctccgcgccccgcaacctccccttctacgagcggctcggcttcaccgtcaccgccgacgtcgaggtgcccgaaggaccgcgcacctggtgcatgacccgcaagcccggtgcctga

SEQ ID NO: 39164 - DNA, 2616 bp, synthetic construct
  source 1..2616: mol_type = other DNA
atggccttaccagtgaccgccttgctcctgccgctggccttgctgctccacgccgccaggccgctcgaggaggacctgaagaacgtgttcccacctgaggtggccgtgttcgagcctagcgaggccgagatcagccacacccagaaagccaccctcgtgtgcctggctaccggcttctaccccgaccatgtggaactgtcttggtgggtcaacggcaaagaggtgcacagcggcgtgtgtaccgacccccagccactgaaagaacagcccgccctgaacgacagccggtactgcctgagcagcagactgagagtgtccgccaccttctggcagaacccccggaaccacttcagatgccaggtgcagttctacggcctgagcgagaacgacgagtggacccaggacagagccaagcccgtgacccagatcgtgtctgccgaagcctggggcagagccgattgcgacgtgaagctggtggaaaagagcttcgagacagacaccaacctgaacttccagaacctgagcgtgatcggcttcagaatcctgctgctgaaagtggccggctttaacctgctgatgaccctgcggctgtggtccagcagggccaagcgatctggatctggagcaacaaacttctcactactcaaacaagcaggtgacgtggaggagaatcccgggcctactagcatggccttaccagtgaccgccttgctcctgccgctggccttgctgctccacgccgccaggccggacatccagatgacacagagccctagcagcctgtctgccagcgtgggagacagagtgaccatcacctgtagagccagccagagcatcagcagctacctgaactggtatcagcagaagcccggcaaggcccctaaactgctgatctatgccgccagctctctccagagcggagtgcctagcagattttctggcagcggctccggcaccgatttcaccctgacaatatccagcctccagcctgaggacttcgccacctactactgccagcagagctacagcacccctctgacctttggacagggcaccaaggtggaaatcaagggcggaggcggaagtggaggcggaggatctggcggcggaggctctgaggtgcagctggttgaatctggcggaggactggttcagcctggcggatctctgagactgtcttgtgctgccagcggcttcaccttcagctcctacgccatgagctgggtccgacaggctcctggcaaaggactggaatgggtgtccgccatctctggctcaggcggcagcacatattacgccgactctgtgaagggcagattcaccatcagccgggacaacagcaagaacaccctgtacctccagatgaactccctgagagccgaggacaccgccgtgtactattgtgccagactgggctaccccaccaccacactgctgccctttgattattggggccagggcaccctggtcaccgtttcttctacgcgtatccagaaccctgatcctgccgtgtaccagctgcgggatagcaagagcagcgacaagagcgtgtgtctgttcaccgacttcgacagccagaccaacgtgtcccagagcaaggactccgacgtgtacatcaccgataagtgcgtgctggacatgcggagcatggacttcaagagcaactccgccgtggcctggtccaacaagtccgatttcgcctgcgccaacgccttcaacaacagcattatccccgaggacacattcttcccaagccccgagagcagctgcggctttaccagcgagagctaccagcagggcgtgctgagcgccaccatcctgtacgagatcctgctgggcaaggccaccctgtacgccgtgctggtgtctgccctggtgctgatggctatggtcaagcggaaggacagccggggacgcgccaagagaagcggatctggcgtgaagcagaccctgaatttcgacctgctgaagctggctggcgacgtggaatccaacccaggcccttctagaggccatatgaccgagtacaagcccacggtgcgcctcgccacccgcgacgacgtccccagggccgtacgcaccctcgccgccgcgttcgccgactaccccgccacgcgccacaccgtcgatccggaccgccacatcgagcgggtcaccgagctgcaagaactcttcctcacgcgcgtcgggctcgacatcggcaaggtgtgggtcgcggacgacggcgccgcggtggcggtctggaccacgccggagagcgtcgaagcgggggcggtgttcgccgagatcggcccgcgcatggccgagttgagcggttcccggctggccgcgcagcaacagatggaaggcctcctggcgccgcaccggcccaaggagcccgcgtggttcctggccaccgtcggcgtctcgcccgaccaccagggcaagggtctgggcagcgccgtcgtgctccccggagtggaggcggccgagcgcgccggggtgcccgccttcctggagacctccgcgccccgcaacctccccttctacgagcggctcggcttcaccgtcaccgccgacgtcgaggtgcccgaaggaccgcgcacctggtgcatgacccgcaagcccggtgcctga

SEQ ID NO: 39165 - DNA, 2616 bp, synthetic construct
  source 1..2616: mol_type = other DNA
atggccttaccagtgaccgccttgctcctgccgctggccttgctgctccacgccgccaggccgctcgaggaggacctgaagaacgtgttcccacctgaggtggccgtgttcgagcctagcgaggccgagatcagccacacccagaaagccaccctcgtgtgcctggctaccggcttctaccccgaccatgtggaactgtcttggtgggtcaacggcaaagaggtgcacagcggcgtgtctaccgacccccagccactgaaagaacagcccgccctgaacgacagccggtactgcctgagcagcagactgagagtgtccgccaccttctggcagaacccccggaaccacttcagatgccaggtgcagttctacggcctgagcgagaacgacgagtggacccaggacagagccaagcccgtgacccagatcgtgtctgccgaagcctggggcagagccgattgcgacgtgaagctggtggaaaagagcttcgagacagacaccaacctgaacttccagaacctgagcgtgatcggcttcagaatcctgctgctgaaagtggccggctttaacctgctgatgaccctgcggctgtggtccagcagggccaagcgatctggatctggagcaacaaacttctcactactcaaacaagcaggtgacgtggaggagaatcccgggcctactagcatggccttaccagtgaccgccttgctcctgccgctggccttgctgctccacgccgccaggccggacatccagatgacacagagccctagcagcctgtctgccagcgtgggagacagagtgaccatcacctgtagagccagccagagcatcagcagctacctgaactggtatcagcagaagcccggcaaggcccctaaactgctgatctatgccgccagctctctccagagcggagtgcctagcagattttctggcagcggctccggcaccgatttcaccctgacaatatccagcctccagcctgaggacttcgccacctactactgccagcagagctacagcacccctctgacctttggacagggcaccaaggtggaaatcaagggcggaggcggaagtggaggcggaggatctggcggcggaggctctgaggtgcagctggttgaatctggcggaggactggttcagcctggcggatctctgagactgtcttgtgctgccagcggcttcaccttcagctcctacgccatgagctgggtccgacaggctcctggcaaaggactggaatgggtgtccgccatctctggctcaggcggcagcacatattacgccgactctgtgaagggcagattcaccatcagccgggacaacagcaagaacaccctgtacctccagatgaactccctgagagccgaggacaccgccgtgtactattgtgccagactgggctaccccaccaccacactgctgccctttgattattggggccagggcaccctggtcaccgtttcttctacgcgtatccagaaccctgatcctgccgtgtaccagctgcgggatagcaagagcagcgacaagagcgtgtgtctgttcaccgacttcgacagccagaccaacgtgtcccagagcaaggactccgacgtgtacatcaccgataagaccgtgctggacatgcggagcatggacttcaagagcaactccgccgtggcctggtccaacaagtccgatttcgcctgcgccaacgccttcaacaacagcattatccccgaggacacattcttcccaagccccgagagcagctgcggctttaccagcgagagctaccagcagggcgtgctgagcgccaccatcctgtacgagatcctgctgggcaaggccaccctgtacgccgtgctggtgtctgccctggtgctgatggctatggtcaagcggaaggacagccggggacgcgccaagagaagcggatctggcgtgaagcagaccctgaatttcgacctgctgaagctggctggcgacgtggaatccaacccaggcccttctagaggccatatgaccgagtacaagcccacggtgcgcctcgccacccgcgacgacgtccccagggccgtacgcaccctcgccgccgcgttcgccgactaccccgccacgcgccacaccgtcgatccggaccgccacatcgagcgggtcaccgagctgcaagaactcttcctcacgcgcgtcgggctcgacatcggcaaggtgtgggtcgcggacgacggcgccgcggtggcggtctggaccacgccggagagcgtcgaagcgggggcggtgttcgccgagatcggcccgcgcatggccgagttgagcggttcccggctggccgcgcagcaacagatggaaggcctcctggcgccgcaccggcccaaggagcccgcgtggttcctggccaccgtcggcgtctcgcccgaccaccagggcaagggtctgggcagcgccgtcgtgctccccggagtggaggcggccgagcgcgccggggtgcccgccttcctggagacctccgcgccccgcaacctccccttctacgagcggctcggcttcaccgtcaccgccgacgtcgaggtgcccgaaggaccgcgcacctggtgcatgacccgcaagcccggtgcctga

SEQ ID NO: 39166 - DNA, 2925 bp, synthetic construct
  source 1..2925: mol_type = other DNA
atggccttaccagtgaccgccttgctcctgccgctggccttgctgctccacgccgccaggccgctcgaggaggaggacctgaagaacgtgttcccacctgaggtggccgtgttcgagcctagcgaggccgagatcagccacacccagaaagccaccctcgtgtgcctggctaccggcttctaccccgaccatgtggaactgtcttggtgggtcaacggcaaagaggtgcacagcggcgtgtctaccgacccccagccactgaaagaacagcccgccctgaacgacagccggtactgcctgagcagcagactgagagtgtccgccaccttctggcagaacccccggaaccacttcagatgccaggtgcagttctacggcctgagcgagaacgacgagtggacccaggacagagccaagcccgtgacccagatcgtgtctgccgaagcctggggcagagccgatgatgtgattaagatccactggcaggaaaagaagtccaacaccatcctgggcagccaggaaggcaacaccatgaagaccaacgacacctacatgaagttcagctggctgaccgtgcccgagaagtccctggacaaagaacacagatgcatcgtgcggcacgaaaacaacaagaacggcgtggaccaggaaatcatcttcccacccatcaagaccgatgtgattacaatggaccccaaggacaactgctccaaggacgccaacgataccctgctgctccagctgaccaacaccagcgcctactacatgtacttgttgctgctgctgaagtccgtggtgtacttcgccatcatcacatgctgcctgctgcggagaaccgccttctgctgcaacggcgagaagtctagggccaagcgatctggatctggagcaacaaacttctcactactcaaacaagcaggtgacgtggaggagaatcccgggcctactagcatggccttaccagtgaccgccttgctcctgccgctggccttgctgctccacgccgccaggccggacatccagatgacacagagccctagcagcctgtctgccagcgtgggagacagagtgaccatcacctgtagagccagccagagcatcagcagctacctgaactggtatcagcagaagcccggcaaggcccctaaactgctgatctatgccgccagctctctccagagcggagtgcctagcagattttctggcagcggctccggcaccgatttcaccctgacaatatccagcctccagcctgaggacttcgccacctactactgccagcagagctacagcacccctctgacctttggacagggcaccaaggtggaaatcaagggcggaggcggaagtggaggcggaggatctggcggcggaggctctgaggtgcagctggttgaatctggcggaggactggttcagcctggcggatctctgagactgtcttgtgctgccagcggcttcaccttcagctcctacgccatgagctgggtccgacaggctcctggcaaaggactggaatgggtgtccgccatctctggctcaggcggcagcacatattacgccgactctgtgaagggcagattcaccatcagccgggacaacagcaagaacaccctgtacctccagatgaactccctgagagccgaggacaccgccgtgtactattgtgccagactgggctaccccaccaccacactgctgccctttgattattggggccagggcaccctggtcaccgtttcttctacgcgtatccagaaccctgatcctgccgtgtaccagctgcgggatagcaagagcagcgacaagagcgtgtgtctgttcaccgacttcgacagccagaccaacgtgtcccagagcaaggactccgacgtgtacatcaccgataagaccgtgctggacatgcggagcatggacttcaagagcaactccgccgtggcctggtccaacaagtccgatttcgcctgcgccaacgccttcaacaacagcattatccccgaggacacattcttcccaagccccgagagcagcgactccaccgaccacgtgaagcccaaagagacagagaacaccaagcagcccagcaagagctgccacaagcccaaggccatcgtgcacaccgagaaagtgaacatgatgagcctgaccgtgctgggcctgcggatgctgttcgccaaaaccgtggccgtgaacttcctgctgaccgccaagctgttcttcctccgcgccaagagaagcggatctggcgtgaagcagaccctgaatttcgacctgctgaagctggctggcgacgtggaatccaacccaggcccttctagaggccatatgaccgagtacaagcccacggtgcgcctcgccacccgcgacgacgtccccagggccgtacgcaccctcgccgccgcgttcgccgactaccccgccacgcgccacaccgtcgatccggaccgccacatcgagcgggtcaccgagctgcaagaactcttcctcacgcgcgtcgggctcgacatcggcaaggtgtgggtcgcggacgacggcgccgcggtggcggtctggaccacgccggagagcgtcgaagcgggggcggtgttcgccgagatcggcccgcgcatggccgagttgagcggttcccggctggccgcgcagcaacagatggaaggcctcctggcgccgcaccggcccaaggagcccgcgtggttcctggccaccgtcggcgtctcgcccgaccaccagggcaagggtctgggcagcgccgtcgtgctccccggagtggaggcggccgagcgcgccggggtgcccgccttcctggagacctccgcgccccgcaacctccccttctacgagcggctcggcttcaccgtcaccgccgacgtcgaggtgcccgaaggaccgcgcacctggtgcatgacccgcaagcccggtgcctga

SEQ ID NO: 39167 - DNA, 2616 bp, synthetic construct
  source 1..2616: mol_type = other DNA
atggccttaccagtgaccgccttgctcctgccgctggccttgctgctccacgccgccaggccgctcgaggaggacctgaagaacgtgttcccacctgaggtggccgtgttcgagcctagcgaggccgagatcagccacacccagaaagccaccctcgtgtgcctggctaccggcttctaccccgaccatgtggaactgtcttggtgggtcaacggcaaagaggtgcacagcggcgtgtgtaccgacccccagccactgaaagaacagcccgccctgaacgacagccggtactgcctgagcagcagactgagagtgtccgccaccttctggcagaacccccggaaccacttcagatgccaggtgcagttctacggcctgagcgagaacgacgagtggacccaggacagagccaagcccgtgacccagatcgtgtctgccgaagcctggggcagagccgattgcggctttaccagcgagagctaccagcagggcgtgctgagcgccaccaacctgagcgtgatcggcttcagaatcctgctgctgaaagtggccggctttaacctgctgatgaccctgcggctgtggtccagcagggccaagcgatctggatctggagcaacaaacttctcactactcaaacaagcaggtgacgtggaggagaatcccgggcctactagcatggccttaccagtgaccgccttgctcctgccgctggccttgctgctccacgccgccaggccggacatccagatgacacagagccctagcagcctgtctgccagcgtgggagacagagtgaccatcacctgtagagccagccagagcatcagcagctacctgaactggtatcagcagaagcccggcaaggcccctaaactgctgatctatgccgccagctctctccagagcggagtgcctagcagattttctggcagcggctccggcaccgatttcaccctgacaatatccagcctccagcctgaggacttcgccacctactactgccagcagagctacagcacccctctgacctttggacagggcaccaaggtggaaatcaagggcggaggcggaagtggaggcggaggatctggcggcggaggctctgaggtgcagctggttgaatctggcggaggactggttcagcctggcggatctctgagactgtcttgtgctgccagcggcttcaccttcagctcctacgccatgagctgggtccgacaggctcctggcaaaggactggaatgggtgtccgccatctctggctcaggcggcagcacatattacgccgactctgtgaagggcagattcaccatcagccgggacaacagcaagaacaccctgtacctccagatgaactccctgagagccgaggacaccgccgtgtactattgtgccagactgggctaccccaccaccacactgctgccctttgattattggggccagggcaccctggtcaccgtttcttctacgcgtatccagaaccctgatcctgccgtgtaccagctgcgggatagcaagagcagcgacaagagcgtgtgtctgttcaccgacttcgacagccagaccaacgtgtcccagagcaaggactccgacgtgtacatcaccgataagtgcgtgctggacatgcggagcatggacttcaagagcaactccgccgtggcctggtccaacaagtccgatttcgcctgcgccaacgccttcaacaacagcattatccccgaggacacattcttcccaagccccgagagcagctgcgacgtgaagctggtggaaaagagcttcgagacagacaccaacctgaacttccagatcctgtacgagatcctgctgggcaaggccaccctgtacgccgtgctggtgtctgccctggtgctgatggctatggtcaagcggaaggacagccggggacgcgccaagagaagcggatctggcgtgaagcagaccctgaatttcgacctgctgaagctggctggcgacgtggaatccaacccaggcccttctagaggccatatgaccgagtacaagcccacggtgcgcctcgccacccgcgacgacgtccccagggccgtacgcaccctcgccgccgcgttcgccgactaccccgccacgcgccacaccgtcgatccggaccgccacatcgagcgggtcaccgagctgcaagaactcttcctcacgcgcgtcgggctcgacatcggcaaggtgtgggtcgcggacgacggcgccgcggtggcggtctggaccacgccggagagcgtcgaagcgggggcggtgttcgccgagatcggcccgcgcatggccgagttgagcggttcccggctggccgcgcagcaacagatggaaggcctcctggcgccgcaccggcccaaggagcccgcgtggttcctggccaccgtcggcgtctcgcccgaccaccagggcaagggtctgggcagcgccgtcgtgctccccggagtggaggcggccgagcgcgccggggtgcccgccttcctggagacctccgcgccccgcaacctccccttctacgagcggctcggcttcaccgtcaccgccgacgtcgaggtgcccgaaggaccgcgcacctggtgcatgacccgcaagcccggtgcctga

SEQ ID NO: 39168 - DNA, 2703 bp, synthetic construct
  source 1..2703: mol_type = other DNA
atggccttaccagtgaccgccttgctcctgccgctggccttgctgctccacgccgccaggccgctcgaggaggaggacctgaagaacgtgttcccacctgaggtggccgtgttcgagcctagcgaggccgagatcagccacacccagaaagccaccctcgtgtgcctggctaccggcttctaccccgaccatgtggaactgtcttggtgggtcaacggcaaagaggtgcacagcggcgtgtgtaccgacccccagccactgaaagaacagcccgccctgaacgacagccggtactgcctgagcagcagactgagagtgtccgccaccttctggcagaacccccggaaccacttcagatgccaggtgcagttctacggcctgagcgagaacgacgagtggacccaggacagagccaagcccgtgacccagatcgtgtctgccgaagcctggggcagagccgattgcggctttaccagcgagagctaccagcagggcgtgctgagcgccaccaacctgagcgtgatcggcttcagaatcctgctgctgaaagtggccggctttaacctgctgatgaccctgcggctgtggtccagcagggccaagcgatctggatctggagcaacaaacttctcactactcaaacaagcaggtgacgtggaggagaatcccgggcctactagcatggccttaccagtgaccgccttgctcctgccgctggccttgctgctccacgccgccaggccggacatccagatgacacagagccctagcagcctgtctgccagcgtgggagacagagtgaccatcacctgtagagccagccagagcatcagcagctacctgaactggtatcagcagaagcccggcaaggcccctaaactgctgatctatgccgccagctctctccagagcggagtgcctagcagattttctggcagcggctccggcaccgatttcaccctgacaatatccagcctccagcctgaggacttcgccacctactactgccagcagagctacagcacccctctgacctttggacagggcaccaaggtggaaatcaagggcggaggcggaagtggaggcggaggatctggcggcggaggctctgaggtgcagctggttgaatctggcggaggactggttcagcctggcggatctctgagactgtcttgtgctgccagcggcttcaccttcagctcctacgccatgagctgggtccgacaggctcctggcaaaggactggaatgggtgtccgccatctctggctcaggcggcagcacatattacgccgactctgtgaagggcagattcaccatcagccgggacaacagcaagaacaccctgtacctccagatgaactccctgagagccgaggacaccgccgtgtactattgtgccagactgggctaccccaccaccacactgctgccctttgattattggggccagggcaccctggtcaccgtttcttctacgcgtggacagcctaaggccaatcctaccgtgacactgttccctccaagcagcgaagaactccaggccaacaaggccacacttgtgtgcctgatctccgacttctaccctggggctgtgacagtggcttggaaggccgatggatctcctgtgaaagccggcgtggaaaccaccaagccatccaagcagagcaacaacaaatacgccgccagctcctacctgagcctgacacctgagcagtggaagtcccacagatcctacagctgccaagtgacccacgaaggcagcaccgtggaaaagacagtggcccctacagagtgcagccccatcaagaccgatgtgattacaatggaccccaaggacaactgctccaaggacgccaacgataccctgctgctccagctgaccaacaccagcgcctactacatgtacttgttgctgctgctgaagtccgtggtgtacttcgccatcatcacatgctgcctgctgcggagaaccgccttctgctgcaacggcgagaagtctcgcgccaagagaagcggatctggcgtgaagcagaccctgaatttcgacctgctgaagctggctggcgacgtggaatccaacccaggcccttctagaggccatatgaccgagtacaagcccacggtgcgcctcgccacccgcgacgacgtccccagggccgtacgcaccctcgccgccgcgttcgccgactaccccgccacgcgccacaccgtcgatccggaccgccacatcgagcgggtcaccgagctgcaagaactcttcctcacgcgcgtcgggctcgacatcggcaaggtgtgggtcgcggacgacggcgccgcggtggcggtctggaccacgccggagagcgtcgaagcgggggcggtgttcgccgagatcggcccgcgcatggccgagttgagcggttcccggctggccgcgcagcaacagatggaaggcctcctggcgccgcaccggcccaaggagcccgcgtggttcctggccaccgtcggcgtctcgcccgaccaccagggcaagggtctgggcagcgccgtcgtgctccccggagtggaggcggccgagcgcgccggggtgcccgccttcctggagacctccgcgccccgcaacctccccttctacgagcggctcggcttcaccgtcaccgccgacgtcgaggtgcccgaaggaccgcgcacctggtgcatgacccgcaagcccggtgcctga

SEQ ID NO: 39169 - DNA, 2703 bp, synthetic construct
  source 1..2703: mol_type = other DNA
atggccttaccagtgaccgccttgctcctgccgctggccttgctgctccacgccgccaggccgctcgagggacagcctaaggccaatcctaccgtgacactgttccctccaagcagcgaagaactccaggccaacaaggccacacttgtgtgcctgatctccgacttctaccctggggctgtgacagtggcttggaaggccgatggatctcctgtgaaagccggcgtggaaaccaccaagccatccaagcagagcaacaacaaatacgccgccagctcctacctgagcctgacacctgagcagtggaagtcccacagatcctacagctgccaagtgacccacgaaggcagcaccgtggaaaagacagtggcccctacagagtgcagccccatcaagaccgatgtgattacaatggaccccaaggacaactgctccaaggacgccaacgataccctgctgctccagctgaccaacaccagcgcctactacatgtacttgttgctgctgctgaagtccgtggtgtacttcgccatcatcacatgctgcctgctgcggagaaccgccttctgctgcaacggcgagaagtctagggccaagcgatctggatctggagcaacaaacttctcactactcaaacaagcaggtgacgtggaggagaatcccgggcctactagcatggccttaccagtgaccgccttgctcctgccgctggccttgctgctccacgccgccaggccggacatccagatgacacagagccctagcagcctgtctgccagcgtgggagacagagtgaccatcacctgtagagccagccagagcatcagcagctacctgaactggtatcagcagaagcccggcaaggcccctaaactgctgatctatgccgccagctctctccagagcggagtgcctagcagattttctggcagcggctccggcaccgatttcaccctgacaatatccagcctccagcctgaggacttcgccacctactactgccagcagagctacagcacccctctgacctttggacagggcaccaaggtggaaatcaagggcggaggcggaagtggaggcggaggatctggcggcggaggctctgaggtgcagctggttgaatctggcggaggactggttcagcctggcggatctctgagactgtcttgtgctgccagcggcttcaccttcagctcctacgccatgagctgggtccgacaggctcctggcaaaggactggaatgggtgtccgccatctctggctcaggcggcagcacatattacgccgactctgtgaagggcagattcaccatcagccgggacaacagcaagaacaccctgtacctccagatgaactccctgagagccgaggacaccgccgtgtactattgtgccagactgggctaccccaccaccacactgctgccctttgattattggggccagggcaccctggtcaccgtttcttctacgcgtgaggaggacctgaagaacgtgttcccacctgaggtggccgtgttcgagcctagcgaggccgagatcagccacacccagaaagccaccctcgtgtgcctggctaccggcttctaccccgaccatgtggaactgtcttggtgggtcaacggcaaagaggtgcacagcggcgtgtgtaccgacccccagccactgaaagaacagcccgccctgaacgacagccggtactgcctgagcagcagactgagagtgtccgccaccttctggcagaacccccggaaccacttcagatgccaggtgcagttctacggcctgagcgagaacgacgagtggacccaggacagagccaagcccgtgacccagatcgtgtctgccgaagcctggggcagagccgattgcggctttaccagcgagagctaccagcagggcgtgctgagcgccaccaacctgagcgtgatcggcttcagaatcctgctgctgaaagtggccggctttaacctgctgatgaccctgcggctgtggtccagccgcgccaagagaagcggatctggcgtgaagcagaccctgaatttcgacctgctgaagctggctggcgacgtggaatccaacccaggcccttctagaggccatatgaccgagtacaagcccacggtgcgcctcgccacccgcgacgacgtccccagggccgtacgcaccctcgccgccgcgttcgccgactaccccgccacgcgccacaccgtcgatccggaccgccacatcgagcgggtcaccgagctgcaagaactcttcctcacgcgcgtcgggctcgacatcggcaaggtgtgggtcgcggacgacggcgccgcggtggcggtctggaccacgccggagagcgtcgaagcgggggcggtgttcgccgagatcggcccgcgcatggccgagttgagcggttcccggctggccgcgcagcaacagatggaaggcctcctggcgccgcaccggcccaaggagcccgcgtggttcctggccaccgtcggcgtctcgcccgaccaccagggcaagggtctgggcagcgccgtcgtgctccccggagtggaggcggccgagcgcgccggggtgcccgccttcctggagacctccgcgccccgcaacctccccttctacgagcggctcggcttcaccgtcaccgccgacgtcgaggtgcccgaaggaccgcgcacctggtgcatgacccgcaagcccggtgcctga

SEQ ID NO: 39170 - DNA, 2694 bp, synthetic construct
  source 1..2694: mol_type = other DNA
atggccttaccagtgaccgccttgctcctgccgctggccttgctgctccacgccgccaggccgctcgaggaggcctctacaaagggaccctccgtgtttcctctggctcccagcagcaagtctacaagcggaggaacagccgctctgggctgcctggtcaaggattactttcccgagcctgtgaccgtgtcctggaatagcggagcactgacaagcggcgtgcacacctttccagccgtgctgcaaagcagcggcctgtactctctgagcagcgtggtcacagtgcctagctctagcctgggcacccagacctacatctgcaatgtgaaccacaagcctagcaacaccaaggtggacaagagagtggaacccaagagctgtcccatcaagaccgatgtgattacaatggaccccaaggacaactgctccaaggacgccaacgataccctgctgctccagctgaccaacaccagcgcctactacatgtacttgttgctgctgctgaagtccgtggtgtacttcgccatcatcacatgctgcctgctgcggagaaccgccttctgctgcaacggcgagaagtctagggccaagcgatctggatctggagcaacaaacttctcactactcaaacaagcaggtgacgtggaggagaatcccgggcctactagcatggccttaccagtgaccgccttgctcctgccgctggccttgctgctccacgccgccaggccggacatccagatgacacagagccctagcagcctgtctgccagcgtgggagacagagtgaccatcacctgtagagccagccagagcatcagcagctacctgaactggtatcagcagaagcccggcaaggcccctaaactgctgatctatgccgccagctctctccagagcggagtgcctagcagattttctggcagcggctccggcaccgatttcaccctgacaatatccagcctccagcctgaggacttcgccacctactactgccagcagagctacagcacccctctgacctttggacagggcaccaaggtggaaatcaagggcggaggcggaagtggaggcggaggatctggcggcggaggctctgaggtgcagctggttgaatctggcggaggactggttcagcctggcggatctctgagactgtcttgtgctgccagcggcttcaccttcagctcctacgccatgagctgggtccgacaggctcctggcaaaggactggaatgggtgtccgccatctctggctcaggcggcagcacatattacgccgactctgtgaagggcagattcaccatcagccgggacaacagcaagaacaccctgtacctccagatgaactccctgagagccgaggacaccgccgtgtactattgtgccagactgggctaccccaccaccacactgctgccctttgattattggggccagggcaccctggtcaccgtttcttctacgcgtggacagcctaaggccaatcctaccgtgacactgttccctccaagcagcgaagaactccaggccaacaaggccacacttgtgtgcctgatctccgacttctaccctggggctgtgacagtggcttggaaggccgatggatctcctgtgaaagccggcgtggaaaccaccaagccatccaagcagagcaacaacaaatacgccgccagctcctacctgagcctgacacctgagcagtggaagtcccacagatcctacagctgccaagtgacccacgaaggcagcaccgtggaaaagacagtggcccctacagagtgcagcgaagtgaaaaccgactccaccgaccacgtgaagcccaaagagacagagaacaccaagcagcccagcaagagctgccacaagcccaaggccatcgtgcacaccgagaaagtgaacatgatgagcctgaccgtgctgggcctgcggatgctgttcgccaaaaccgtggccgtgaacttcctgctgaccgccaagctgttcttcctccgcgccaagagaagcggatctggcgtgaagcagaccctgaatttcgacctgctgaagctggctggcgacgtggaatccaacccaggcccttctagaggccatatgaccgagtacaagcccacggtgcgcctcgccacccgcgacgacgtccccagggccgtacgcaccctcgccgccgcgttcgccgactaccccgccacgcgccacaccgtcgatccggaccgccacatcgagcgggtcaccgagctgcaagaactcttcctcacgcgcgtcgggctcgacatcggcaaggtgtgggtcgcggacgacggcgccgcggtggcggtctggaccacgccggagagcgtcgaagcgggggcggtgttcgccgagatcggcccgcgcatggccgagttgagcggttcccggctggccgcgcagcaacagatggaaggcctcctggcgccgcaccggcccaaggagcccgcgtggttcctggccaccgtcggcgtctcgcccgaccaccagggcaagggtctgggcagcgccgtcgtgctccccggagtggaggcggccgagcgcgccggggtgcccgccttcctggagacctccgcgccccgcaacctccccttctacgagcggctcggcttcaccgtcaccgccgacgtcgaggtgcccgaaggaccgcgcacctggtgcatgacccgcaagcccggtgcctga

SEQ ID NO: 39171 - DNA, 2628 bp, synthetic construct
  source 1..2628: mol_type = other DNA
atggccttaccagtgaccgccttgctcctgccgctggccttgctgctccacgccgccaggccgctcgaggaggcctctacaaagggaccctccgtgtttcctctggctcccagcagcaagtctacaagcggaggaacagccgctctgggctgcctggtcaaggattactttcccgagcctgtgaccgtgtcctggaatagcggagcactgacaagcggcgtgcacacctttccagccgtgctgcaaagcagcggcctgtactctctgagcagcgtggtcacagtgcctagctctagcctgggcacccagacctacatctgcaatgtgaaccacaagcctagcaacaccaaggtggacaagagagtggaacccaagagctgtggcagagccgattgcggctttaccagcgagagctaccagcagggcgtgctgagcgccaccatcctgtacgagatcctgctgggcaaggccaccctgtacgccgtgctggtgtctgccctggtgctgatggctatggtcaagcggaaggacagccggggaagggccaagcgatctggatctggagcaacaaacttctcactactcaaacaagcaggtgacgtggaggagaatcccgggcctactagcatggccttaccagtgaccgccttgctcctgccgctggccttgctgctccacgccgccaggccggacatccagatgacacagagccctagcagcctgtctgccagcgtgggagacagagtgaccatcacctgtagagccagccagagcatcagcagctacctgaactggtatcagcagaagcccggcaaggcccctaaactgctgatctatgccgccagctctctccagagcggagtgcctagcagattttctggcagcggctccggcaccgatttcaccctgacaatatccagcctccagcctgaggacttcgccacctactactgccagcagagctacagcacccctctgacctttggacagggcaccaaggtggaaatcaagggcggaggcggaagtggaggcggaggatctggcggcggaggctctgaggtgcagctggttgaatctggcggaggactggttcagcctggcggatctctgagactgtcttgtgctgccagcggcttcaccttcagctcctacgccatgagctgggtccgacaggctcctggcaaaggactggaatgggtgtccgccatctctggctcaggcggcagcacatattacgccgactctgtgaagggcagattcaccatcagccgggacaacagcaagaacaccctgtacctccagatgaactccctgagagccgaggacaccgccgtgtactattgtgccagactgggctaccccaccaccacactgctgccctttgattattggggccagggcaccctggtcaccgtttcttctacgcgtggacagcctaaggccaatcctaccgtgacactgttccctccaagcagcgaagaactccaggccaacaaggccacacttgtgtgcctgatctccgacttctaccctggggctgtgacagtggcttggaaggccgatggatctcctgtgaaagccggcgtggaaaccaccaagccatccaagcagagcaacaacaaatacgccgccagctcctacctgagcctgacacctgagcagtggaagtcccacagatcctacagctgccaagtgacccacgaaggcagcaccgtggaaaagacagtggcccctacagagtgcagcatccccgaggacacattcttcccaagccccgagagcagctgcgacgtgaagctggtggaaaagagcttcgagacagacaccaacctgaacttccagaacctgagcgtgatcggcttcagaatcctgctgctgaaagtggccggctttaacctgctgatgaccctgcggctgtggtccagccgcgccaagagaagcggatctggcgtgaagcagaccctgaatttcgacctgctgaagctggctggcgacgtggaatccaacccaggcccttctagaggccatatgaccgagtacaagcccacggtgcgcctcgccacccgcgacgacgtccccagggccgtacgcaccctcgccgccgcgttcgccgactaccccgccacgcgccacaccgtcgatccggaccgccacatcgagcgggtcaccgagctgcaagaactcttcctcacgcgcgtcgggctcgacatcggcaaggtgtgggtcgcggacgacggcgccgcggtggcggtctggaccacgccggagagcgtcgaagcgggggcggtgttcgccgagatcggcccgcgcatggccgagttgagcggttcccggctggccgcgcagcaacagatggaaggcctcctggcgccgcaccggcccaaggagcccgcgtggttcctggccaccgtcggcgtctcgcccgaccaccagggcaagggtctgggcagcgccgtcgtgctccccggagtggaggcggccgagcgcgccggggtgcccgccttcctggagacctccgcgccccgcaacctccccttctacgagcggctcggcttcaccgtcaccgccgacgtcgaggtgcccgaaggaccgcgcacctggtgcatgacccgcaagcccggtgcctga

SEQ ID NO: 39172 - DNA, 2628 bp, synthetic construct
  source 1..2628: mol_type = other DNA
atggccttaccagtgaccgccttgctcctgccgctggccttgctgctccacgccgccaggccgctcgaggaggcctctacaaagggaccctccgtgtttcctctggctcccagcagcaagtctacaagcggaggaacagccgctctgggctgcctggtcaaggattactttcccgagcctgtgaccgtgtcctggaatagcggagcactgacaagcggcgtgcacacctttccagccgtgctgcaaagcagcggcctgtactctctgagcagcgtggtcacagtgcctagctctagcctgggcacccagacctacatctgcaatgtgaaccacaagcctagcaacaccaaggtggacaagagagtggaacccaagagctgtatccccgaggacacattcttcccaagccccgagagcagctgcgacgtgaagctggtggaaaagagcttcgagacagacaccaacctgaacttccagaacctgagcgtgatcggcttcagaatcctgctgctgaaagtggccggctttaacctgctgatgaccctgcggctgtggtccagcagggccaagcgatctggatctggagcaacaaacttctcactactcaaacaagcaggtgacgtggaggagaatcccgggcctactagcatggccttaccagtgaccgccttgctcctgccgctggccttgctgctccacgccgccaggccggacatccagatgacacagagccctagcagcctgtctgccagcgtgggagacagagtgaccatcacctgtagagccagccagagcatcagcagctacctgaactggtatcagcagaagcccggcaaggcccctaaactgctgatctatgccgccagctctctccagagcggagtgcctagcagattttctggcagcggctccggcaccgatttcaccctgacaatatccagcctccagcctgaggacttcgccacctactactgccagcagagctacagcacccctctgacctttggacagggcaccaaggtggaaatcaagggcggaggcggaagtggaggcggaggatctggcggcggaggctctgaggtgcagctggttgaatctggcggaggactggttcagcctggcggatctctgagactgtcttgtgctgccagcggcttcaccttcagctcctacgccatgagctgggtccgacaggctcctggcaaaggactggaatgggtgtccgccatctctggctcaggcggcagcacatattacgccgactctgtgaagggcagattcaccatcagccgggacaacagcaagaacaccctgtacctccagatgaactccctgagagccgaggacaccgccgtgtactattgtgccagactgggctaccccaccaccacactgctgccctttgattattggggccagggcaccctggtcaccgtttcttctacgcgtggacagcctaaggccaatcctaccgtgacactgttccctccaagcagcgaagaactccaggccaacaaggccacacttgtgtgcctgatctccgacttctaccctggggctgtgacagtggcttggaaggccgatggatctcctgtgaaagccggcgtggaaaccaccaagccatccaagcagagcaacaacaaatacgccgccagctcctacctgagcctgacacctgagcagtggaagtcccacagatcctacagctgccaagtgacccacgaaggcagcaccgtggaaaagacagtggcccctacagagtgcagcggcagagccgattgcggctttaccagcgagagctaccagcagggcgtgctgagcgccaccatcctgtacgagatcctgctgggcaaggccaccctgtacgccgtgctggtgtctgccctggtgctgatggctatggtcaagcggaaggacagccggggacgcgccaagagaagcggatctggcgtgaagcagaccctgaatttcgacctgctgaagctggctggcgacgtggaatccaacccaggcccttctagaggccatatgaccgagtacaagcccacggtgcgcctcgccacccgcgacgacgtccccagggccgtacgcaccctcgccgccgcgttcgccgactaccccgccacgcgccacaccgtcgatccggaccgccacatcgagcgggtcaccgagctgcaagaactcttcctcacgcgcgtcgggctcgacatcggcaaggtgtgggtcgcggacgacggcgccgcggtggcggtctggaccacgccggagagcgtcgaagcgggggcggtgttcgccgagatcggcccgcgcatggccgagttgagcggttcccggctggccgcgcagcaacagatggaaggcctcctggcgccgcaccggcccaaggagcccgcgtggttcctggccaccgtcggcgtctcgcccgaccaccagggcaagggtctgggcagcgccgtcgtgctccccggagtggaggcggccgagcgcgccggggtgcccgccttcctggagacctccgcgccccgcaacctccccttctacgagcggctcggcttcaccgtcaccgccgacgtcgaggtgcccgaaggaccgcgcacctggtgcatgacccgcaagcccggtgcctga

SEQ ID NO: 39173 - DNA, 1866 bp, synthetic construct
  source 1..1866: mol_type = other DNA
atggccttaccagtgaccgccttgctcctgccgctggccttgctgctccacgccgccaggccggacatccagatgacacagagccctagcagcctgtctgccagcgtgggagacagagtgaccatcacctgtagagccagccagagcatcagcagctacctgaactggtatcagcagaagcccggcaaggcccctaaactgctgatctatgccgccagctctctccagagcggagtgcctagcagattttctggcagcggctccggcaccgatttcaccctgacaatatccagcctccagcctgaggacttcgccacctactactgccagcagagctacagcacccctctgacctttggacagggcaccaaggtggaaatcaagctcgaggacctgaagaacgtgttcccacctgaggtggccgtgttcgagcctagcgaggccgagatcagccacacccagaaagccaccctcgtgtgcctggctaccggcttctaccccgaccatgtggaactgtcttggtgggtcaacggcaaagaggtgcacagcggcgtgtgtaccgacccccagccactgaaagaacagcccgccctgaacgacagccggtactgcctgagcagcagactgagagtgtccgccaccttctggcagaacccccggaaccacttcagatgccaggtgcagttctacggcctgagcgagaacgacgagtggacccaggacagagccaagcccgtgacccagatcgtgtctgccgaagcctggggcagagccgatagcggctttaccagcgagagctaccagcagggcgtgctgagcgccaccatcctgtacgagatcctgctgggcaaggccaccctgtacgccgtgctggtgtctgccctggtgctgatggctatggtcaagcggaaggacagccggggaagggccaagcgatctggatctggagcaacaaacttctcactactcaaacaagcaggtgacgtggaggagaatcccgggcctactagtatggactggatttggcgcatccttttccttgtcggcgctgctaccggcgcgcattccttcgaagaggtgcagctggttgaatctggcggaggactggttcagcctggcggatctctgagactgtcttgtgctgccagcggcttcaccttcagctcctacgccatgagctgggtccgacaggctcctggcaaaggactggaatgggtgtccgccatctctggctcaggcggcagcacatattacgccgactctgtgaagggcagattcaccatcagccgggacaacagcaagaacaccctgtacctccagatgaactccctgagagccgaggacaccgccgtgtactattgtgccagactgggctaccccaccaccacactgctgccctttgattattggggccagggcaccctggtcaccgtttcttctacgcgtatccagaaccctgatcctgccgtgtaccagctgcgggatagcaagagcagcgacaagagcgtgtgtctgttcaccgacttcgacagccagaccaacgtgtcccagagcaaggactccgacgtgtacatcaccgataagtgcgtgctggacatgcggagcatggacttcaagagcaactccgccgtggcctggtccaacaagtccgatttcgcctgcgccaacgccttcaacaacagcattatccccgaggacacattcttcccaagccccgagagcagcagcgacgtgaagctggtggaaaagagcttcgagacagacaccaacctgaacttccagaacctgagcgtgatcggcttcagaatcctgctgctgaaagtggccggctttaacctgctgatgaccctgcggctgtggtccagc

SEQ ID NO: 39174 - DNA, 2706 bp, synthetic construct
  source 1..2706: mol_type = other DNA
atggccttaccagtgaccgccttgctcctgccgctggccttgctgctccacgccgccaggccggaggttcagctgcttgagtctggcggaggactggttcaacctggcggaagcctgagactgtcttgtgccgcctctggcagaaccttcagcatgggctggtatagacaggcccctggcaagggcctcgaatttgtgtctgccatcacatacagcggcggcagcccttactacgccgattctgtgaagggcagattcaccatcagccgggacaacagcaagaacaccgtgtacctccagatgaacagcctgagagccgaggacaccgccgtgtactactgtgccgccaatccaacctacggcagcgactggaatgccgagaattggggccagggcacactggtcacagtgtctagtggtaccggcggaggcggatctggcggcggaggtagcggtggcggaggatctgaattcgacatccagatgacacagagccctagcagcctgtctgccagcgtgggagacagagtgaccatcacctgtagagccagccagagcatcagcagctacctgaactggtatcagcagaagcccggcaaggcccctaaactgctgatctatgccgccagctctctccagagcggagtgcctagcagattttctggcagcggctccggcaccgatttcaccctgacaatatccagcctccagcctgaggacttcgccacctactactgccagcagagctacagcacccctctgacctttggacagggcaccaaggtggaaatcaagctcgagatccagaaccctgatcctgccgtgtaccagctgcgggatagcaagagcagcgacaagagcgtgtgtctgttcaccgacttcgacagccagaccaacgtgtcccagagcaaggactccgacgtgtacatcaccgataagtgcgtgctggacatgcggagcatggacttcaagagcaactccgccgtggcctggtccaacaagtccgatttcgcctgcgccaacgccttcaacaacagcattatccccgaggacacattcttcccaagcagcgacgtgccctgcgacgtgaagctggtggaaaagagcttcgagacagacaccaacctgaacttccagaacctgagcgtgatcggcttcagaatcctgctgctgaaagtggccggctttaacctgctgatgaccctgcggctgtggtccagccgcgccaagagaagcggatctggcgtgaagcagaccctgaatttcgacctgctgaagctggctggcgacgtggaatccaacccaggccctactagtaccatggactggatttggcgcatccttttccttgtcggcgctgctaccggcacccattccgggcccgaagtgcaactggttgaatccggtggcggcctggtgcaacccggcggatctctcagacttagctgtgccgcctccggcagaaccttcacaatgggatggtacaggcaggctccagggaaagagagagagttcgtcgccgccatctctctgtctcccacactggcctactacgccgactctgtgaaaggccggttcaccatctccagagataatagcaagaacaccgtggtgctgcaaatgaactctctgagagccgaggatacagccctgtactattgtgccgctgaccggaagtccgtgatgagcatcagacccgattactggggacagggcacactggtcacagtgtctagtggatccggcggcggaggatctggcggaggcggatctgggggcggaggctctttcgaagaggtgcagctggttgaatctggcggaggactggttcagcctggcggatctctgagactgtcttgtgctgccagcggcttcaccttcagctcctacgccatgagctgggtccgacaggctcctggcaaaggactggaatgggtgtccgccatctctggctcaggcggcagcacatattacgccgactctgtgaagggcagattcaccatcagccgggacaacagcaagaacaccctgtacctccagatgaactccctgagagccgaggacaccgccgtgtactattgtgccagactgggctaccccaccaccacactgctgccctttgattattggggccagggcaccctggtcaccgtttcttctacgcgtgaggacctgaagaacgtgttcccacctgaggtggccgtgttcgagcctagcaaggccgagatcgcccacacccagaaagccaccctcgtgtgcctggctaccggcttctaccccgaccatgtggaactgtcttggtgggtcaacggcaaagaggtgcacagcggcgtgtgtaccgacccccagccactgaaagaacagcccgccctgaacgacagccggtactgcctgagcagcagactgagagtgtccgccaccttctggcagaacccccggaaccacttcagatgccaggtgcagttctacggcctgagcgagaacgacgagtggacccaggacagagccaagcccgtgacccagatcgtgtctgccgaagcctggggcagagccgattgcggcatcaccagcgccagctaccaccagggcgtgctgagcgccaccatcctgtacgagatcctgctgggcaaggccaccctgtacgccgtgctggtgtctgccctggtgctgatggctatggtcaagcggaaggacagccggggataa

SEQ ID NO: 39175 - DNA, 2706 bp, synthetic construct
  source 1..2706: mol_type = other DNA
atggccttaccagtgaccgccttgctcctgccgctggccttgctgctccacgccgccaggccggaagtgcagctggttgaatctggcggaggactggttcaggctggcggatctctgagactgtcttgtgccgccagcggcagaacctttagcatgggctggtttagacaggcccctggcaaagagagagagttcgtcgccgccatcacatactctggcggcagcccttactacgccgactctgtgaagggcagattcaccatcagccgggacaacgccaagaacaccgtgtacctccagatgaacagcctgaagcctgaggacaccgccgtgtactactgcgccgccaatccaacatacggcagcgactggaacgccgagaattggggccagggaacccaagtgacagtgtctagcggtaccggcggaggcggatctggcggcggaggtagcggtggcggaggatctgaattcgacatccagatgacacagagccctagcagcctgtctgccagcgtgggagacagagtgaccatcacctgtagagccagccagagcatcagcagctacctgaactggtatcagcagaagcccggcaaggcccctaaactgctgatctatgccgccagctctctccagagcggagtgcctagcagattttctggcagcggctccggcaccgatttcaccctgacaatatccagcctccagcctgaggacttcgccacctactactgccagcagagctacagcacccctctgacctttggacagggcaccaaggtggaaatcaagctcgagatccagaaccctgatcctgccgtgtaccagctgcgggatagcaagagcagcgacaagagcgtgtgtctgttcaccgacttcgacagccagaccaacgtgtcccagagcaaggactccgacgtgtacatcaccgataagtgcgtgctggacatgcggagcatggacttcaagagcaactccgccgtggcctggtccaacaagtccgatttcgcctgcgccaacgccttcaacaacagcattatccccgaggacacattcttcccaagcagcgacgtgccctgcgacgtgaagctggtggaaaagagcttcgagacagacaccaacctgaacttccagaacctgagcgtgatcggcttcagaatcctgctgctgaaagtggccggctttaacctgctgatgaccctgcggctgtggtccagccgcgccaagagaagcggatctggcgtgaagcagaccctgaatttcgacctgctgaagctggctggcgacgtggaatccaacccaggccctactagtaccatggactggatttggcgcatccttttccttgtcggcgctgctaccggcgcccattccgggcccgaagtgcaactggttgaatccggtggcggcctggtgcaacccggcggatctctcagacttagctgtgccgcctccggcagaaccttcacaatgggatggtacaggcaggctccagggaaagagagagagttcgtcgccgccatctctctgtctcccacactggcctactacgccgactctgtgaaaggccggttcaccatctccagagataatagcaagaacaccgtggtgctgcaaatgaactctctgagagccgaggatacagccctgtactattgtgccgctgaccggaagtccgtgatgagcatcagacccgattactggggacagggcacactggtcacagtgtctagtggatccggcggcggaggatctggcggaggcggatctgggggcggaggctctttcgaagaggtgcagctggttgaatctggcggaggactggttcagcctggcggatctctgagactgtcttgtgctgccagcggcttcaccttcagctcctacgccatgagctgggtccgacaggctcctggcaaaggactggaatgggtgtccgccatctctggctcaggcggcagcacatattacgccgactctgtgaagggcagattcaccatcagccgggacaacagcaagaacaccctgtacctccagatgaactccctgagagccgaggacaccgccgtgtactattgtgccagactgggctaccccaccaccacactgctgccctttgattattggggccagggcaccctggtcaccgtttcttctacgcgtgaggacctgaagaacgtgttcccacctgaggtggccgtgttcgagcctagcaaggccgagatcgcccacacccagaaagccaccctcgtgtgcctggctaccggcttctaccccgaccatgtggaactgtcttggtgggtcaacggcaaagaggtgcacagcggcgtgtgtaccgacccccagccactgaaagaacagcccgccctgaacgacagccggtactgcctgagcagcagactgagagtgtccgccaccttctggcagaacccccggaaccacttcagatgccaggtgcagttctacggcctgagcgagaacgacgagtggacccaggacagagccaagcccgtgacccagatcgtgtctgccgaagcctggggcagagccgattgcggcatcaccagcgccagctaccaccagggcgtgctgagcgccaccatcctgtacgagatcctgctgggcaaggccaccctgtacgccgtgctggtgtctgccctggtgctgatggctatggtcaagcggaaggacagccggggataa

SEQ ID NO: 39176 - DNA, 2697 bp, synthetic construct
  source 1..2697: mol_type = other DNA
atggccttaccagtgaccgccttgctcctgccgctggccttgctgctccacgccgccaggccggaagtgcagctggttgaatctggcggaggactggttcaggctggcggatctctgagactgtcttgtgccgccagcggcagaacctttagcatgggctggtttagacaggcccctggcaaagagagagagttcgtcgccgccatcacatactctggcggcagcccttactacgccgactctgtgaagggcagattcaccatcagccgggacaacgccaagaacaccgtgtacctccagatgaacagcctgaagcctgaggacaccgccgtgtactactgcgccgccaatccaacatacggcagcgactggaacgccgagaattggggccagggaacccaagtgacagtgtctagcggtaccggcggaggcggatctggcggcggaggtagcggtggcggaggatctgaattcgacatccagatgacacagagccctagcagcctgtctgccagcgtgggagacagagtgaccatcacctgtagagccagccagagcatcagcagctacctgaactggtatcagcagaagcccggcaaggcccctaaactgctgatctatgccgccagctctctccagagcggagtgcctagcagattttctggcagcggctccggcaccgatttcaccctgacaatatccagcctccagcctgaggacttcgccacctactactgccagcagagctacagcacccctctgacctttggacagggcaccaaggtggaaatcaagctcgaggacctgaagaacgtgttcccacctgaggtggccgtgttcgagcctagcgaggccgagatcagccacacccagaaagccaccctcgtgtgcctggctaccggcttctaccccgaccatgtggaactgtcttggtgggtcaacggcaaagaggtgcacagcggcgtgtgtaccgacccccagccactgaaagaacagcccgccctgaacgacagccggtactgcctgagcagcagactgagagtgtccgccaccttctggcagaacccccggaaccacttcagatgccaggtgcagttctacggcctgagcgagaacgacgagtggacccaggacagagccaagcccgtgacccagatcgtgtctgccgaagcctggggcagagccgattgcggctttaccagcgagagctaccagcagggcgtgctgagcgccaccatcctgtacgagatcctgctgggcaaggccaccctgtacgccgtgctggtgtctgccctggtgctgatggctatggtcaagcggaaggacagccggggaagggccaagcgatctggatctggagcaacaaacttctcactactcaaacaagcaggtgacgtggaggagaatcccgggcctactagtgccaccatggactggatttggcgcatccttttccttgtcggcgctgctaccggcgcccattccgggcccgaagtgcaactggttgaatccggtggcggcctggtgcaagcaggcggatctctcagacttagctgtgccgcctccggcagaaccttcacaatgggatggtttaggcaggctccagggaaagagagagagttcgtcgccgccatctctctgtctcccacactggcctactacgccgactctgtgaaaggccggttcaccatctccagagataatgccaagaacaccgtggtgctgcaaatgaactctctgaaacccgaggatacagccctgtactattgtgccgctgaccggaagtccgtgatgagcatcagacccgattactggggacagggcacacaagtcacagtgtcctctggatccggcggcggaggatctggcggaggcggatctgggggcggaggctctttcgaagaggtgcagctggttgaatctggcggaggactggttcagcctggcggatctctgagactgtcttgtgctgccagcggcttcaccttcagctcctacgccatgagctgggtccgacaggctcctggcaaaggactggaatgggtgtccgccatctctggctcaggcggcagcacatattacgccgactctgtgaagggcagattcaccatcagccgggacaacagcaagaacaccctgtacctccagatgaactccctgagagccgaggacaccgccgtgtactattgtgccagactgggctaccccaccaccacactgctgccctttgattattggggccagggcaccctggtcaccgtttcttctacgcgtatccagaaccctgatcctgccgtgtaccagctgcgggatagcaagagcagcgacaagagcgtgtgtctgttcaccgacttcgacagccagaccaacgtgtcccagagcaaggactccgacgtgtacatcaccgataagtgcgtgctggacatgcggagcatggacttcaagagcaactccgccgtggcctggtccaacaagtccgatttcgcctgcgccaacgccttcaacaacagcattatccccgaggacacattcttcccaagccccgagagcagctgcgacgtgaagctggtggaaaagagcttcgagacagacaccaacctgaacttccagaacctgagcgtgatcggcttcagaatcctgctgctgaaagtggccggctttaacctgctgatgaccctgcggctgtggtccagctaa

SEQ ID NO: 39177 - DNA, 2310 bp, synthetic construct
  source 1..2310: mol_type = other DNA
atggccttaccagtgaccgccttgctcctgccgctggccttgctgctccacgccgccaggccggaagtgcagctggttgaatctggcggaggactggttcagcctggcggatctctgagactgagctgtgaagccagcggcttcgccagcgacgattacatcatcggctggttcagacaggcccctggcaaagagagagagggcgtcagctgcatcagctctaagtacgccaacaccgtgtacaccgacagcgtgaagggcagattcagactgagcagaggcaccgccaagaataccgtgtacctccagatgagcgccctgaagcctgaggataccgccgtgtactactgcgctatggacagccgcagagtgacatgccctgagatcagcaccatgcaccggaacttcgattcttggggccagggcacactggtcacagtgtcatctggtaccggcggaggcggatctggcggcggaggtagcggtggcggaggatctgaattcgacatccagatgacacagagccctagcagcctgtctgccagcgtgggagacagagtgaccatcacctgtagagccagccagagcatcagcagctacctgaactggtatcagcagaagcccggcaaggcccctaaactgctgatctatgccgccagctctctccagagcggagtgcctagcagattttctggcagcggctccggcaccgatttcaccctgacaatatccagcctccagcctgaggacttcgccacctactactgccagcagagctacagcacccctctgacctttggacagggcaccaaggtggaaatcaagctcgaggacctgaagaacgtgttcccacctgaggtggccgtgttcgagcctagcaaggccgagatcgcccacacccagaaagccaccctcgtgtgcctggctaccggcttctaccccgaccatgtggaactgtcttggtgggtcaacggcaaagaggtgcacagcggcgtgtgtaccgacccccagccactgaaagaacagcccgccctgaacgacagccggtactgcctgagcagcagactgagagtgtccgccaccttctggcagaacccccggaaccacttcagatgccaggtgcagttctacggcctgagcgagaacgacgagtggacccaggacagagccaagcccgtgacccagatcgtgtctgccgaagcctggggcagagccgattgcggcatcaccagcgccagctaccaccagggcgtgctgagcgccaccatcctgtacgagatcctgctgggcaaggccaccctgtacgccgtgctggtgtctgccctggtgctgatggctatggtcaagcggaaggacagccggggaagggccaagcgatctggatctggagcaacaaacttctcactactcaaacaagcaggtgacgtggaggagaatcccgggcctactagtatggactggatttggcgcatccttttccttgtcggcgctgctaccggcgcgcattccttcgaagaggtgcagctggttgaatctggcggaggactggttcagcctggcggatctctgagactgtcttgtgctgccagcggcttcaccttcagctcctacgccatgagctgggtccgacaggctcctggcaaaggactggaatgggtgtccgccatctctggctcaggcggcagcacatattacgccgactctgtgaagggcagattcaccatcagccgggacaacagcaagaacaccctgtacctccagatgaactccctgagagccgaggacaccgccgtgtactattgtgccagactgggctaccccaccaccacactgctgccctttgattattggggccagggcaccctggtcaccgtttcttctacgcgtatccagaaccctgatcctgccgtgtaccagctgcgggatagcaagagcagcgacaagagcgtgtgtctgttcaccgacttcgacagccagaccaacgtgtcccagagcaaggactccgacgtgtacatcaccgataagtgcgtgctggacatgcggagcatggacttcaagagcaactccgccgtggcctggtccaacaagtccgatttcgcctgcgccaacgccttcaacaacagcattatccccgaggacacattcttcccaagcagcgacgtgccctgcgacgtgaagctggtggaaaagagcttcgagacagacaccaacctgaacttccagaacctgagcgtgatcggcttcagaatcctgctgctgaaagtggccggctttaacctgctgatgaccctgcggctgtggtccagctaa

SEQ ID NO: 39178 - DNA, 2283 bp, synthetic construct
  source 1..2283: mol_type = other DNA
atggccttaccagtgaccgccttgctcctgccgctggccttgctgctccacgccgccaggccggacatccagatgacacagagccctagcagcctgtctgccagcgtgggagacagagtgaccatcacctgtagagccagccagagcatcagcagctacctgaactggtatcagcagaagcccggcaaggcccctaaactgctgatctatgccgccagctctctccagagcggagtgcctagcagattttctggcagcggctccggcaccgatttcaccctgacaatatccagcctccagcctgaggacttcgccacctactactgccagcagagctacagcacccctctgacctttggacagggcaccaaggtggaaatcaagctcgaggacctgaagaacgtgttcccacctgaggtggccgtgttcgagcctagcgaggccgagatcagccacacccagaaagccaccctcgtgtgcctggctaccggcttctaccccgaccatgtggaactgtcttggtgggtcaacggcaaagaggtgcacagcggcgtgtgtaccgacccccagccactgaaagaacagcccgccctgaacgacagccggtactgcctgagcagcagactgagagtgtccgccaccttctggcagaacccccggaaccacttcagatgccaggtgcagttctacggcctgagcgagaacgacgagtggacccaggacagagccaagcccgtgacccagatcgtgtctgccgaagcctggggcagagccgattgcggctttaccagcgagagctaccagcagggcgtgctgagcgccaccatcctgtacgagatcctgctgggcaaggccaccctgtacgccgtgctggtgtctgccctggtgctgatggctatggtcaagcggaaggacagccggggaagggccaagcgatctggatctggagcaacaaacttctcactactcaaacaagcaggtgacgtggaggagaatcccgggcctactagtaccatggactggatttggcgcatccttttccttgtcggcgctgctaccggcgcccattccgggcccgaagtgcaactggttgaatccggtggcggcctggtgcaacccggcggatctctcagacttagctgtgccgcctccggcagaaccttcacaatgggatggtacaggcaggctccagggaaagagagagagttcgtcgccgccatctctctgtctcccacactggcctactacgccgactctgtgaaaggccggttcaccatctccagagataatagcaagaacaccgtggtgctgcaaatgaactctctgagagccgaggatacagccctgtactattgtgccgctgaccggaagtccgtgatgagcatcagacccgattactggggacagggcacactggtcacagtgtctagtggatccggcggcggaggatctggcggaggcggatctgggggcggaggctctttcgaagaggtgcagctggttgaatctggcggaggactggttcagcctggcggatctctgagactgtcttgtgctgccagcggcttcaccttcagctcctacgccatgagctgggtccgacaggctcctggcaaaggactggaatgggtgtccgccatctctggctcaggcggcagcacatattacgccgactctgtgaagggcagattcaccatcagccgggacaacagcaagaacaccctgtacctccagatgaactccctgagagccgaggacaccgccgtgtactattgtgccagactgggctaccccaccaccacactgctgccctttgattattggggccagggcaccctggtcaccgtttcttctacgcgtatccagaaccctgatcctgccgtgtaccagctgcgggatagcaagagcagcgacaagagcgtgtgtctgttcaccgacttcgacagccagaccaacgtgtcccagagcaaggactccgacgtgtacatcaccgataagtgcgtgctggacatgcggagcatggacttcaagagcaactccgccgtggcctggtccaacaagtccgatttcgcctgcgccaacgccttcaacaacagcattatccccgaggacacattcttcccaagccccgagagcagctgcgacgtgaagctggtggaaaagagcttcgagacagacaccaacctgaacttccagaacctgagcgtgatcggcttcagaatcctgctgctgaaagtggccggctttaacctgctgatgaccctgcggctgtggtccagctaa

SEQ ID NO: 39179 - DNA, 2301 bp, synthetic construct
  source 1..2301: mol_type = other DNA
atggccttaccagtgaccgccttgctcctgccgctggccttgctgctccacgccgccaggccggacatccagatgacacagagccctagcagcctgtctgccagcgtgggagacagagtgaccatcacctgtagagccagccagagcatcagcagctacctgaactggtatcagcagaagcccggcaaggcccctaaactgctgatctatgccgccagctctctccagagcggagtgcctagcagattttctggcagcggctccggcaccgatttcaccctgacaatatccagcctccagcctgaggacttcgccacctactactgccagcagagctacagcacccctctgacctttggacagggcaccaaggtggaaatcaagctcgaggacctgaagaacgtgttcccacctgaggtggccgtgttcgagcctagcgaggccgagatcagccacacccagaaagccaccctcgtgtgcctggctaccggcttctaccccgaccatgtggaactgtcttggtgggtcaacggcaaagaggtgcacagcggcgtgtgtaccgacccccagccactgaaagaacagcccgccctgaacgacagccggtactgcctgagcagcagactgagagtgtccgccaccttctggcagaacccccggaaccacttcagatgccaggtgcagttctacggcctgagcgagaacgacgagtggacccaggacagagccaagcccgtgacccagatcgtgtctgccgaagcctggggcagagccgattgcggctttaccagcgagagctaccagcagggcgtgctgagcgccaccatcctgtacgagatcctgctgggcaaggccaccctgtacgccgtgctggtgtctgccctggtgctgatggctatggtcaagcggaaggacagccggggaagggccaagcgatctggatctggagcaacaaacttctcactactcaaacaagcaggtgacgtggaggagaatcccgggcctactagtaccatggactggatttggcgcatccttttccttgtcggcgctgctaccggcgcccattccgggccccaggtgcagctggttgaatctggcggaggactggttcagcctggcggatctctgagactgtcttgtgccgccagcggcaacatcaacagcagaaactgcatgggctggttcagacaggcccctggcaagggaagagaaggcgtggcagctatcggccaagtgaccggcagaacctactacgtggacagcgtgaagggcagattcaccatcagcctggacaacagcaagaacaccctgtacctccagatgaacagcctgagagccgaggacaccgccgtgtactattgtgctgctgcccctggctgtctgctgtctgcacttagaagcgccgactacagaaactggggccagggcacactggtcaccgtttcttctggatccggcggcggaggatctggcggaggcggatctgggggcggaggctctttcgaagaggtgcagctggttgaatctggcggaggactggttcagcctggcggatctctgagactgtcttgtgctgccagcggcttcaccttcagctcctacgccatgagctgggtccgacaggctcctggcaaaggactggaatgggtgtccgccatctctggctcaggcggcagcacatattacgccgactctgtgaagggcagattcaccatcagccgggacaacagcaagaacaccctgtacctccagatgaactccctgagagccgaggacaccgccgtgtactattgtgccagactgggctaccccaccaccacactgctgccctttgattattggggccagggcaccctggtcaccgtttcttctacgcgtatccagaaccctgatcctgccgtgtaccagctgcgggatagcaagagcagcgacaagagcgtgtgtctgttcaccgacttcgacagccagaccaacgtgtcccagagcaaggactccgacgtgtacatcaccgataagtgcgtgctggacatgcggagcatggacttcaagagcaactccgccgtggcctggtccaacaagtccgatttcgcctgcgccaacgccttcaacaacagcattatccccgaggacacattcttcccaagccccgagagcagctgcgacgtgaagctggtggaaaagagcttcgagacagacaccaacctgaacttccagaacctgagcgtgatcggcttcagaatcctgctgctgaaagtggccggctttaacctgctgatgaccctgcggctgtggtccagc

SEQ ID NO: 39180 - DNA, 2304 bp, synthetic construct
  source 1..2304: mol_type = other DNA
atggccttaccagtgaccgccttgctcctgccgctggccttgctgctccacgccgccaggccggacatccagatgacacagagccctagcagcctgtctgccagcgtgggagacagagtgaccatcacctgtagagccagccagagcatcagcagctacctgaactggtatcagcagaagcccggcaaggcccctaaactgctgatctatgccgccagctctctccagagcggagtgcctagcagattttctggcagcggctccggcaccgatttcaccctgacaatatccagcctccagcctgaggacttcgccacctactactgccagcagagctacagcacccctctgacctttggacagggcaccaaggtggaaatcaagctcgaggacctgaagaacgtgttcccacctgaggtggccgtgttcgagcctagcgaggccgagatcagccacacccagaaagccaccctcgtgtgcctggctaccggcttctaccccgaccatgtggaactgtcttggtgggtcaacggcaaagaggtgcacagcggcgtgtgtaccgacccccagccactgaaagaacagcccgccctgaacgacagccggtactgcctgagcagcagactgagagtgtccgccaccttctggcagaacccccggaaccacttcagatgccaggtgcagttctacggcctgagcgagaacgacgagtggacccaggacagagccaagcccgtgacccagatcgtgtctgccgaagcctggggcagagccgattgcggctttaccagcgagagctaccagcagggcgtgctgagcgccaccatcctgtacgagatcctgctgggcaaggccaccctgtacgccgtgctggtgtctgccctggtgctgatggctatggtcaagcggaaggacagccggggaagggccaagcgatctggatctggagcaacaaacttctcactactcaaacaagcaggtgacgtggaggagaatcccgggcctactagtaccatggactggatttggcgcatccttttccttgtcggcgctgctaccggcgcccattccgggccccaggtgcagctggttgaatctggcggaggatctgttcaggctggcggctctctgagactgtcttgtggcgcttccggcaacatcagcagcagaaactgcatgggctggttcagacaggcccctggcaaagagagagaaggcgttgccgccatcggacaagtgaccggcagatcctactacgtggacagcgtgaagggcagattcaccatcagcctggacaacgccaagaacaccctgtacctccagatgaacacactgaagcccgaggacaccgccatgtactactgtgctgctgcccctggctgtctgctgtctgcacttagaagcgccgactacagaaactggggccagggaacccaagtgacagtgtctagtggatccggcggcggaggatctggcggaggcggatctgggggcggaggctctttcgaagaggtgcagctggttgaatctggcggaggactggttcagcctggcggatctctgagactgtcttgtgctgccagcggcttcaccttcagctcctacgccatgagctgggtccgacaggctcctggcaaaggactggaatgggtgtccgccatctctggctcaggcggcagcacatattacgccgactctgtgaagggcagattcaccatcagccgggacaacagcaagaacaccctgtacctccagatgaactccctgagagccgaggacaccgccgtgtactattgtgccagactgggctaccccaccaccacactgctgccctttgattattggggccagggcaccctggtcaccgtttcttctacgcgtatccagaaccctgatcctgccgtgtaccagctgcgggatagcaagagcagcgacaagagcgtgtgtctgttcaccgacttcgacagccagaccaacgtgtcccagagcaaggactccgacgtgtacatcaccgataagtgcgtgctggacatgcggagcatggacttcaagagcaactccgccgtggcctggtccaacaagtccgatttcgcctgcgccaacgccttcaacaacagcattatccccgaggacacattcttcccaagccccgagagcagctgcgacgtgaagctggtggaaaagagcttcgagacagacaccaacctgaacttccagaacctgagcgtgatcggcttcagaatcctgctgctgaaagtggccggctttaacctgctgatgaccctgcggctgtggtccagctaa

SEQ ID NO: 39181 - DNA, 2727 bp, synthetic construct
  source 1..2727: mol_type = other DNA
atggccttaccagtgaccgccttgctcctgccgctggccttgctgctccacgccgccaggccggaagtgcagctggttgaatctggcggaggactggttcaggctggcggatctctgagactgtcttgtgccgccagcggcagaacctttagcatgggctggtttagacaggcccctggcaaagagagagagttcgtcgccgccatcacatactctggcggcagcccttactacgccgactctgtgaagggcagattcaccatcagccgggacaacgccaagaacaccgtgtacctccagatgaacagcctgaagcctgaggacaccgccgtgtactactgcgccgccaatccaacatacggcagcgactggaacgccgagaattggggccagggaacccaagtgacagtgtctagcggtaccggcggaggcggatctggcggcggaggtagcggtggcggaggatctgaattcgacatccagatgacacagagccctagcagcctgtctgccagcgtgggagacagagtgaccatcacctgtagagccagccagagcatcagcagctacctgaactggtatcagcagaagcccggcaaggcccctaaactgctgatctatgccgccagctctctccagagcggagtgcctagcagattttctggcagcggctccggcaccgatttcaccctgacaatatccagcctccagcctgaggacttcgccacctactactgccagcagagctacagcacccctctgacctttggacagggcaccaaggtggaaatcaagctcgagatccagaaccctgatcctgccgtgtaccagctgcgggatagcaagagcagcgacaagagcgtgtgtctgttcaccgacttcgacagccagaccaacgtgtcccagagcaaggactccgacgtgtacatcaccgataagtgcgtgctggacatgcggagcatggacttcaagagcaactccgccgtggcctggtccaacaagtccgatttcgcctgcgccaacgccttcaacaacagcattatccccgaggacacattcttcccaagcagcgacgtgccctgcgacgtgaagctggtggaaaagagcttcgagacagacaccaacctgaacttccagaacctgagcgtgatcggcttcagaatcctgctgctgaaagtggccggctttaacctgctgatgaccctgcggctgtggtccagccgcgccaagagaagcggatctggcgtgaagcagaccctgaatttcgacctgctgaagctggctggcgacgtggaatccaacccaggccctactagtaccatggactggatttggcgcatccttttccttgtcggcgctgctaccggcgcccattccgggccccaggtgcagctggttgaatctggcggaggatctgttcaggctggcggctctctgagactgtcttgtggcgcttccggcaacatcagcagcagaaactgcatgggctggttcagacaggcccctggcaaagagagagaaggcgttgccgccatcggacaagtgaccggcagatcctactacgtggacagcgtgaagggcagattcaccatcagcctggacaacgccaagaacaccctgtacctccagatgaacacactgaagcccgaggacaccgccatgtactactgtgctgctgcccctggctgtctgctgtctgcacttagaagcgccgactacagaaactggggccagggaacccaagtgacagtgtctagtggatccggcggcggaggatctggcggaggcggatctgggggcggaggctctttcgaagaggtgcagctggttgaatctggcggaggactggttcagcctggcggatctctgagactgtcttgtgctgccagcggcttcaccttcagctcctacgccatgagctgggtccgacaggctcctggcaaaggactggaatgggtgtccgccatctctggctcaggcggcagcacatattacgccgactctgtgaagggcagattcaccatcagccgggacaacagcaagaacaccctgtacctccagatgaactccctgagagccgaggacaccgccgtgtactattgtgccagactgggctaccccaccaccacactgctgccctttgattattggggccagggcaccctggtcaccgtttcttctacgcgtgaggacctgaagaacgtgttcccacctgaggtggccgtgttcgagcctagcaaggccgagatcgcccacacccagaaagccaccctcgtgtgcctggctaccggcttctaccccgaccatgtggaactgtcttggtgggtcaacggcaaagaggtgcacagcggcgtgtgtaccgacccccagccactgaaagaacagcccgccctgaacgacagccggtactgcctgagcagcagactgagagtgtccgccaccttctggcagaacccccggaaccacttcagatgccaggtgcagttctacggcctgagcgagaacgacgagtggacccaggacagagccaagcccgtgacccagatcgtgtctgccgaagcctggggcagagccgattgcggcatcaccagcgccagctaccaccagggcgtgctgagcgccaccatcctgtacgagatcctgctgggcaaggccaccctgtacgccgtgctggtgtctgccctggtgctgatggctatggtcaagcggaaggacagccggggataa

SEQ ID NO: 39182 - DNA, 2718 bp, synthetic construct
  source 1..2718: mol_type = other DNA
atggccttaccagtgaccgccttgctcctgccgctggccttgctgctccacgccgccaggccgcaggtgcagctggttgaatctggcggaggatctgttcaggctggcggctctctgagactgtcttgtggcgcttccggcaacatcagcagcagaaactgcatgggctggttcagacaggcccctggcaaagagagagaaggcgttgccgccatcggacaagtgaccggcagatcctactacgtggacagcgtgaagggcagattcaccatcagcctggacaacgccaagaacaccctgtacctccagatgaacacactgaagcccgaggacaccgccatgtactactgtgctgctgcccctggctgtctgctgtctgcacttagaagcgccgactacagaaactggggccagggaacccaagtgacagtgtctagtggtaccggcggaggcggatctggcggcggaggtagcggtggcggaggatctgaattcgacatccagatgacacagagccctagcagcctgtctgccagcgtgggagacagagtgaccatcacctgtagagccagccagagcatcagcagctacctgaactggtatcagcagaagcccggcaaggcccctaaactgctgatctatgccgccagctctctccagagcggagtgcctagcagattttctggcagcggctccggcaccgatttcaccctgacaatatccagcctccagcctgaggacttcgccacctactactgccagcagagctacagcacccctctgacctttggacagggcaccaaggtggaaatcaagctcgaggacctgaagaacgtgttcccacctgaggtggccgtgttcgagcctagcgaggccgagatcagccacacccagaaagccaccctcgtgtgcctggctaccggcttctaccccgaccatgtggaactgtcttggtgggtcaacggcaaagaggtgcacagcggcgtgtgtaccgacccccagccactgaaagaacagcccgccctgaacgacagccggtactgcctgagcagcagactgagagtgtccgccaccttctggcagaacccccggaaccacttcagatgccaggtgcagttctacggcctgagcgagaacgacgagtggacccaggacagagccaagcccgtgacccagatcgtgtctgccgaagcctggggcagagccgattgcggctttaccagcgagagctaccagcagggcgtgctgagcgccaccatcctgtacgagatcctgctgggcaaggccaccctgtacgccgtgctggtgtctgccctggtgctgatggctatggtcaagcggaaggacagccggggaagggccaagcgatctggatctggagcaacaaacttctcactactcaaacaagcaggtgacgtggaggagaatcccgggcctactagtgccaccatggactggatttggcgcatccttttccttgtcggcgctgctaccggcgcccattccgggcccgaagtgcaactggttgaatccggtggcggcctggtgcaagcaggcggatctctcagacttagctgtgccgcctccggcagaaccttcacaatgggatggtttaggcaggctccagggaaagagagagagttcgtcgccgccatctctctgtctcccacactggcctactacgccgactctgtgaaaggccggttcaccatctccagagataatgccaagaacaccgtggtgctgcaaatgaactctctgaaacccgaggatacagccctgtactattgtgccgctgaccggaagtccgtgatgagcatcagacccgattactggggacagggcacacaagtcacagtgtcctctggatccggcggcggaggatctggcggaggcggatctgggggcggaggctctttcgaagaggtgcagctggttgaatctggcggaggactggttcagcctggcggatctctgagactgtcttgtgctgccagcggcttcaccttcagctcctacgccatgagctgggtccgacaggctcctggcaaaggactggaatgggtgtccgccatctctggctcaggcggcagcacatattacgccgactctgtgaagggcagattcaccatcagccgggacaacagcaagaacaccctgtacctccagatgaactccctgagagccgaggacaccgccgtgtactattgtgccagactgggctaccccaccaccacactgctgccctttgattattggggccagggcaccctggtcaccgtttcttctacgcgtatccagaaccctgatcctgccgtgtaccagctgcgggatagcaagagcagcgacaagagcgtgtgtctgttcaccgacttcgacagccagaccaacgtgtcccagagcaaggactccgacgtgtacatcaccgataagtgcgtgctggacatgcggagcatggacttcaagagcaactccgccgtggcctggtccaacaagtccgatttcgcctgcgccaacgccttcaacaacagcattatccccgaggacacattcttcccaagccccgagagcagctgcgacgtgaagctggtggaaaagagcttcgagacagacaccaacctgaacttccagaacctgagcgtgatcggcttcagaatcctgctgctgaaagtggccggctttaacctgctgatgaccctgcggctgtggtccagctaa

SEQ ID NO: 39183 - DNA, 2307 bp, synthetic construct
  source 1..2307: mol_type = other DNA
atggccttaccagtgaccgccttgctcctgccgctggccttgctgctccacgccgccaggccgcaggtgcagctggttgaatctggcggaggatctgttcaggctggcggctctctgagactgtcttgtggcgcttccggcaacatcagcagcagaaactgcatgggctggttcagacaggcccctggcaaagagagagaaggcgttgccgccatcggacaagtgaccggcagatcctactacgtggacagcgtgaagggcagattcaccatcagcctggacaacgccaagaacaccctgtacctccagatgaacacactgaagcccgaggacaccgccatgtactactgtgctgctgcccctggctgtctgctgtctgcacttagaagcgccgactacagaaactggggccagggaacccaagtgacagtgtctagtggtaccggcggaggcggatctggcggcggaggtagcggtggcggaggatctgaattcgacatccagatgacacagagccctagcagcctgtctgccagcgtgggagacagagtgaccatcacctgtagagccagccagagcatcagcagctacctgaactggtatcagcagaagcccggcaaggcccctaaactgctgatctatgccgccagctctctccagagcggagtgcctagcagattttctggcagcggctccggcaccgatttcaccctgacaatatccagcctccagcctgaggacttcgccacctactactgccagcagagctacagcacccctctgacctttggacagggcaccaaggtggaaatcaagctcgaggacctgaagaacgtgttcccacctgaggtggccgtgttcgagcctagcgaggccgagatcagccacacccagaaagccaccctcgtgtgcctggctaccggcttctaccccgaccatgtggaactgtcttggtgggtcaacggcaaagaggtgcacagcggcgtgtgtaccgacccccagccactgaaagaacagcccgccctgaacgacagccggtactgcctgagcagcagactgagagtgtccgccaccttctggcagaacccccggaaccacttcagatgccaggtgcagttctacggcctgagcgagaacgacgagtggacccaggacagagccaagcccgtgacccagatcgtgtctgccgaagcctggggcagagccgattgcggctttaccagcgagagctaccagcagggcgtgctgagcgccaccatcctgtacgagatcctgctgggcaaggccaccctgtacgccgtgctggtgtctgccctggtgctgatggctatggtcaagcggaaggacagccggggaagggccaagcgatctggatctggagcaacaaacttctcactactcaaacaagcaggtgacgtggaggagaatcccgggcctactagtgccaccatggactggatttggcgcatccttttccttgtcggcgctgctaccggcgcccattccttcgaagaggtgcagctggttgaatctggcggaggactggttcagcctggcggatctctgagactgtcttgtgctgccagcggcttcaccttcagctcctacgccatgagctgggtccgacaggctcctggcaaaggactggaatgggtgtccgccatctctggctcaggcggcagcacatattacgccgactctgtgaagggcagattcaccatcagccgggacaacagcaagaacaccctgtacctccagatgaactccctgagagccgaggacaccgccgtgtactattgtgccagactgggctaccccaccaccacactgctgccctttgattattggggccagggcaccctggtcaccgtttcttctacgcgtatccagaaccctgatcctgccgtgtaccagctgcgggatagcaagagcagcgacaagagcgtgtgtctgttcaccgacttcgacagccagaccaacgtgtcccagagcaaggactccgacgtgtacatcaccgataagtgcgtgctggacatgcggagcatggacttcaagagcaactccgccgtggcctggtccaacaagtccgatttcgcctgcgccaacgccttcaacaacagcattatccccgaggacacattcttcccaagccccgagagcagctgcgacgtgaagctggtggaaaagagcttcgagacagacaccaacctgaacttccagaacctgagcgtgatcggcttcagaatcctgctgctgaaagtggccggctttaacctgctgatgaccctgcggctgtggtccagctaa

SEQ ID NO: 39184 - DNA, 2307 bp, synthetic construct
  source 1..2307: mol_type = other DNA
atggccttaccagtgaccgccttgctcctgccgctggccttgctgctccacgccgccaggccgcaagttcagctggtggaaagcggtggtggcgttgtgcaacctggtggaagtctgaggctgagctgtgccgcttctggcctgagctttagcacctacactgtggcctggttcaggcaggctcccggaaagggtcttgaaggcgtggccgccattccttacaccagccagcacatggtgtacacagacagcgtcagaggccggttcaccatcagcagagacaactccaagaatacgctctatctccagatgaactctctgcgcgccgaagatacagccgtgtattactgcgccaccgacagacggcctggcacctctatgctggctatcaacggctacaacagatggggacagggaaccaccgtgaccgtgtcatctggtaccggcggaggcggatctggcggcggaggtagcggtggcggaggatctgaattcgacatccagatgacacagagccctagcagcctgtctgccagcgtgggagacagagtgaccatcacctgtagagccagccagagcatcagcagctacctgaactggtatcagcagaagcccggcaaggcccctaaactgctgatctatgccgccagctctctccagagcggagtgcctagcagattttctggcagcggctccggcaccgatttcaccctgacaatatccagcctccagcctgaggacttcgccacctactactgccagcagagctacagcacccctctgacctttggacagggcaccaaggtggaaatcaagctcgaggacctgaagaacgtgttcccacctgaggtggccgtgttcgagcctagcgaggccgagatcagccacacccagaaagccaccctcgtgtgcctggctaccggcttctaccccgaccatgtggaactgtcttggtgggtcaacggcaaagaggtgcacagcggcgtgtgtaccgacccccagccactgaaagaacagcccgccctgaacgacagccggtactgcctgagcagcagactgagagtgtccgccaccttctggcagaacccccggaaccacttcagatgccaggtgcagttctacggcctgagcgagaacgacgagtggacccaggacagagccaagcccgtgacccagatcgtgtctgccgaagcctggggcagagccgattgcggctttaccagcgagagctaccagcagggcgtgctgagcgccaccatcctgtacgagatcctgctgggcaaggccaccctgtacgccgtgctggtgtctgccctggtgctgatggctatggtcaagcggaaggacagccggggaagggccaagcgatctggatctggagcaacaaacttctcactactcaaacaagcaggtgacgtggaggagaatcccgggcctactagtgccaccatggactggatttggcgcatccttttccttgtcggcgctgctaccggcgcccattccttcgaagaggtgcagctggttgaatctggcggaggactggttcagcctggcggatctctgagactgtcttgtgctgccagcggcttcaccttcagctcctacgccatgagctgggtccgacaggctcctggcaaaggactggaatgggtgtccgccatctctggctcaggcggcagcacatattacgccgactctgtgaagggcagattcaccatcagccgggacaacagcaagaacaccctgtacctccagatgaactccctgagagccgaggacaccgccgtgtactattgtgccagactgggctaccccaccaccacactgctgccctttgattattggggccagggcaccctggtcaccgtttcttctacgcgtatccagaaccctgatcctgccgtgtaccagctgcgggatagcaagagcagcgacaagagcgtgtgtctgttcaccgacttcgacagccagaccaacgtgtcccagagcaaggactccgacgtgtacatcaccgataagtgcgtgctggacatgcggagcatggacttcaagagcaactccgccgtggcctggtccaacaagtccgatttcgcctgcgccaacgccttcaacaacagcattatccccgaggacacattcttcccaagccccgagagcagctgcgacgtgaagctggtggaaaagagcttcgagacagacaccaacctgaacttccagaacctgagcgtgatcggcttcagaatcctgctgctgaaagtggccggctttaacctgctgatgaccctgcggctgtggtccagctaa

SEQ ID NO: 39185 - DNA, 2304 bp, synthetic construct
  source 1..2304: mol_type = other DNA
atggccttaccagtgaccgccttgctcctgccgctggccttgctgctccacgccgccaggccggacatccagatgacacagagccctagcagcctgtctgccagcgtgggagacagagtgaccatcacctgtagagccagccagagcatcagcagctacctgaactggtatcagcagaagcccggcaaggcccctaaactgctgatctatgccgccagctctctccagagcggagtgcctagcagattttctggcagcggctccggcaccgatttcaccctgacaatatccagcctccagcctgaggacttcgccacctactactgccagcagagctacagcacccctctgacctttggacagggcaccaaggtggaaatcaagctcgaggacctgaagaacgtgttcccacctgaggtggccgtgttcgagcctagcgaggccgagatcagccacacccagaaagccaccctcgtgtgcctggctaccggcttctaccccgaccatgtggaactgtcttggtgggtcaacggcaaagaggtgcacagcggcgtgtgtaccgacccccagccactgaaagaacagcccgccctgaacgacagccggtactgcctgagcagcagactgagagtgtccgccaccttctggcagaacccccggaaccacttcagatgccaggtgcagttctacggcctgagcgagaacgacgagtggacccaggacagagccaagcccgtgacccagatcgtgtctgccgaagcctggggcagagccgattgcggctttaccagcgagagctaccagcagggcgtgctgagcgccaccatcctgtacgagatcctgctgggcaaggccaccctgtacgccgtgctggtgtctgccctggtgctgatggctatggtcaagcggaaggacagccggggaagggccaagcgatctggatctggagcaacaaacttctcactactcaaacaagcaggtgacgtggaggagaatcccgggcctactagtaccatggactggatttggcgcatccttttccttgtcggcgctgctaccggcgcccattccgggccccaagttcagctggtggaaagcggtggtggcgttgtgcaacctggtggaagtctgaggctgagctgtgccgcttctggcctgagctttagcacctacactgtggcctggttcaggcaggctcccggaaagggtcttgaaggcgtggccgccattccttacaccagccagcacatggtgtacacagacagcgtcagaggccggttcaccatcagcagagacaactccaagaatacgctctatctccagatgaactctctgcgcgccgaagatacagccgtgtattactgcgccaccgacagacggcctggcacctctatgctggctatcaacggctacaacagatggggacagggaaccaccgtgaccgtgtcatctggatccggcggcggaggatctggcggaggcggatctgggggcggaggctctttcgaagaggtgcagctggttgaatctggcggaggactggttcagcctggcggatctctgagactgtcttgtgctgccagcggcttcaccttcagctcctacgccatgagctgggtccgacaggctcctggcaaaggactggaatgggtgtccgccatctctggctcaggcggcagcacatattacgccgactctgtgaagggcagattcaccatcagccgggacaacagcaagaacaccctgtacctccagatgaactccctgagagccgaggacaccgccgtgtactattgtgccagactgggctaccccaccaccacactgctgccctttgattattggggccagggcaccctggtcaccgtttcttctacgcgtatccagaaccctgatcctgccgtgtaccagctgcgggatagcaagagcagcgacaagagcgtgtgtctgttcaccgacttcgacagccagaccaacgtgtcccagagcaaggactccgacgtgtacatcaccgataagtgcgtgctggacatgcggagcatggacttcaagagcaactccgccgtggcctggtccaacaagtccgatttcgcctgcgccaacgccttcaacaacagcattatccccgaggacacattcttcccaagccccgagagcagctgcgacgtgaagctggtggaaaagagcttcgagacagacaccaacctgaacttccagaacctgagcgtgatcggcttcagaatcctgctgctgaaagtggccggctttaacctgctgatgaccctgcggctgtggtccagctaa

SEQ ID NO: 39186 - DNA, 2310 bp, synthetic construct
  source 1..2310: mol_type = other DNA
atggccttaccagtgaccgccttgctcctgccgctggccttgctgctccacgccgccaggccggacatccagatgacacagagccctagcagcctgtctgccagcgtgggagacagagtgaccatcacctgtagagccagccagagcatcagcagctacctgaactggtatcagcagaagcccggcaaggcccctaaactgctgatctatgccgccagctctctccagagcggagtgcctagcagattttctggcagcggctccggcaccgatttcaccctgacaatatccagcctccagcctgaggacttcgccacctactactgccagcagagctacagcacccctctgacctttggacagggcaccaaggtggaaatcaagctcgaggacctgaagaacgtgttcccacctgaggtggccgtgttcgagcctagcgaggccgagatcagccacacccagaaagccaccctcgtgtgcctggctaccggcttctaccccgaccatgtggaactgtcttggtgggtcaacggcaaagaggtgcacagcggcgtgtgtaccgacccccagccactgaaagaacagcccgccctgaacgacagccggtactgcctgagcagcagactgagagtgtccgccaccttctggcagaacccccggaaccacttcagatgccaggtgcagttctacggcctgagcgagaacgacgagtggacccaggacagagccaagcccgtgacccagatcgtgtctgccgaagcctggggcagagccgattgcggctttaccagcgagagctaccagcagggcgtgctgagcgccaccatcctgtacgagatcctgctgggcaaggccaccctgtacgccgtgctggtgtctgccctggtgctgatggctatggtcaagcggaaggacagccggggaagggccaagcgatctggatctggagcaacaaacttctcactactcaaacaagcaggtgacgtggaggagaatcccgggcctactagtaccatggactggatttggcgcatccttttccttgtcggcgctgctaccggcgcccattccgggcccgaggtgcagctggttgaatctggcggaggatctgttcaggctggcggctctctgagactgtcttgtgccgccagcggctacacctacagcatcaactgcatgggctggttcagacaggcccctggcaaagagagagaaggcgttgccgccatctctaccggcggaggcagaaccgattaccgggattctgtgaagggcagattcaccatcagccaggacaacgccaagaacaccgtgtacctccagatgaacagcctgaagcctgaggacaccgccatgtactactgtgccggcaagaccacctatcctggctacggatgtggcctgggcagaagcgcctacaattattggggccagggcacccaagtgaccgtgtcatctggatccggcggcggaggatctggcggaggcggatctgggggcggaggctctttcgaagaggtgcagctggttgaatctggcggaggactggttcagcctggcggatctctgagactgtcttgtgctgccagcggcttcaccttcagctcctacgccatgagctgggtccgacaggctcctggcaaaggactggaatgggtgtccgccatctctggctcaggcggcagcacatattacgccgactctgtgaagggcagattcaccatcagccgggacaacagcaagaacaccctgtacctccagatgaactccctgagagccgaggacaccgccgtgtactattgtgccagactgggctaccccaccaccacactgctgccctttgattattggggccagggcaccctggtcaccgtttcttctacgcgtatccagaaccctgatcctgccgtgtaccagctgcgggatagcaagagcagcgacaagagcgtgtgtctgttcaccgacttcgacagccagaccaacgtgtcccagagcaaggactccgacgtgtacatcaccgataagtgcgtgctggacatgcggagcatggacttcaagagcaactccgccgtggcctggtccaacaagtccgatttcgcctgcgccaacgccttcaacaacagcattatccccgaggacacattcttcccaagccccgagagcagctgcgacgtgaagctggtggaaaagagcttcgagacagacaccaacctgaacttccagaacctgagcgtgatcggcttcagaatcctgctgctgaaagtggccggctttaacctgctgatgaccctgcggctgtggtccagctaa

SEQ ID NO: 39187 - DNA, 1866 bp, synthetic construct
  source 1..1866: mol_type = other DNA
atggccttaccagtgaccgccttgctcctgccgctggccttgctgctccacgccgccaggccggacatccagatgacacagagccctagcagcctgtctgccagcgtgggagacagagtgaccatcacctgtagagccagccagagcatcagcagctacctgaactggtatcagcagaagcccggcaaggcccctaaactgctgatctatgccgccagctctctccagagcggagtgcctagcagattttctggcagcggctccggcaccgatttcaccctgacaatatccagcctccagcctgaggacttcgccacctactactgccagcagagctacagcacccctctgacctttggacagggcaccaaggtggaaatcaagctcgaggacctgaagcacgtgttcccacctgaggtggccgtgttcgagcctagcgacgccgagatctggcacacccagaaagccaccctcgtgtgcctggctaccggcttctaccccgaccatgtggaactgtcttggtgggtcaacggcaaagaggtgcacagcggcgtgtctaccgacccccagccactgaaagaacagcccgccctgaacgacagccggtactgcctgagcagcagactgagagtgtccgccaccttctggcagaacccccggaaccacttcagatgccaggtgcagttctacggcctgagcgagaacgacgagtggacccaggacagagccaagcccgtgacccagatcgtgtctgccgaagcctggggcagagccgattgcggctttaccagcgagagctaccagcagggcgtgctgagcgccaccatcctgtacgagatcctgctgggcaaggccaccctgtacgccgtgctggtgtctgccctggtgctgatggctatggtcaagcggaaggacagccggggaagggccaagcgatctggatctggagcaacaaacttctcactactcaaacaagcaggtgacgtggaggagaatcccgggcctactagtatggactggatttggcgcatccttttccttgtcggcgctgctaccggcgcgcattccttcgaagaggtgcagctggttgaatctggcggaggactggttcagcctggcggatctctgagactgtcttgtgctgccagcggcttcaccttcagctcctacgccatgagctgggtccgacaggctcctggcaaaggactggaatgggtgtccgccatctctggctcaggcggcagcacatattacgccgactctgtgaagggcagattcaccatcagccgggacaacagcaagaacaccctgtacctccagatgaactccctgagagccgaggacaccgccgtgtactattgtgccagactgggctaccccaccaccacactgctgccctttgattattggggccagggcaccctggtcaccgtttcttctacgcgtatccagaaccctgatcctgccgtgtaccagctgcgggatagcaagagcagcgacaagagcgtgtgtctgttcaccgacttcgacagccagaccaacgtgtcccagagcaaggactccgacgtgtacatcaccgataagaccgtgctggacatgcggagcatggacttcaagagcaactccgccgtggcctggtccagcaagtccgatttcgcctgcgccaacgccttcaacaacagcattatccccgaggacacattcttcccaagccccgagatggcctgcgacgtgaagctggtggaaaagagcttcgagacagacaccaacctgaacttccagaacctgctcgtgatctggctgagaatcctgctgctgaaagtggccggctttaacctgctgatgaccctgcggctgtggtccagc

SEQ ID NO: 39188 - DNA, 1866 bp, synthetic construct
  source 1..1866: mol_type = other DNA
atggccttaccagtgaccgccttgctcctgccgctggccttgctgctccacgccgccaggccggacatccagatgacacagagccctagcagcctgtctgccagcgtgggagacagagtgaccatcacctgtagagccagccagagcatcagcagctacctgaactggtatcagcagaagcccggcaaggcccctaaactgctgatctatgccgccagctctctccagagcggagtgcctagcagattttctggcagcggctccggcaccgatttcaccctgacaatatccagcctccagcctgaggacttcgccacctactactgccagcagagctacagcacccctctgacctttggacagggcaccaaggtggaaatcaagctcgaggacctgaagcacgtgttcccacctgaggtggccgtgttcgagcctagcgacgccgagatctggcacacccagaaagccaccctcgtgtgcctggctaccggcttctaccccgaccatgtggaactgtcttggtgggtcaacggcaaagaggtgcacagcggcgtgtctaccgacccccagccactgaaagaacagcccgccctgaacgacagccggtactgcctgagcagcagactgagagtgtccgccaccttctggcagaacccccggaaccacttcagatgccaggtgcagttctacggcctgagcgagaacgacgagtggacccaggacagagccaagcccgtgacccagatcgtgtctgccgaagcctggggcagagccgattgcggctttaccagcgagagctaccagcagggcgtgctgagcgccaccatcctgtacgagatcctgctgggcaaggccaccctgtacgccgtgctggtgtctgccctggtgctgatggctatggtcaagcggaaggacagccggggaagggccaagcgatctggatctggagcaacaaacttctcactactcaaacaagcaggtgacgtggaggagaatcccgggcctactagtatggactggatttggcgcatccttttccttgtcggcgctgctaccggcgcgcattccttcgaagaggtgcagctggttgaatctggcggaggactggttcagcctggcggatctctgagactgtcttgtgctgccagcggcttcaccttcagctcctacgccatgagctgggtccgacaggctcctggcaaaggactggaatgggtgtccgccatctctggctcaggcggcagcacatattacgccgactctgtgaagggcagattcaccatcagccgggacaacagcaagaacaccctgtacctccagatgaactccctgagagccgaggacaccgccgtgtactattgtgccagactgggctaccccaccaccacactgctgccctttgattattggggccagggcaccctggtcaccgtttcttctacgcgtatccagaaccctgatcctgccgtgtaccagctgcgggatagcaagagcagcgacaagagcgtgtgtctgttcaccgacttcgacagccagaccaacgtgtcccagagcaaggactccgacgtgtacatcaccgataagaccgtgctggacatgcggagcatggacttcaagagcaactccgccgtggcctggtccaccaagtccgatttcgcctgcgccaacgccttcaacaacagcattatccccgaggacacattcttcccaagccccgaggtggtgtgcgacgtgaagctggtggaaaagagcttcgagacagacaccaacctgaacttccagaacctggtggtgatcggcgccagaatcctgctgctgaaagtggccggctttaacctgctgatgaccctgcggctgtggtccagc

SEQ ID NO: 39189 - DNA, 1866 bp, synthetic construct
  source 1..1866: mol_type = other DNA
atggccttaccagtgaccgccttgctcctgccgctggccttgctgctccacgccgccaggccggacatccagatgacacagagccctagcagcctgtctgccagcgtgggagacagagtgaccatcacctgtagagccagccagagcatcagcagctacctgaactggtatcagcagaagcccggcaaggcccctaaactgctgatctatgccgccagctctctccagagcggagtgcctagcagattttctggcagcggctccggcaccgatttcaccctgacaatatccagcctccagcctgaggacttcgccacctactactgccagcagagctacagcacccctctgacctttggacagggcaccaaggtggaaatcaagctcgaggacctgaagaacgtgttcccacctgaggtggccgtgttcgagcctagcaaggccgagatcagcagaacccagaaagccaccctcgtgtgcctggctaccggcttctaccctcctcatgtggaactgtcttggtgggtcaacggcaaagaggtgcacgacggcgtgtgtaccgacccccagccactgaaagaacagcccgccctgaacgacagccggtactgcctgagcagcagactgagagtgtccgccaccttctggcagaacccccggaaccacttcagatgccaggtgcagttctacggcctgagcgagaacgacgagtggacccaggacagagccaagcccgtgacccagatcgtgtctgccgaagcctggggcagagccgattgcggctttaccagcgagagctaccagcagggcgtgctgagcgccaccatcctgtacgagatcctgctgggcaaggccaccctgtacgccgtgctggtgtctgccctggtgctgatggctatggtcaagcggaaggacagccggggaagggccaagcgatctggatctggagcaacaaacttctcactactcaaacaagcaggtgacgtggaggagaatcccgggcctactagtatggactggatttggcgcatccttttccttgtcggcgctgctaccggcgcgcattccttcgaagaggtgcagctggttgaatctggcggaggactggttcagcctggcggatctctgagactgtcttgtgctgccagcggcttcaccttcagctcctacgccatgagctgggtccgacaggctcctggcaaaggactggaatgggtgtccgccatctctggctcaggcggcagcacatattacgccgactctgtgaagggcagattcaccatcagccgggacaacagcaagaacaccctgtacctccagatgaactccctgagagccgaggacaccgccgtgtactattgtgccagactgggctaccccaccaccacactgctgccctttgattattggggccagggcaccctggtcaccgtttcttctacgcgtatccagaaccctgatcctgccgtgtaccagctgcgggatagcaagagcagcgacaagttcgtgtgtctgttcaccgacttcgacagccagatcaacgtgtcccagagcaaggactccgacgtgtacatcaccgataagtgcgtgctggacatgcggagcatggacttcaagagcaactccgccgtggcctggtccaacaagtccgatttcacctgcgccaacgccttcaacaacagcattatccccgaggacacattcttcccaagccccgagagcagctgcgacgtgaagctggtggaaaagagcttcgagacagacaccaacctgaacttccagaacctgagcgtgatcggcttcagaatcctgctgctgaaagtggccggctttaacctgctgatgaccctgcggctgtggtccagc

SEQ ID NO: 39190 - DNA, 2292 bp, synthetic construct
  source 1..2292: mol_type = other DNA
atggccttaccagtgaccgccttgctcctgccgctggccttgctgctccacgccgccaggccggacatccagatgacacagagccctagcagcctgtctgccagcgtgggagacagagtgaccatcacctgtagagccagccagagcatcagcagctacctgaactggtatcagcagaagcccggcaaggcccctaaactgctgatctatgccgccagctctctccagagcggagtgcctagcagattttctggcagcggctccggcaccgatttcaccctgacaatatccagcctccagcctgaggacttcgccacctactactgccagcagagctacagcacccctctgacctttggacagggcaccaaggtggaaatcaagctcgaggacctgaagaacgtgttcccacctgaggtggccgtgttcgagcctagcgaggccgagatcagccacacccagaaagccaccctcgtgtgcctggctaccggcttctaccccgaccatgtggaactgtcttggtgggtcaacggcaaagaggtgcacagcggcgtgtgtaccgacccccagccactgaaagaacagcccgccctgaacgacagccggtactgcctgagcagcagactgagagtgtccgccaccttctggcagaacccccggaaccacttcagatgccaggtgcagttctacggcctgagcgagaacgacgagtggacccaggacagagccaagcccgtgacccagatcgtgtctgccgaagcctggggcagagccgattgcggctttaccagcgagagctaccagcagggcgtgctgagcgccaccatcctgtacgagatcctgctgggcaaggccaccctgtacgccgtgctggtgtctgccctggtgctgatggctatggtcaagcggaaggacagccggggaagggccaagcgatctggatctggagcaacaaacttctcactactcaaacaagcaggtgacgtggaggagaatcccgggcctactagtaccatggactggatttggcgcatccttttccttgtcggcgctgctaccggcgcccattccgggccccaggtgcagctccaagaaagcggacccggactggttaagccctctcagaccctgtctctgacctgcacagttagcggagccagcattaccacaggcgagtattattggaattggtttcggcagccaccaggcaaggggcttgagtggatgggtgctattgctgcctctggcagcaccacctactctcccagctttgagagcagaacctccatcagccgggacacctccaaaaaccagttctctctgaagctgtcctccgtgaccgctgctgacaccgccgtctattattgtggccggtctttcggcgtggcagctgtgaccacaggacagaacagaggccagggaacacttgtgaccgtgtcctctggatccggcggcggaggatctggcggaggcggatctgggggcggaggctctttcgaagaggtgcagctggttgaatctggcggaggactggttcagcctggcggatctctgagactgtcttgtgctgccagcggcttcaccttcagctcctacgccatgagctgggtccgacaggctcctggcaaaggactggaatgggtgtccgccatctctggctcaggcggcagcacatattacgccgactctgtgaagggcagattcaccatcagccgggacaacagcaagaacaccctgtacctccagatgaactccctgagagccgaggacaccgccgtgtactattgtgccagactgggctaccccaccaccacactgctgccctttgattattggggccagggcaccctggtcaccgtttcttctacgcgtatccagaaccctgatcctgccgtgtaccagctgcgggatagcaagagcagcgacaagagcgtgtgtctgttcaccgacttcgacagccagaccaacgtgtcccagagcaaggactccgacgtgtacatcaccgataagtgcgtgctggacatgcggagcatggacttcaagagcaactccgccgtggcctggtccaacaagtccgatttcgcctgcgccaacgccttcaacaacagcattatccccgaggacacattcttcccaagccccgagagcagctgcgacgtgaagctggtggaaaagagcttcgagacagacaccaacctgaacttccagaacctgagcgtgatcggcttcagaatcctgctgctgaaagtggccggctttaacctgctgatgaccctgcggctgtggtccagc

SEQ ID NO: 39191 - DNA, 2715 bp, synthetic construct
  source 1..2715: mol_type = other DNA
atggccttaccagtgaccgccttgctcctgccgctggccttgctgctccacgccgccaggccgcaggttcagctgcaagagtctggccctggcctggtcaagcctagccaaacactgagcctgacctgtaccgtgtctggcggctctatcaccaccggcgagttctactggaactggttcagacagcctcctggcaaaggactggaatggatgggagccattgccgccagcggcagcacaacatacagccctagcttcgagagccggaccagcatcagcagagacaccagcaagaatcagttcagcctgaagctgagcagcgtgacagccgccgatacagccgtgtattactgcggcagatcctttggagtggccgccgtgacaaccggccagaatagaggacagggcaccctggtcacagtgtctagcggtaccggcggaggcggatctggcggcggaggtagcggtggcggaggatctgaattcgacatccagatgacacagagccctagcagcctgtctgccagcgtgggagacagagtgaccatcacctgtagagccagccagagcatcagcagctacctgaactggtatcagcagaagcccggcaaggcccctaaactgctgatctatgccgccagctctctccagagcggagtgcctagcagattttctggcagcggctccggcaccgatttcaccctgacaatatccagcctccagcctgaggacttcgccacctactactgccagcagagctacagcacccctctgacctttggacagggcaccaaggtggaaatcaagctcgagatccagaaccctgatcctgccgtgtaccagctgcgggatagcaagagcagcgacaagagcgtgtgtctgttcaccgacttcgacagccagaccaacgtgtcccagagcaaggactccgacgtgtacatcaccgataagtgcgtgctggacatgcggagcatggacttcaagagcaactccgccgtggcctggtccaacaagtccgatttcgcctgcgccaacgccttcaacaacagcattatccccgaggacacattcttcccaagcagcgacgtgccctgcgacgtgaagctggtggaaaagagcttcgagacagacaccaacctgaacttccagaacctgagcgtgatcggcttcagaatcctgctgctgaaagtggccggctttaacctgctgatgaccctgcggctgtggtccagccgcgccaagagaagcggatctggcgtgaagcagaccctgaatttcgacctgctgaagctggctggcgacgtggaatccaacccaggccctactagtaccatggactggatttggcgcatccttttccttgtcggcgctgctaccggcgcccattccgggcccgaagtgcaactggttgaatccggtggcggcctggtgcaacccggcggatctctcagacttagctgtgccgcctccggcagaaccttcacaatgggatggtacaggcaggctccagggaaagagagagagttcgtcgccgccatctctctgtctcccacactggcctactacgccgactctgtgaaaggccggttcaccatctccagagataatagcaagaacaccgtggtgctgcaaatgaactctctgagagccgaggatacagccctgtactattgtgccgctgaccggaagtccgtgatgagcatcagacccgattactggggacagggcacactggtcacagtgtctagtggatccggcggcggaggatctggcggaggcggatctgggggcggaggctctttcgaagaggtgcagctggttgaatctggcggaggactggttcagcctggcggatctctgagactgtcttgtgctgccagcggcttcaccttcagctcctacgccatgagctgggtccgacaggctcctggcaaaggactggaatgggtgtccgccatctctggctcaggcggcagcacatattacgccgactctgtgaagggcagattcaccatcagccgggacaacagcaagaacaccctgtacctccagatgaactccctgagagccgaggacaccgccgtgtactattgtgccagactgggctaccccaccaccacactgctgccctttgattattggggccagggcaccctggtcaccgtttcttctacgcgtgaggacctgaagaacgtgttcccacctgaggtggccgtgttcgagcctagcaaggccgagatcgcccacacccagaaagccaccctcgtgtgcctggctaccggcttctaccccgaccatgtggaactgtcttggtgggtcaacggcaaagaggtgcacagcggcgtgtgtaccgacccccagccactgaaagaacagcccgccctgaacgacagccggtactgcctgagcagcagactgagagtgtccgccaccttctggcagaacccccggaaccacttcagatgccaggtgcagttctacggcctgagcgagaacgacgagtggacccaggacagagccaagcccgtgacccagatcgtgtctgccgaagcctggggcagagccgattgcggcatcaccagcgccagctaccaccagggcgtgctgagcgccaccatcctgtacgagatcctgctgggcaaggccaccctgtacgccgtgctggtgtctgccctggtgctgatggctatggtcaagcggaaggacagccgggga

SEQ ID NO: 39192 - DNA, 2304 bp, synthetic construct
  source 1..2304: mol_type = other DNA
atggccttaccagtgaccgccttgctcctgccgctggccttgctgctccacgccgccaggccgcaggttcagctgcaagagtctggccctggcctggtcaagcctagccaaacactgagcctgacctgtaccgtgtctggcggctctatcaccaccggcgagttctactggaactggttcagacagcctcctggcaaaggactggaatggatgggagccattgccgccagcggcagcacaacatacagccctagcttcgagagccggaccagcatcagcagagacaccagcaagaatcagttcagcctgaagctgagcagcgtgacagccgccgatacagccgtgtattactgcggcagatcctttggagtggccgccgtgacaaccggccagaatagaggacagggcaccctggtcacagtgtctagcggtaccggcggaggcggatctggcggcggaggtagcggtggcggaggatctgaattcgacatccagatgacacagagccctagcagcctgtctgccagcgtgggagacagagtgaccatcacctgtagagccagccagagcatcagcagctacctgaactggtatcagcagaagcccggcaaggcccctaaactgctgatctatgccgccagctctctccagagcggagtgcctagcagattttctggcagcggctccggcaccgatttcaccctgacaatatccagcctccagcctgaggacttcgccacctactactgccagcagagctacagcacccctctgacctttggacagggcaccaaggtggaaatcaagctcgagatccagaaccctgatcctgccgtgtaccagctgcgggatagcaagagcagcgacaagagcgtgtgtctgttcaccgacttcgacagccagaccaacgtgtcccagagcaaggactccgacgtgtacatcaccgataagtgcgtgctggacatgcggagcatggacttcaagagcaactccgccgtggcctggtccaacaagtccgatttcgcctgcgccaacgccttcaacaacagcattatccccgaggacacattcttcccaagcagcgacgtgccctgcgacgtgaagctggtggaaaagagcttcgagacagacaccaacctgaacttccagaacctgagcgtgatcggcttcagaatcctgctgctgaaagtggccggctttaacctgctgatgaccctgcggctgtggtccagccgcgccaagagaagcggatctggcgtgaagcagaccctgaatttcgacctgctgaagctggctggcgacgtggaatccaacccaggccctactagtaccatggactggatttggcgcatccttttccttgtcggcgctgctaccggcgcccattccttcgaagaggtgcagctggttgaatctggcggaggactggttcagcctggcggatctctgagactgtcttgtgctgccagcggcttcaccttcagctcctacgccatgagctgggtccgacaggctcctggcaaaggactggaatgggtgtccgccatctctggctcaggcggcagcacatattacgccgactctgtgaagggcagattcaccatcagccgggacaacagcaagaacaccctgtacctccagatgaactccctgagagccgaggacaccgccgtgtactattgtgccagactgggctaccccaccaccacactgctgccctttgattattggggccagggcaccctggtcaccgtttcttctacgcgtgaggacctgaagaacgtgttcccacctgaggtggccgtgttcgagcctagcaaggccgagatcgcccacacccagaaagccaccctcgtgtgcctggctaccggcttctaccccgaccatgtggaactgtcttggtgggtcaacggcaaagaggtgcacagcggcgtgtgtaccgacccccagccactgaaagaacagcccgccctgaacgacagccggtactgcctgagcagcagactgagagtgtccgccaccttctggcagaacccccggaaccacttcagatgccaggtgcagttctacggcctgagcgagaacgacgagtggacccaggacagagccaagcccgtgacccagatcgtgtctgccgaagcctggggcagagccgattgcggcatcaccagcgccagctaccaccagggcgtgctgagcgccaccatcctgtacgagatcctgctgggcaaggccaccctgtacgccgtgctggtgtctgccctggtgctgatggctatggtcaagcggaaggacagccgggga

SEQ ID NO: 39193 - DNA, 2703 bp, synthetic construct
  source 1..2703: mol_type = other DNA
atggccttaccagtgaccgccttgctcctgccgctggccttgctgctccacgccgccaggccggaagtgcagctggttgaatctggcggaggactggttcaggctggcggatctctgagactgtcttgtgccgccagcggcagaacctttagcatgggctggtttagacaggcccctggcaaagagagagagttcgtcgccgccatcacatactctggcggcagcccttactacgccgactctgtgaagggcagattcaccatcagccgggacaacgccaagaacaccgtgtacctccagatgaacagcctgaagcctgaggacaccgccgtgtactactgcgccgccaatccaacatacggcagcgactggaacgccgagaattggggccagggaacccaagtgacagtgtctagcggtaccggcggaggcggatctggcggcggaggtagcggtggcggaggatctgaattcgacatccagatgacacagagccctagcagcctgtctgccagcgtgggagacagagtgaccatcacctgtagagccagccagagcatcagcagctacctgaactggtatcagcagaagcccggcaaggcccctaaactgctgatctatgccgccagctctctccagagcggagtgcctagcagattttctggcagcggctccggcaccgatttcaccctgacaatatccagcctccagcctgaggacttcgccacctactactgccagcagagctacagcacccctctgacctttggacagggcaccaaggtggaaatcaagctcgaggacctgaagaacgtgttcccacctgaggtggccgtgttcgagcctagcgaggccgagatcagccacacccagaaagccaccctcgtgtgcctggctaccggcttctaccccgaccatgtggaactgtcttggtgggtcaacggcaaagaggtgcacagcggcgtgtgtaccgacccccagccactgaaagaacagcccgccctgaacgacagccggtactgcctgagcagcagactgagagtgtccgccaccttctggcagaacccccggaaccacttcagatgccaggtgcagttctacggcctgagcgagaacgacgagtggacccaggacagagccaagcccgtgacccagatcgtgtctgccgaagcctggggcagagccgattgcggctttaccagcgagagctaccagcagggcgtgctgagcgccaccatcctgtacgagatcctgctgggcaaggccaccctgtacgccgtgctggtgtctgccctggtgctgatggctatggtcaagcggaaggacagccggggaagggccaagcgatctggatctggagcaacaaacttctcactactcaaacaagcaggtgacgtggaggagaatcccgggcctactagtaccatggactggatttggcgcatccttttccttgtcggcgctgctaccggcgcccattccgggccccaggtgcagctccaagaaagcggacccggactggttaagccctctcagaccctgtctctgacctgcacagttagcggagccagcattaccacaggcgagtattattggaattggtttcggcagccaccaggcaaggggcttgagtggatgggtgctattgctgcctctggcagcaccacctactctcccagctttgagagcagaacctccatcagccgggacacctccaaaaaccagttctctctgaagctgtcctccgtgaccgctgctgacaccgccgtctattattgtggccggtctttcggcgtggcagctgtgaccacaggacagaacagaggccagggaacacttgtgaccgtgtcctctggatccggcggcggaggatctggcggaggcggatctgggggcggaggctctttcgaagaggtgcagctggttgaatctggcggaggactggttcagcctggcggatctctgagactgtcttgtgctgccagcggcttcaccttcagctcctacgccatgagctgggtccgacaggctcctggcaaaggactggaatgggtgtccgccatctctggctcaggcggcagcacatattacgccgactctgtgaagggcagattcaccatcagccgggacaacagcaagaacaccctgtacctccagatgaactccctgagagccgaggacaccgccgtgtactattgtgccagactgggctaccccaccaccacactgctgccctttgattattggggccagggcaccctggtcaccgtttcttctacgcgtatccagaaccctgatcctgccgtgtaccagctgcgggatagcaagagcagcgacaagagcgtgtgtctgttcaccgacttcgacagccagaccaacgtgtcccagagcaaggactccgacgtgtacatcaccgataagtgcgtgctggacatgcggagcatggacttcaagagcaactccgccgtggcctggtccaacaagtccgatttcgcctgcgccaacgccttcaacaacagcattatccccgaggacacattcttcccaagccccgagagcagctgcgacgtgaagctggtggaaaagagcttcgagacagacaccaacctgaacttccagaacctgagcgtgatcggcttcagaatcctgctgctgaaagtggccggctttaacctgctgatgaccctgcggctgtggtccagc

SEQ ID NO: 39194 - DNA, 2724 bp, synthetic construct
  source 1..2724: mol_type = other DNA
atggccttaccagtgaccgccttgctcctgccgctggccttgctgctccacgccgccaggccggaagtgcagctggttgaatctggcggaggactggttcaggctggcggatctctgagactgtcttgtgccgccagcggcagaacctttagcatgggctggtttagacaggcccctggcaaagagagagagttcgtcgccgccatcacatactctggcggcagcccttactacgccgactctgtgaagggcagattcaccatcagccgggacaacgccaagaacaccgtgtacctccagatgaacagcctgaagcctgaggacaccgccgtgtactactgcgccgccaatccaacatacggcagcgactggaacgccgagaattggggccagggaacccaagtgacagtgtctagcggtaccggcggaggcggatctggcggcggaggtagcggtggcggaggatctgaattcgacatccagatgacacagagccctagcagcctgtctgccagcgtgggagacagagtgaccatcacctgtagagccagccagagcatcagcagctacctgaactggtatcagcagaagcccggcaaggcccctaaactgctgatctatgccgccagctctctccagagcggagtgcctagcagattttctggcagcggctccggcaccgatttcaccctgacaatatccagcctccagcctgaggacttcgccacctactactgccagcagagctacagcacccctctgacctttggacagggcaccaaggtggaaatcaagctcgagatccagaaccctgatcctgccgtgtaccagctgcgggatagcaagagcagcgacaagagcgtgtgtctgttcaccgacttcgacagccagaccaacgtgtcccagagcaaggactccgacgtgtacatcaccgataagtgcgtgctggacatgcggagcatggacttcaagagcaactccgccgtggcctggtccaacaagtccgatttcgcctgcgccaacgccttcaacaacagcattatccccgaggacacattcttcccaagcagcgacgtgccctgcgacgtgaagctggtggaaaagagcttcgagacagacaccaacctgaacttccagaacctgagcgtgatcggcttcagaatcctgctgctgaaagtggccggctttaacctgctgatgaccctgcggctgtggtccagccgcgccaagagaagcggatctggcgtgaagcagaccctgaatttcgacctgctgaagctggctggcgacgtggaatccaacccaggccctactagtaccatggactggatttggcgcatccttttccttgtcggcgctgctaccggcgcccattccgggccccaggtgcagctggttgaatctggcggaggactggttcagcctggcggatctctgagactgtcttgtgccgccagcggcaacatcaacagcagaaactgcatgggctggttcagacaggcccctggcaagggaagagaaggcgtggcagctatcggccaagtgaccggcagaacctactacgtggacagcgtgaagggcagattcaccatcagcctggacaacagcaagaacaccctgtacctccagatgaacagcctgagagccgaggacaccgccgtgtactattgtgctgctgcccctggctgtctgctgtctgcacttagaagcgccgactacagaaactggggccagggcacactggtcaccgtttcttctggatccggcggcggaggatctggcggaggcggatctgggggcggaggctctttcgaagaggtgcagctggttgaatctggcggaggactggttcagcctggcggatctctgagactgtcttgtgctgccagcggcttcaccttcagctcctacgccatgagctgggtccgacaggctcctggcaaaggactggaatgggtgtccgccatctctggctcaggcggcagcacatattacgccgactctgtgaagggcagattcaccatcagccgggacaacagcaagaacaccctgtacctccagatgaactccctgagagccgaggacaccgccgtgtactattgtgccagactgggctaccccaccaccacactgctgccctttgattattggggccagggcaccctggtcaccgtttcttctacgcgtgaggacctgaagaacgtgttcccacctgaggtggccgtgttcgagcctagcaaggccgagatcgcccacacccagaaagccaccctcgtgtgcctggctaccggcttctaccccgaccatgtggaactgtcttggtgggtcaacggcaaagaggtgcacagcggcgtgtgtaccgacccccagccactgaaagaacagcccgccctgaacgacagccggtactgcctgagcagcagactgagagtgtccgccaccttctggcagaacccccggaaccacttcagatgccaggtgcagttctacggcctgagcgagaacgacgagtggacccaggacagagccaagcccgtgacccagatcgtgtctgccgaagcctggggcagagccgattgcggcatcaccagcgccagctaccaccagggcgtgctgagcgccaccatcctgtacgagatcctgctgggcaaggccaccctgtacgccgtgctggtgtctgccctggtgctgatggctatggtcaagcggaaggacagccgggga

SEQ ID NO: 39195 - DNA, 2712 bp, synthetic construct
  source 1..2712: mol_type = other DNA
atggccttaccagtgaccgccttgctcctgccgctggccttgctgctccacgccgccaggccggaagtgcagctggttgaatctggcggaggactggttcaggctggcggatctctgagactgtcttgtgccgccagcggcagaacctttagcatgggctggtttagacaggcccctggcaaagagagagagttcgtcgccgccatcacatactctggcggcagcccttactacgccgactctgtgaagggcagattcaccatcagccgggacaacgccaagaacaccgtgtacctccagatgaacagcctgaagcctgaggacaccgccgtgtactactgcgccgccaatccaacatacggcagcgactggaacgccgagaattggggccagggaacccaagtgacagtgtctagcggtaccggcggaggcggatctggcggcggaggtagcggtggcggaggatctgaattcgacatccagatgacacagagccctagcagcctgtctgccagcgtgggagacagagtgaccatcacctgtagagccagccagagcatcagcagctacctgaactggtatcagcagaagcccggcaaggcccctaaactgctgatctatgccgccagctctctccagagcggagtgcctagcagattttctggcagcggctccggcaccgatttcaccctgacaatatccagcctccagcctgaggacttcgccacctactactgccagcagagctacagcacccctctgacctttggacagggcaccaaggtggaaatcaagctcgaggacctgaagaacgtgttcccacctgaggtggccgtgttcgagcctagcgaggccgagatcagccacacccagaaagccaccctcgtgtgcctggctaccggcttctaccccgaccatgtggaactgtcttggtgggtcaacggcaaagaggtgcacagcggcgtgtgtaccgacccccagccactgaaagaacagcccgccctgaacgacagccggtactgcctgagcagcagactgagagtgtccgccaccttctggcagaacccccggaaccacttcagatgccaggtgcagttctacggcctgagcgagaacgacgagtggacccaggacagagccaagcccgtgacccagatcgtgtctgccgaagcctggggcagagccgattgcggctttaccagcgagagctaccagcagggcgtgctgagcgccaccatcctgtacgagatcctgctgggcaaggccaccctgtacgccgtgctggtgtctgccctggtgctgatggctatggtcaagcggaaggacagccggggaagggccaagcgatctggatctggagcaacaaacttctcactactcaaacaagcaggtgacgtggaggagaatcccgggcctactagtaccatggactggatttggcgcatccttttccttgtcggcgctgctaccggcgcccattccgggccccaggtgcagctggttgaatctggcggaggactggttcagcctggcggatctctgagactgtcttgtgccgccagcggcaacatcaacagcagaaactgcatgggctggttcagacaggcccctggcaagggaagagaaggcgtggcagctatcggccaagtgaccggcagaacctactacgtggacagcgtgaagggcagattcaccatcagcctggacaacagcaagaacaccctgtacctccagatgaacagcctgagagccgaggacaccgccgtgtactattgtgctgctgcccctggctgtctgctgtctgcacttagaagcgccgactacagaaactggggccagggcacactggtcaccgtttcttctggatccggcggcggaggatctggcggaggcggatctgggggcggaggctctttcgaagaggtgcagctggttgaatctggcggaggactggttcagcctggcggatctctgagactgtcttgtgctgccagcggcttcaccttcagctcctacgccatgagctgggtccgacaggctcctggcaaaggactggaatgggtgtccgccatctctggctcaggcggcagcacatattacgccgactctgtgaagggcagattcaccatcagccgggacaacagcaagaacaccctgtacctccagatgaactccctgagagccgaggacaccgccgtgtactattgtgccagactgggctaccccaccaccacactgctgccctttgattattggggccagggcaccctggtcaccgtttcttctacgcgtatccagaaccctgatcctgccgtgtaccagctgcgggatagcaagagcagcgacaagagcgtgtgtctgttcaccgacttcgacagccagaccaacgtgtcccagagcaaggactccgacgtgtacatcaccgataagtgcgtgctggacatgcggagcatggacttcaagagcaactccgccgtggcctggtccaacaagtccgatttcgcctgcgccaacgccttcaacaacagcattatccccgaggacacattcttcccaagccccgagagcagctgcgacgtgaagctggtggaaaagagcttcgagacagacaccaacctgaacttccagaacctgagcgtgatcggcttcagaatcctgctgctgaaagtggccggctttaacctgctgatgaccctgcggctgtggtccagc

SEQ ID NO: 39196 - DNA, 2712 bp, synthetic construct
  source 1..2712: mol_type = other DNA
atggccttaccagtgaccgccttgctcctgccgctggccttgctgctccacgccgccaggccggaagtgcaactggttgaatccggtggcggcctggtgcaagcaggcggatctctcagacttagctgtgccgcctccggcagaaccttcacaatgggatggtttaggcaggctccagggaaagagagagagttcgtcgccgccatctctctgtctcccacactggcctactacgccgactctgtgaaaggccggttcaccatctccagagataatgccaagaacaccgtggtgctgcaaatgaactctctgaaacccgaggatacagccctgtactattgtgccgctgaccggaagtccgtgatgagcatcagacccgattactggggacagggcacacaagtcacagtgtcctctggtaccggcggaggcggatctggcggcggaggtagcggtggcggaggatctgaattcgacatccagatgacacagagccctagcagcctgtctgccagcgtgggagacagagtgaccatcacctgtagagccagccagagcatcagcagctacctgaactggtatcagcagaagcccggcaaggcccctaaactgctgatctatgccgccagctctctccagagcggagtgcctagcagattttctggcagcggctccggcaccgatttcaccctgacaatatccagcctccagcctgaggacttcgccacctactactgccagcagagctacagcacccctctgacctttggacagggcaccaaggtggaaatcaagctcgaggacctgaagaacgtgttcccacctgaggtggccgtgttcgagcctagcgaggccgagatcagccacacccagaaagccaccctcgtgtgcctggctaccggcttctaccccgaccatgtggaactgtcttggtgggtcaacggcaaagaggtgcacagcggcgtgtgtaccgacccccagccactgaaagaacagcccgccctgaacgacagccggtactgcctgagcagcagactgagagtgtccgccaccttctggcagaacccccggaaccacttcagatgccaggtgcagttctacggcctgagcgagaacgacgagtggacccaggacagagccaagcccgtgacccagatcgtgtctgccgaagcctggggcagagccgattgcggctttaccagcgagagctaccagcagggcgtgctgagcgccaccatcctgtacgagatcctgctgggcaaggccaccctgtacgccgtgctggtgtctgccctggtgctgatggctatggtcaagcggaaggacagccggggaagggccaagcgatctggatctggagcaacaaacttctcactactcaaacaagcaggtgacgtggaggagaatcccgggcctactagtaccatggactggatttggcgcatccttttccttgtcggcgctgctaccggcgcccattccgggccccaggtgcagctggttgaatctggcggaggactggttcagcctggcggatctctgagactgtcttgtgccgccagcggcaacatcaacagcagaaactgcatgggctggttcagacaggcccctggcaagggaagagaaggcgtggcagctatcggccaagtgaccggcagaacctactacgtggacagcgtgaagggcagattcaccatcagcctggacaacagcaagaacaccctgtacctccagatgaacagcctgagagccgaggacaccgccgtgtactattgtgctgctgcccctggctgtctgctgtctgcacttagaagcgccgactacagaaactggggccagggcacactggtcaccgtttcttctggatccggcggcggaggatctggcggaggcggatctgggggcggaggctctttcgaagaggtgcagctggttgaatctggcggaggactggttcagcctggcggatctctgagactgtcttgtgctgccagcggcttcaccttcagctcctacgccatgagctgggtccgacaggctcctggcaaaggactggaatgggtgtccgccatctctggctcaggcggcagcacatattacgccgactctgtgaagggcagattcaccatcagccgggacaacagcaagaacaccctgtacctccagatgaactccctgagagccgaggacaccgccgtgtactattgtgccagactgggctaccccaccaccacactgctgccctttgattattggggccagggcaccctggtcaccgtttcttctacgcgtatccagaaccctgatcctgccgtgtaccagctgcgggatagcaagagcagcgacaagagcgtgtgtctgttcaccgacttcgacagccagaccaacgtgtcccagagcaaggactccgacgtgtacatcaccgataagtgcgtgctggacatgcggagcatggacttcaagagcaactccgccgtggcctggtccaacaagtccgatttcgcctgcgccaacgccttcaacaacagcattatccccgaggacacattcttcccaagccccgagagcagctgcgacgtgaagctggtggaaaagagcttcgagacagacaccaacctgaacttccagaacctgagcgtgatcggcttcagaatcctgctgctgaaagtggccggctttaacctgctgatgaccctgcggctgtggtccagc

SEQ ID NO: 39197 - DNA, 2724 bp, synthetic construct
  source 1..2724: mol_type = other DNA
atggccttaccagtgaccgccttgctcctgccgctggccttgctgctccacgccgccaggccgcaggttcagctgcaagagtctggccctggcctggtcaagcctagccaaacactgagcctgacctgtaccgtgtctggcggctctatcaccaccggcgagttctactggaactggttcagacagcctcctggcaaaggactggaatggatgggagccattgccgccagcggcagcacaacatacagccctagcttcgagagccggaccagcatcagcagagacaccagcaagaatcagttcagcctgaagctgagcagcgtgacagccgccgatacagccgtgtattactgcggcagatcctttggagtggccgccgtgacaaccggccagaatagaggacagggcaccctggtcacagtgtctagcggtaccggcggaggcggatctggcggcggaggtagcggtggcggaggatctgaattcgacatccagatgacacagagccctagcagcctgtctgccagcgtgggagacagagtgaccatcacctgtagagccagccagagcatcagcagctacctgaactggtatcagcagaagcccggcaaggcccctaaactgctgatctatgccgccagctctctccagagcggagtgcctagcagattttctggcagcggctccggcaccgatttcaccctgacaatatccagcctccagcctgaggacttcgccacctactactgccagcagagctacagcacccctctgacctttggacagggcaccaaggtggaaatcaagctcgaggacctgaagaacgtgttcccacctgaggtggccgtgttcgagcctagcgaggccgagatcagccacacccagaaagccaccctcgtgtgcctggctaccggcttctaccccgaccatgtggaactgtcttggtgggtcaacggcaaagaggtgcacagcggcgtgtgtaccgacccccagccactgaaagaacagcccgccctgaacgacagccggtactgcctgagcagcagactgagagtgtccgccaccttctggcagaacccccggaaccacttcagatgccaggtgcagttctacggcctgagcgagaacgacgagtggacccaggacagagccaagcccgtgacccagatcgtgtctgccgaagcctggggcagagccgattgcggctttaccagcgagagctaccagcagggcgtgctgagcgccaccatcctgtacgagatcctgctgggcaaggccaccctgtacgccgtgctggtgtctgccctggtgctgatggctatggtcaagcggaaggacagccggggaagggccaagcgatctggatctggagcaacaaacttctcactactcaaacaagcaggtgacgtggaggagaatcccgggcctactagtaccatggactggatttggcgcatccttttccttgtcggcgctgctaccggcgcccattccgggccccaggtgcagctggttgaatctggcggaggactggttcagcctggcggatctctgagactgtcttgtgccgccagcggcaacatcaacagcagaaactgcatgggctggttcagacaggcccctggcaagggaagagaaggcgtggcagctatcggccaagtgaccggcagaacctactacgtggacagcgtgaagggcagattcaccatcagcctggacaacagcaagaacaccctgtacctccagatgaacagcctgagagccgaggacaccgccgtgtactattgtgctgctgcccctggctgtctgctgtctgcacttagaagcgccgactacagaaactggggccagggcacactggtcaccgtttcttctggatccggcggcggaggatctggcggaggcggatctgggggcggaggctctttcgaagaggtgcagctggttgaatctggcggaggactggttcagcctggcggatctctgagactgtcttgtgctgccagcggcttcaccttcagctcctacgccatgagctgggtccgacaggctcctggcaaaggactggaatgggtgtccgccatctctggctcaggcggcagcacatattacgccgactctgtgaagggcagattcaccatcagccgggacaacagcaagaacaccctgtacctccagatgaactccctgagagccgaggacaccgccgtgtactattgtgccagactgggctaccccaccaccacactgctgccctttgattattggggccagggcaccctggtcaccgtttcttctacgcgtatccagaaccctgatcctgccgtgtaccagctgcgggatagcaagagcagcgacaagagcgtgtgtctgttcaccgacttcgacagccagaccaacgtgtcccagagcaaggactccgacgtgtacatcaccgataagtgcgtgctggacatgcggagcatggacttcaagagcaactccgccgtggcctggtccaacaagtccgatttcgcctgcgccaacgccttcaacaacagcattatccccgaggacacattcttcccaagccccgagagcagctgcgacgtgaagctggtggaaaagagcttcgagacagacaccaacctgaacttccagaacctgagcgtgatcggcttcagaatcctgctgctgaaagtggccggctttaacctgctgatgaccctgcggctgtggtccagc

SEQ ID NO: 39198 - DNA, 1464 bp, synthetic construct
  source 1..1464: mol_type = other DNA
atggccttaccagtgaccgccttgctcctgccgctggccttgctgctccacgccgccaggccggacatccagatgacacagagccctagcagcctgtctgccagcgtgggagacagagtgaccatcacctgtagagccagccaggacatcaacacagccgtggcttggtatcagcagaagcctggcaaggcccctaagctgctgatctacagcgcctacttcctgtacagcggcgtgcccagcagattcagcggaagcagaagcggcaccgacttcaccctgacaatatccagcctccagcctgaggacttcgccacctactactgccagcagtacagcagatacagccccgtgacctttggacagggcaccaaggtggaaatcaagagaggcggaggcggaagtggaggcggaggatctggcggcggaggctctgaagttcagctggttgaaagtggtggcggcctggttcaacctggcggatctctgagactgagctgtgccgccagcggcttcaatgtgtacgcctctggaatgcactgggtccgacaggcccctggcaaaggacttgagtgggtcgccaaaatctaccccgacagcgactacacctattacgccgacagcgtgaagggcagattcaccatcagcgccgacaccagcaagaacaccgcctacctccagatgaactccctgagagccgaggacaccgccgtgtactactgtagcagagacagcagcttctactacgtgtacgctatggactactggggccagggcacactggtcacagtctcttctacgcgtaaaattgaagttatgtatcctcctccttacctagacaatgagaagagcaatggaaccattatccatgtgaaagggaaacacctttgtccaagtcccctatttcccggaccttctaagcccttttgggtgctggtggtggttgggggagtcctggcttgctatagcttgctagtaacagtggcctttattattttctgggtgaggagtaagaggagcaggctcctgcacagtgactacatgaacatgactccacgccgccccggacccacccgcaagcattaccagccctatgccccaccacgcgacttcgcagcctatcgctccagagtgaagttcagcaggagcgcagacgcccccgcgtaccagcagggccagaaccagctctataacgagctcaatctaggacgaagagaggagtacgatgttttggacaagagacgtggccgggaccctgagatggggggaaagccgagaaggaagaaccctcaggaaggcctgtacaatgaactgcagaaagataagatggcggaggcctacagtgagattgggatgaaaggcgagcgccggaggggcaaggggcacgatggcctttaccagggtctcagtacagccaccaaggacacctacgacgcccttcacatgcaggccctgccccctcgc

SEQ ID NO: 39199 - DNA, 1482 bp, synthetic construct
  source 1..1482: mol_type = other DNA
atggccttaccagtgaccgccttgctcctgccgctggccttgctgctccacgccgccaggccggacatccagatgacacagagccctagcagcctgtctgccagcgtgggagacagagtgaccatcacctgtagagccagccaggacatcaacacagccgtggcttggtatcagcagaagcctggcaaggcccctaagctgctgatctacagcgcctacttcctgtacagcggcgtgcccagcagattcagcggaagcagaagcggcaccgacttcaccctgacaatatccagcctccagcctgaggacttcgccacctactactgccagcagtacagcagatacagccccgtgacctttggacagggcaccaaggtggaaatcaagagaggcggaggcggaagtggaggcggaggatctggcggcggaggctctgaagttcagctggttgaaagtggtggcggcctggttcaacctggcggatctctgagactgagctgtgccgccagcggcttcaatgtgtacgcctctggaatgcactgggtccgacaggcccctggcaaaggacttgagtgggtcgccaaaatctaccccgacagcgactacacctattacgccgacagcgtgaagggcagattcaccatcagcgccgacaccagcaagaacaccgcctacctccagatgaactccctgagagccgaggacaccgccgtgtactactgtagcagagacagcagcttctactacgtgtacgctatggactactggggccagggcacactggtcacagtctcttctacgcgtgcgaagcccaccacgacgccagcgccgcgaccaccaacaccggcgcccaccatcgcgtcgcagcccctgtccctgcgcccagaggcgtgccggccagcggcggggggcgcagtgcacacgagggggctggacttcgcctgtgacatctacatctgggcgcccttggccgggacttgtggggtccttctcctgtcactggttatcaccctttactgcaaacggggcagaaagaaactcctgtatatattcaaacaaccatttatgagaccagtacaaactactcaagaggaagatggctgtagctgccgatttccagaagaagaagaaggaggatgtgaactgagagtgaagttcagcaggagcgcagacgcccccgcgtaccagcagggccagaaccagctctataacgagctgaatctaggacgaagagaggagtacgatgttttggacaagagacgtggccgggaccctgagatggggggaaagccgagaaggaagaaccctcaggaaggcctgtacaatgaactgcagaaagataagatggcggaggcctacagtgagattgggatgaaaggcgagcgccggaggggcaaggggcacgatggcctttaccagggtctcagtacagccaccaaggacacctacgacgcccttcacatgcaggccctgccccctcgc

SEQ ID NO: 39200 - DNA, 1482 bp, synthetic construct
  source 1..1482: mol_type = other DNA
atggccttaccagtgaccgccttgctcctgccgctggccttgctgctccacgccgccaggccggaagttcagctggttgaaagtggtggcggcctggttcaacctggcggatctctgagactgagctgtgccgccagcggcttcaatgtgtacgcctctggaatgcactgggtccgacaggcccctggcaaaggacttgagtgggtcgccaaaatctaccccgacagcgactacacctattacgccgacagcgtgaagggcagattcaccatcagcgccgacaccagcaagaacaccgcctacctccagatgaactccctgagagccgaggacaccgccgtgtactactgtagcagagacagcagcttctactacgtgtacgctatggactactggggccagggcacactggtcacagtctcttctggcggaggcggaagtggaggcggaggatctggcggcggaggctctgacatccagatgacacagagccctagcagcctgtctgccagcgtgggagacagagtgaccatcacctgtagagccagccaggacatcaacacagccgtggcttggtatcagcagaagcctggcaaggcccctaagctgctgatctacagcgcctacttcctgtacagcggcgtgcccagcagattcagcggaagcagaagcggcaccgacttcaccctgacaatatccagcctccagcctgaggacttcgccacctactactgccagcagtacagcagatacagccccgtgacctttggacagggcaccaaggtggaaatcaagagaacgcgtgcgaagcccaccacgacgccagcgccgcgaccaccaacaccggcgcccaccatcgcgtcgcagcccctgtccctgcgcccagaggcgtgccggccagcggcggggggcgcagtgcacacgagggggctggacttcgcctgtgacatctacatctgggcgcccttggccgggacttgtggggtccttctcctgtcactggttatcaccctttactgcaaacggggcagaaagaaactcctgtatatattcaaacaaccatttatgagaccagtacaaactactcaagaggaagatggctgtagctgccgatttccagaagaagaagaaggaggatgtgaactgagagtgaagttcagcaggagcgcagacgcccccgcgtaccagcagggccagaaccagctctataacgagctgaatctaggacgaagagaggagtacgatgttttggacaagagacgtggccgggaccctgagatggggggaaagccgagaaggaagaaccctcaggaaggcctgtacaatgaactgcagaaagataagatggcggaggcctacagtgagattgggatgaaaggcgagcgccggaggggcaaggggcacgatggcctttaccagggtctcagtacagccaccaaggacacctacgacgcccttcacatgcaggccctgccccctcgc

SEQ ID NO: 39201 - DNA, 1881 bp, synthetic construct
  source 1..1881: mol_type = other DNA
atggccttaccagtgaccgccttgctcctgccgctggccttgctgctccacgccgccaggccggacatccagatgacacagagccctagcagcctgtctgccagcgtgggagacagagtgaccatcacctgtagagccagccaggacatcaacacagccgtggcttggtatcagcagaagcctggcaaggcccctaagctgctgatctacagcgcctacttcctgtacagcggcgtgcccagcagattcagcggaagcagaagcggcaccgacttcaccctgacaatatccagcctccagcctgaggacttcgccacctactactgccagcagtacagcagatacagccccgtgacctttggacagggcaccaaggtggaaatcaagagactcgagatccagaaccctgatcctgccgtgtaccagctgcgggatagcaagagcagcgacaagagcgtgtgtctgttcaccgacttcgacagccagaccaacgtgtcccagagcaaggactccgacgtgtacatcaccgataagtgcgtgctggacatgcggagcatggacttcaagagcaactccgccgtggcctggtccaacaagtccgatttcgcctgcgccaacgccttcaacaacagcattatccccgaggacacattcttcccaagcagcgacgtgccctgcgacgtgaagctggtggaaaagagcttcgagacagacaccaacctgaacttccagaacctgagcgtgatcggcttcagaatcctgctgctgaaagtggccggctttaacctgctgatgaccctgcggctgtggtccagccgcgccaagagaagcggatctggcgtgaagcagaccctgaatttcgacctgctgaagctggctggcgacgtggaatccaacccaggccctactagtatggactggatttggcgcatccttttccttgtcggcgctgctaccggcgcgcattccttcgaagaagttcagctggttgaaagtggtggcggcctggttcaacctggcggatctctgagactgagctgtgccgccagcggcttcaatgtgtacgcctctggaatgcactgggtccgacaggcccctggcaaaggacttgagtgggtcgccaaaatctaccccgacagcgactacacctattacgccgacagcgtgaagggcagattcaccatcagcgccgacaccagcaagaacaccgcctacctccagatgaactccctgagagccgaggacaccgccgtgtactactgtagcagagacagcagcttctactacgtgtacgctatggactactggggccagggcacactggtcacagtctcttctacgcgtgaggacctgaagaacgtgttcccacctgaggtggccgtgttcgagcctagcaaggccgagatcgcccacacccagaaagccaccctcgtgtgcctggctaccggcttctaccccgaccatgtggaactgtcttggtgggtcaacggcaaagaggtgcacagcggcgtgtgtaccgacccccagccactgaaagaacagcccgccctgaacgacagccggtactgcctgagcagcagactgagagtgtccgccaccttctggcagaacccccggaaccacttcagatgccaggtgcagttctacggcctgagcgagaacgacgagtggacccaggacagagccaagcccgtgacccagatcgtgtctgccgaagcctggggcagagccgattgcggcatcaccagcgccagctaccaccagggcgtgctgagcgccaccatcctgtacgagatcctgctgggcaaggccaccctgtacgccgtgctggtgtctgccctggtgctgatggctatggtcaagcggaaggacagccgggga

SEQ ID NO: 39202 - DNA, 1869 bp, synthetic construct
  source 1..1869: mol_type = other DNA
atggccttaccagtgaccgccttgctcctgccgctggccttgctgctccacgccgccaggccggacatccagatgacacagagccctagcagcctgtctgccagcgtgggagacagagtgaccatcacctgtagagccagccaggacatcaacacagccgtggcttggtatcagcagaagcctggcaaggcccctaagctgctgatctacagcgcctacttcctgtacagcggcgtgcccagcagattcagcggaagcagaagcggcaccgacttcaccctgacaatatccagcctccagcctgaggacttcgccacctactactgccagcagtacagcagatacagccccgtgacctttggacagggcaccaaggtggaaatcaagagactcgaggacctgaagaacgtgttcccacctgaggtggccgtgttcgagcctagcaaggccgagatcgcccacacccagaaagccaccctcgtgtgcctggctaccggcttctaccccgaccatgtggaactgtcttggtgggtcaacggcaaagaggtgcacagcggcgtgtgtaccgacccccagccactgaaagaacagcccgccctgaacgacagccggtactgcctgagcagcagactgagagtgtccgccaccttctggcagaacccccggaaccacttcagatgccaggtgcagttctacggcctgagcgagaacgacgagtggacccaggacagagccaagcccgtgacccagatcgtgtctgccgaagcctggggcagagccgattgcggcatcaccagcgccagctaccaccagggcgtgctgagcgccaccatcctgtacgagatcctgctgggcaaggccaccctgtacgccgtgctggtgtctgccctggtgctgatggctatggtcaagcggaaggacagccggggaagggccaagcgatctggatctggagcaacaaacttctcactactcaaacaagcaggtgacgtggaggagaatcccgggcctactagtatggactggatttggcgcatccttttccttgtcggcgctgctaccggcgcgcattccttcgaagaagttcagctggttgaaagtggtggcggcctggttcaacctggcggatctctgagactgagctgtgccgccagcggcttcaatgtgtacgcctctggaatgcactgggtccgacaggcccctggcaaaggacttgagtgggtcgccaaaatctaccccgacagcgactacacctattacgccgacagcgtgaagggcagattcaccatcagcgccgacaccagcaagaacaccgcctacctccagatgaactccctgagagccgaggacaccgccgtgtactactgtagcagagacagcagcttctactacgtgtacgctatggactactggggccagggcacactggtcacagtctcttctacgcgtatccagaaccctgatcctgccgtgtaccagctgcgggatagcaagagcagcgacaagagcgtgtgtctgttcaccgacttcgacagccagaccaacgtgtcccagagcaaggactccgacgtgtacatcaccgataagtgcgtgctggacatgcggagcatggacttcaagagcaactccgccgtggcctggtccaacaagtccgatttcgcctgcgccaacgccttcaacaacagcattatccccgaggacacattcttcccaagcagcgacgtgccctgcgacgtgaagctggtggaaaagagcttcgagacagacaccaacctgaacttccagaacctgagcgtgatcggcttcagaatcctgctgctgaaagtggccggctttaacctgctgatgaccctgcggctgtggtccagc

SEQ ID NO: 39203 - DNA, 1869 bp, synthetic construct
  source 1..1869: mol_type = other DNA
atggccttaccagtgaccgccttgctcctgccgctggccttgctgctccacgccgccaggccggacatccagatgacacagagccctagcagcctgtctgccagcgtgggagacagagtgaccatcacctgtagagccagccaggacatcaacacagccgtggcttggtatcagcagaagcctggcaaggcccctaagctgctgatctacagcgcctacttcctgtacagcggcgtgcccagcagattcagcggaagcagaagcggcaccgacttcaccctgacaatatccagcctccagcctgaggacttcgccacctactactgccagcagtacagcagatacagccccgtgacctttggacagggcaccaaggtggaaatcaagagactcgaggacctgaagaacgtgttcccacctgaggtggccgtgttcgagcctagcgaggccgagatcagccacacccagaaagccaccctcgtgtgcctggctaccggcttctaccccgaccatgtggaactgtcttggtgggtcaacggcaaagaggtgcacagcggcgtgtgtaccgacccccagccactgaaagaacagcccgccctgaacgacagccggtactgcctgagcagcagactgagagtgtccgccaccttctggcagaacccccggaaccacttcagatgccaggtgcagttctacggcctgagcgagaacgacgagtggacccaggacagagccaagcccgtgacccagatcgtgtctgccgaagcctggggcagagccgattgcggctttaccagcgagagctaccagcagggcgtgctgagcgccaccatcctgtacgagatcctgctgggcaaggccaccctgtacgccgtgctggtgtctgccctggtgctgatggctatggtcaagcggaaggacagccggggaagggccaagcgatctggatctggagcaacaaacttctcactactcaaacaagcaggtgacgtggaggagaatcccgggcctactagtatggactggatttggcgcatccttttccttgtcggcgctgctaccggcgcgcattccttcgaagaagttcagctggttgaaagtggtggcggcctggttcaacctggcggatctctgagactgagctgtgccgccagcggcttcaatgtgtacgcctctggaatgcactgggtccgacaggcccctggcaaaggacttgagtgggtcgccaaaatctaccccgacagcgactacacctattacgccgacagcgtgaagggcagattcaccatcagcgccgacaccagcaagaacaccgcctacctccagatgaactccctgagagccgaggacaccgccgtgtactactgtagcagagacagcagcttctactacgtgtacgctatggactactggggccagggcacactggtcacagtctcttctacgcgtatccagaaccctgatcctgccgtgtaccagctgcgggatagcaagagcagcgacaagagcgtgtgtctgttcaccgacttcgacagccagaccaacgtgtcccagagcaaggactccgacgtgtacatcaccgataagtgcgtgctggacatgcggagcatggacttcaagagcaactccgccgtggcctggtccaacaagtccgatttcgcctgcgccaacgccttcaacaacagcattatccccgaggacacattcttcccaagccccgagagcagctgcgacgtgaagctggtggaaaagagcttcgagacagacaccaacctgaacttccagaacctgagcgtgatcggcttcagaatcctgctgctgaaagtggccggctttaacctgctgatgaccctgcggctgtggtccagc

SEQ ID NO: 39204 - DNA, 1881 bp, synthetic construct
  source 1..1881: mol_type = other DNA
atggccttaccagtgaccgccttgctcctgccgctggccttgctgctccacgccgccaggccggacatccagatgacacagagccctagcagcctgtctgccagcgtgggagacagagtgaccatcacctgtagagccagccaggacatcaacacagccgtggcttggtatcagcagaagcctggcaaggcccctaagctgctgatctacagcgcctacttcctgtacagcggcgtgcccagcagattcagcggaagcagaagcggcaccgacttcaccctgacaatatccagcctccagcctgaggacttcgccacctactactgccagcagtacagcagatacagccccgtgacctttggacagggcaccaaggtggaaatcaagagactcgagatccagaaccctgatcctgccgtgtaccagctgcgggatagcaagagcagcgacaagagcgtgtgtctgttcaccgacttcgacagccagaccaacgtgtcccagagcaaggactccgacgtgtacatcaccgataagtgcgtgctggacatgcggagcatggacttcaagagcaactccgccgtggcctggtccaacaagtccgatttcgcctgcgccaacgccttcaacaacagcattatccccgaggacacattcttcccaagccccgagagcagctgcgacgtgaagctggtggaaaagagcttcgagacagacaccaacctgaacttccagaacctgagcgtgatcggcttcagaatcctgctgctgaaagtggccggctttaacctgctgatgaccctgcggctgtggtccagccgcgccaagagaagcggatctggcgtgaagcagaccctgaatttcgacctgctgaagctggctggcgacgtggaatccaacccaggccctactagtatggactggatttggcgcatccttttccttgtcggcgctgctaccggcgcgcattccttcgaagaagttcagctggttgaaagtggtggcggcctggttcaacctggcggatctctgagactgagctgtgccgccagcggcttcaatgtgtacgcctctggaatgcactgggtccgacaggcccctggcaaaggacttgagtgggtcgccaaaatctaccccgacagcgactacacctattacgccgacagcgtgaagggcagattcaccatcagcgccgacaccagcaagaacaccgcctacctccagatgaactccctgagagccgaggacaccgccgtgtactactgtagcagagacagcagcttctactacgtgtacgctatggactactggggccagggcacactggtcacagtctcttctacgcgtgaggacctgaagaacgtgttcccacctgaggtggccgtgttcgagcctagcgaggccgagatcagccacacccagaaagccaccctcgtgtgcctggctaccggcttctaccccgaccatgtggaactgtcttggtgggtcaacggcaaagaggtgcacagcggcgtgtgtaccgacccccagccactgaaagaacagcccgccctgaacgacagccggtactgcctgagcagcagactgagagtgtccgccaccttctggcagaacccccggaaccacttcagatgccaggtgcagttctacggcctgagcgagaacgacgagtggacccaggacagagccaagcccgtgacccagatcgtgtctgccgaagcctggggcagagccgattgcggctttaccagcgagagctaccagcagggcgtgctgagcgccaccatcctgtacgagatcctgctgggcaaggccaccctgtacgccgtgctggtgtctgccctggtgctgatggctatggtcaagcggaaggacagccgggga

SEQ ID NO: 39205 - DNA, 1917 bp, synthetic construct
  source 1..1917: mol_type = other DNA
atggccttaccagtgaccgccttgctcctgccgctggccttgctgctccacgccgccaggccgctcgaggaggacctgaagaacgtgttcccacctgaggtggccgtgttcgagcctagcaaggccgagatcgcccacacccagaaagccaccctcgtgtgcctggctaccggcttctaccccgaccatgtggaactgtcttggtgggtcaacggcaaagaggtgcacagcggcgtgtgtaccgacccccagccactgaaagaacagcccgccctgaacgacagccggtactgcctgagcagcagactgagagtgtccgccaccttctggcagaacccccggaaccacttcagatgccaggtgcagttctacggcctgagcgagaacgacgagtggacccaggacagagccaagcccgtgacccagatcgtgtctgccgaagcctggggcagagccgattgcggcatcaccagcgccagctaccaccagggcgtgctgagcgccaccatcctgtacgagatcctgctgggcaaggccaccctgtacgccgtgctggtgtctgccctggtgctgatggctatggtcaagcggaaggacagccggggaagggccaagcgatctggatctggagcaacaaacttctcactactcaaacaagcaggtgacgtggaggagaatcccgggcctactagcatggccttaccagtgaccgccttgctcctgccgctggccttgctgctccacgccgccaggccggacatccagatgacacagagccctagcagcctgtctgccagcgtgggagacagagtgaccatcacctgtagagccagccaggacatcaacacagccgtggcttggtatcagcagaagcctggcaaggcccctaagctgctgatctacagcgcctacttcctgtacagcggcgtgcccagcagattcagcggaagcagaagcggcaccgacttcaccctgacaatatccagcctccagcctgaggacttcgccacctactactgccagcagtacagcagatacagccccgtgacctttggacagggcaccaaggtggaaatcaagagaggcggaggcggaagtggaggcggaggatctggcggcggaggctctgaagttcagctggttgaaagtggtggcggcctggttcaacctggcggatctctgagactgagctgtgccgccagcggcttcaatgtgtacgcctctggaatgcactgggtccgacaggcccctggcaaaggacttgagtgggtcgccaaaatctaccccgacagcgactacacctattacgccgacagcgtgaagggcagattcaccatcagcgccgacaccagcaagaacaccgcctacctccagatgaactccctgagagccgaggacaccgccgtgtactactgtagcagagacagcagcttctactacgtgtacgctatggactactggggccagggcacactggtcacagtctcttctacgcgtatccagaaccctgatcctgccgtgtaccagctgcgggatagcaagagcagcgacaagagcgtgtgtctgttcaccgacttcgacagccagaccaacgtgtcccagagcaaggactccgacgtgtacatcaccgataagtgcgtgctggacatgcggagcatggacttcaagagcaactccgccgtggcctggtccaacaagtccgatttcgcctgcgccaacgccttcaacaacagcattatccccgaggacacattcttcccaagcagcgacgtgccctgcgacgtgaagctggtggaaaagagcttcgagacagacaccaacctgaacttccagaacctgagcgtgatcggcttcagaatcctgctgctgaaagtggccggctttaacctgctgatgaccctgcggctgtggtccagc

SEQ ID NO: 39206 - DNA, 1938 bp, synthetic construct
  source 1..1938: mol_type = other DNA
atggccttaccagtgaccgccttgctcctgccgctggccttgctgctccacgccgccaggccgctcgagggctccggcgatcgccctgatcctgccgtgtaccagctgcgggatagcaagagcagcgacaagagcgtgtgtctgttcaccgacttcgacagccagaccaacgtgtcccagagcaaggactccgacgtgtacatcaccgataagtgcgtgctggacatgcggagcatggacttcaagagcaactccgccgtggcctggtccaacaagtccgatttcgcctgcgccaacgccttcaacaacagcattatccccgaggacacattcttcccaagccccgagagcagctgcgacgtgaagctggtggaaaagagcttcgagacagacaccaacctgaacttccagaacctgagcgtgatcggcttcagaatcctgctgctgaaagtggccggctttaacctgctgatgaccctgcggctgtggtccagctctagtcgcgccaagagaagcggatctggcgtgaagcagaccctgaatttcgacctgctgaagctggctggcgacgtggaatccaacccaggccccactagcatggccttaccagtgaccgccttgctcctgccgctggccttgctgctccacgccgccaggccggacatccagatgacacagagccctagcagcctgtctgccagcgtgggagacagagtgaccatcacctgtagagccagccaggacatcaacacagccgtggcttggtatcagcagaagcctggcaaggcccctaagctgctgatctacagcgcctacttcctgtacagcggcgtgcccagcagattcagcggaagcagaagcggcaccgacttcaccctgacaatatccagcctccagcctgaggacttcgccacctactactgccagcagtacagcagatacagccccgtgacctttggacagggcaccaaggtggaaatcaagagaggcggaggcggaagtggaggcggaggatctggcggcggaggctctgaagttcagctggttgaaagtggtggcggcctggttcaacctggcggatctctgagactgagctgtgccgccagcggcttcaatgtgtacgcctctggaatgcactgggtccgacaggcccctggcaaaggacttgagtgggtcgccaaaatctaccccgacagcgactacacctattacgccgacagcgtgaagggcagattcaccatcagcgccgacaccagcaagaacaccgcctacctccagatgaactccctgagagccgaggacaccgccgtgtactactgtagcagagacagcagcttctactacgtgtacgctatggactactggggccagggcacactggtcacagtctcttctacgcgtgaggacctgaagaacgtgttcccacctgaggtggccgtgttcgagcctagcgaggccgagatcagccacacccagaaagccaccctcgtgtgcctggctaccggcttctaccccgaccatgtggaactgtcttggtgggtcaacggcaaagaggtgcacagcggcgtgtgtaccgacccccagccactgaaagaacagcccgccctgaacgacagccggtactgcctgagcagcagactgagagtgtccgccaccttctggcagaacccccggaaccacttcagatgccaggtgcagttctacggcctgagcgagaacgacgagtggacccaggacagagccaagcccgtgacccagatcgtgtctgccgaagcctggggcagagccgattgcggctttaccagcgagagctaccagcagggcgtgctgagcgccaccatcctgtacgagatcctgctgggcaaggccaccctgtacgccgtgctggtgtctgccctggtgctgatggctatggtcaagcggaaggacagccgggga

SEQ ID NO: 39207 - DNA, 1869 bp, synthetic construct
  source 1..1869: mol_type = other DNA
atggccttaccagtgaccgccttgctcctgccgctggccttgctgctccacgccgccaggccggacatccagatgacacagagccctagcagcctgtctgccagcgtgggagacagagtgaccatcacctgtagagccagccaggacatcaacacagccgtggcttggtatcagcagaagcctggcaaggcccctaagctgctgatctacagcgcctacttcctgtacagcggcgtgcccagcagattcagcggaagcagaagcggcaccgacttcaccctgacaatatccagcctccagcctgaggacttcgccacctactactgccagcagtacagcagatacagccccgtgacctttggacagggcaccaaggtggaaatcaagagactcgaggacctgaagaacgtgttcccacctgaggtggccgtgttcgagcctagcgaggccgagatcagccacacccagaaagccaccctcgtgtgcctggctaccggcttctaccccgaccatgtggaactgtcttggtgggtcaacggcaaagaggtgcacagcggcgtgtctaccgacccccagccactgaaagaacagcccgccctgaacgacagccggtactgcctgagcagcagactgagagtgtccgccaccttctggcagaacccccggaaccacttcagatgccaggtgcagttctacggcctgagcgagaacgacgagtggacccaggacagagccaagcccgtgacccagatcgtgtctgccgaagcctggggcagagccgattgcggctttaccagcgagagctaccagcagggcgtgctgagcgccaccatcctgtacgagatcctgctgggcaaggccaccctgtacgccgtgctggtgtctgccctggtgctgatggctatggtcaagcggaaggacagccggggaagggccaagcgatctggatctggagcaacaaacttctcactactcaaacaagcaggtgacgtggaggagaatcccgggcctactagtatggactggatttggcgcatccttttccttgtcggcgctgctaccggcgcgcattccttcgaagaagttcagctggttgaaagtggtggcggcctggttcaacctggcggatctctgagactgagctgtgccgccagcggcttcaatgtgtacgcctctggaatgcactgggtccgacaggcccctggcaaaggacttgagtgggtcgccaaaatctaccccgacagcgactacacctattacgccgacagcgtgaagggcagattcaccatcagcgccgacaccagcaagaacaccgcctacctccagatgaactccctgagagccgaggacaccgccgtgtactactgtagcagagacagcagcttctactacgtgtacgctatggactactggggccagggcacactggtcacagtctcttctacgcgtatccagaaccctgatcctgccgtgtaccagctgcgggatagcaagagcagcgacaagagcgtgtgtctgttcaccgacttcgacagccagaccaacgtgtcccagagcaaggactccgacgtgtacatcaccgataagaccgtgctggacatgcggagcatggacttcaagagcaactccgccgtggcctggtccaacaagtccgatttcgcctgcgccaacgccttcaacaacagcattatccccgaggacacattcttcccaagccccgagagcagctgcgacgtgaagctggtggaaaagagcttcgagacagacaccaacctgaacttccagaacctgagcgtgatcggcttcagaatcctgctgctgaaagtggccggctttaacctgctgatgaccctgcggctgtggtccagc

SEQ ID NO: 39208 - DNA, 1893 bp, synthetic construct
  source 1..1893: mol_type = other DNA
atggccttaccagtgaccgccttgctcctgccgctggccttgctgctccacgccgccaggccggacatccagatgacacagagccctagcagcctgtctgccagcgtgggagacagagtgaccatcacctgtagagccagccaggacatcaacacagccgtggcttggtatcagcagaagcctggcaaggcccctaagctgctgatctacagcgcctacttcctgtacagcggcgtgcccagcagattcagcggaagcagaagcggcaccgacttcaccctgacaatatccagcctccagcctgaggacttcgccacctactactgccagcagtacagcagatacagccccgtgacctttggacagggcaccaaggtggaaatcaagagactcgaggacaagcagctggacgccgacgtgtcccccaagcctaccatcttcctgccctctatcgccgagacaaagctccagaaggccggcacctacctgtgcctgctggaaaagttcttcccagatgtgattaagatccactggcaggaaaagaagtccaacaccatcctgggcagccaggaaggcaacaccatgaagaccaacgacacctacatgaagttcagctggctgaccgtgcccgagaagtccctggacaaagaacacagatgcatcgtgcggcacgaaaacaacaagaacggcgtggaccaggaaatcatcttcccacccatcaagaccgatgtgattacaatggaccccaaggacaactgctccaaggacgccaacgataccctgctgctccagctgaccaacaccagcgcctactacatgtacttgttgctgctgctgaagtccgtggtgtacttcgccatcatcacatgctgcctgctgcggagaaccgccttctgctgcaacggcgagaagtctagggccaagcgatctggatctggagcaacaaacttctcactactcaaacaagcaggtgacgtggaggagaatcccgggcctactagtatggactggatttggcgcatccttttccttgtcggcgctgctaccggcgcgcattccttcgaagaagttcagctggttgaaagtggtggcggcctggttcaacctggcggatctctgagactgagctgtgccgccagcggcttcaatgtgtacgcctctggaatgcactgggtccgacaggcccctggcaaaggacttgagtgggtcgccaaaatctaccccgacagcgactacacctattacgccgacagcgtgaagggcagattcaccatcagcgccgacaccagcaagaacaccgcctacctccagatgaactccctgagagccgaggacaccgccgtgtactactgtagcagagacagcagcttctactacgtgtacgctatggactactggggccagggcacactggtcacagtctcttctacgcgtagccagcctcacaccaagcccagcgtgttcgtgatgaagaacggcaccaacgtggcctgcctcgtgaaagagttctaccccaaggacatcaggatcaacctggtgtccagcaagaagatcaccgagttcgaccccgccatcgtgatctcccccagcggcaagtacaacgccgtgaagctggggaagtacgaggacagcaacagcgtgacctgctccgtgcagcacgacaacaagaccgtgcacagcaccgactttgaagtgaaaaccgactccaccgaccacgtgaagcccaaagagacagagaacaccaagcagcccagcaagagctgccacaagcccaaggccatcgtgcacaccgagaaagtgaacatgatgagcctgaccgtgctgggcctgcggatgctgttcgccaaaaccgtggccgtgaacttcctgctgaccgccaagctgttcttcctc

SEQ ID NO: 39209 - DNA, 1893 bp, synthetic construct
  source 1..1893: mol_type = other DNA
atggccttaccagtgaccgccttgctcctgccgctggccttgctgctccacgccgccaggccggacatccagatgacacagagccctagcagcctgtctgccagcgtgggagacagagtgaccatcacctgtagagccagccaggacatcaacacagccgtggcttggtatcagcagaagcctggcaaggcccctaagctgctgatctacagcgcctacttcctgtacagcggcgtgcccagcagattcagcggaagcagaagcggcaccgacttcaccctgacaatatccagcctccagcctgaggacttcgccacctactactgccagcagtacagcagatacagccccgtgacctttggacagggcaccaaggtggaaatcaagagactcgagagccagcctcacaccaagcccagcgtgttcgtgatgaagaacggcaccaacgtggcctgcctcgtgaaagagttctaccccaaggacatcaggatcaacctggtgtccagcaagaagatcaccgagttcgaccccgccatcgtgatctcccccagcggcaagtacaacgccgtgaagctggggaagtacgaggacagcaacagcgtgacctgctccgtgcagcacgacaacaagaccgtgcacagcaccgactttgaagtgaaaaccgactccaccgaccacgtgaagcccaaagagacagagaacaccaagcagcccagcaagagctgccacaagcccaaggccatcgtgcacaccgagaaagtgaacatgatgagcctgaccgtgctgggcctgcggatgctgttcgccaaaaccgtggccgtgaacttcctgctgaccgccaagctgttcttcctcagggccaagcgatctggatctggagcaacaaacttctcactactcaaacaagcaggtgacgtggaggagaatcccgggcctactagtatggactggatttggcgcatccttttccttgtcggcgctgctaccggcgcgcattccttcgaagaagttcagctggttgaaagtggtggcggcctggttcaacctggcggatctctgagactgagctgtgccgccagcggcttcaatgtgtacgcctctggaatgcactgggtccgacaggcccctggcaaaggacttgagtgggtcgccaaaatctaccccgacagcgactacacctattacgccgacagcgtgaagggcagattcaccatcagcgccgacaccagcaagaacaccgcctacctccagatgaactccctgagagccgaggacaccgccgtgtactactgtagcagagacagcagcttctactacgtgtacgctatggactactggggccagggcacactggtcacagtctcttctacgcgtgacaagcagctggacgccgacgtgtcccccaagcctaccatcttcctgccctctatcgccgagacaaagctccagaaggccggcacctacctgtgcctgctggaaaagttcttcccagatgtgattaagatccactggcaggaaaagaagtccaacaccatcctgggcagccaggaaggcaacaccatgaagaccaacgacacctacatgaagttcagctggctgaccgtgcccgagaagtccctggacaaagaacacagatgcatcgtgcggcacgaaaacaacaagaacggcgtggaccaggaaatcatcttcccacccatcaagaccgatgtgattacaatggaccccaaggacaactgctccaaggacgccaacgataccctgctgctccagctgaccaacaccagcgcctactacatgtacttgttgctgctgctgaagtccgtggtgtacttcgccatcatcacatgctgcctgctgcggagaaccgccttctgctgcaacggcgagaagtct

SEQ ID NO: 39210 - DNA, 1938 bp, synthetic construct
  source 1..1938: mol_type = other DNA
atggccttaccagtgaccgccttgctcctgccgctggccttgctgctccacgccgccaggccgctcgaggacaagcagctggacgccgacgtgtcccccaagcctaccatcttcctgccctctatcgccgagacaaagctccagaaggccggcacctacctgtgcctgctggaaaagttcttcccagatgtgattaagatccactggcaggaaaagaagtccaacaccatcctgggcagccaggaaggcaacaccatgaagaccaacgacacctacatgaagttcagctggctgaccgtgcccgagaagtccctggacaaagaacacagatgcatcgtgcggcacgaaaacaacaagaacggcgtggaccaggaaatcatcttcccacccatcaagaccgatgtgattacaatggaccccaaggacaactgctccaaggacgccaacgataccctgctgctccagctgaccaacaccagcgcctactacatgtacttgttgctgctgctgaagtccgtggtgtacttcgccatcatcacatgctgcctgctgcggagaaccgccttctgctgcaacggcgagaagtctagggccaagcgatctggatctggagcaacaaacttctcactactcaaacaagcaggtgacgtggaggagaatcccgggcctactagcatggccttaccagtgaccgccttgctcctgccgctggccttgctgctccacgccgccaggccggacatccagatgacacagagccctagcagcctgtctgccagcgtgggagacagagtgaccatcacctgtagagccagccaggacatcaacacagccgtggcttggtatcagcagaagcctggcaaggcccctaagctgctgatctacagcgcctacttcctgtacagcggcgtgcccagcagattcagcggaagcagaagcggcaccgacttcaccctgacaatatccagcctccagcctgaggacttcgccacctactactgccagcagtacagcagatacagccccgtgacctttggacagggcaccaaggtggaaatcaagagaggcggaggcggaagtggaggcggaggatctggcggcggaggctctgaagttcagctggttgaaagtggtggcggcctggttcaacctggcggatctctgagactgagctgtgccgccagcggcttcaatgtgtacgcctctggaatgcactgggtccgacaggcccctggcaaaggacttgagtgggtcgccaaaatctaccccgacagcgactacacctattacgccgacagcgtgaagggcagattcaccatcagcgccgacaccagcaagaacaccgcctacctccagatgaactccctgagagccgaggacaccgccgtgtactactgtagcagagacagcagcttctactacgtgtacgctatggactactggggccagggcacactggtcacagtctcttctacgcgtagccagcctcacaccaagcccagcgtgttcgtgatgaagaacggcaccaacgtggcctgcctcgtgaaagagttctaccccaaggacatcaggatcaacctggtgtccagcaagaagatcaccgagttcgaccccgccatcgtgatctcccccagcggcaagtacaacgccgtgaagctggggaagtacgaggacagcaacagcgtgacctgctccgtgcagcacgacaacaagaccgtgcacagcaccgactttgaagtgaaaaccgactccaccgaccacgtgaagcccaaagagacagagaacaccaagcagcccagcaagagctgccacaagcccaaggccatcgtgcacaccgagaaagtgaacatgatgagcctgaccgtgctgggcctgcggatgctgttcgccaaaaccgtggccgtgaacttcctgctgaccgccaagctgttcttcctc

SEQ ID NO: 39211 - DNA, 2400 bp, synthetic construct
  source 1..2400: mol_type = other DNA
atggccttaccagtgaccgccttgctcctgccgctggccttgctgctccacgccgccaggccggacatccagatgacacagagccctagcagcctgtctgccagcgtgggagacagagtgaccatcacctgtagagccagccaggacatcaacacagccgtggcttggtatcagcagaagcctggcaaggcccctaagctgctgatctacagcgcctacttcctgtacagcggcgtgcccagcagattcagcggaagcagaagcggcaccgacttcaccctgacaatatccagcctccagcctgaggacttcgccacctactactgccagcagtacagcagatacagccccgtgacctttggacagggcaccaaggtggaaatcaagagaggacagcctaaggccaatcctaccgtgacactgttccctccaagcagcgaagaactccaggccaacaaggccacacttgtgtgcctgatctccgacttctaccctggggctgtgacagtggcttggaaggccgatggatctcctgtgaaagccggcgtggaaaccaccaagccatccaagcagagcaacaacaaatacgccgccagctcctacctgagcctgacacctgagcagtggaagtcccacagatcctacagctgccaagtgacccacgaaggcagcaccgtggaaaagacagtggcccctacagagtgcagcggatcccagagcttcggcctgctggaccccaagctgtgctacctgctggatggcatcctgttcatctacggcgtgatcctgaccgccctgttcctgagagtgaagttcagcagaagcgccgacgcccctgcctaccagcagggacagaaccaactgtacaacgagctgaacctgggcagacgggaagagtacgacgtgctggacaagcggagaggcagggaccctgagatgggcggaaagccccagcggagaaagaacccccaggaaggactgtataacgaactccagaaagacaagatggccgaagcctacagcgagatcggcatgaagggcgagcggagaagaggcaagggccacgatggcctgtaccagggcctgagcaccgccaccaaggacacctatgacgccctgcacatgcaggccctgcctccaagaagggccaagcgatctggatctggagcaacaaacttctcactactcaaacaagcaggtgacgtggaggagaatcccgggcctactagtatggactggatttggcgcatccttttccttgtcggcgctgctaccggcgcgcattccttcgaagaagttcagctggttgaaagtggtggcggcctggttcaacctggcggatctctgagactgagctgtgccgccagcggcttcaatgtgtacgcctctggaatgcactgggtccgacaggcccctggcaaaggacttgagtgggtcgccaaaatctaccccgacagcgactacacctattacgccgacagcgtgaagggcagattcaccatcagcgccgacaccagcaagaacaccgcctacctccagatgaactccctgagagccgaggacaccgccgtgtactactgtagcagagacagcagcttctactacgtgtacgctatggactactggggccagggcacactggtcacagtctcttctgcctctacaaagggaccctccgtgtttcctctggctcccagcagcaagtctacaagcggaggaacagccgctctgggctgcctggtcaaggattactttcccgagcctgtgaccgtgtcctggaatagcggagcactgacaagcggcgtgcacacctttccagccgtgctgcaaagcagcggcctgtactctctgagcagcgtggtcacagtgcctagctctagcctgggcacccagacctacatctgcaatgtgaaccacaagcctagcaacaccaaggtggacaagagagtggaacccaagagctgtggtacccagagttttgggttgttggaccctaaattgtgctatctgttggacggaatcctgttcatttacggagtgatcctgaccgcattgttcctgcgggttaagttttccagatccgcagacgcacccgcttaccaacaagggcagaaccaactctacaatgaacttaatttggggcggagggaagagtacgacgttctggacaaaaggaggggacgagatcccgagatgggcggaaagcctcagcgaaggaagaatccgcaagaggggctttataacgaactccagaaagataaaatggcagaagcctatagtgagattgggatgaagggagaaaggaggaggggtaaaggtcacgatgggttgtaccaaggattgagcacagccactaaagatacctatgatgcgctccacatgcaggccctgccgccaaga

SEQ ID NO: 39212 - DNA, 2457 bp, synthetic construct
  source 1..2457: mol_type = other DNA
atggccttaccagtgaccgccttgctcctgccgctggccttgctgctccacgccgccaggccggacatccagatgacacagagccctagcagcctgtctgccagcgtgggagacagagtgaccatcacctgtagagccagccaggacatcaacacagccgtggcttggtatcagcagaagcctggcaaggcccctaagctgctgatctacagcgcctacttcctgtacagcggcgtgcccagcagattcagcggaagcagaagcggcaccgacttcaccctgacaatatccagcctccagcctgaggacttcgccacctactactgccagcagtacagcagatacagccccgtgacctttggacagggcaccaaggtggaaatcaagagactcgaggacctgaagaacgtgttcccacctgaggtggccgtgttcgagcctagcgaggccgagatcagccacacccagaaagccaccctcgtgtgcctggctaccggcttctaccccgaccatgtggaactgtcttggtgggtcaacggcaaagaggtgcacagcggcgtgtctaccgacccccagccactgaaagaacagcccgccctgaacgacagccggtactgcctgagcagcagactgagagtgtccgccaccttctggcagaacccccggaaccacttcagatgccaggtgcagttctacggcctgagcgagaacgacgagtggacccaggacagagccaagcccgtgacccagatcgtgtctgccgaagcctggggcagagccgattgcggatcccagagcttcggcctgctggaccccaagctgtgctacctgctggatggcatcctgttcatctacggcgtgatcctgaccgccctgttcctgagagtgaagttcagcagaagcgccgacgcccctgcctaccagcagggacagaaccaactgtacaacgagctgaacctgggcagacgggaagagtacgacgtgctggacaagcggagaggcagggaccctgagatgggcggaaagccccagcggagaaagaacccccaggaaggactgtataacgaactccagaaagacaagatggccgaagcctacagcgagatcggcatgaagggcgagcggagaagaggcaagggccacgatggcctgtaccagggcctgagcaccgccaccaaggacacctatgacgccctgcacatgcaggccctgcctccaagaagggccaagcgatctggatctggagcaacaaacttctcactactcaaacaagcaggtgacgtggaggagaatcccgggcctactagtatggactggatttggcgcatccttttccttgtcggcgctgctaccggcgcgcattccttcgaagaagttcagctggttgaaagtggtggcggcctggttcaacctggcggatctctgagactgagctgtgccgccagcggcttcaatgtgtacgcctctggaatgcactgggtccgacaggcccctggcaaaggacttgagtgggtcgccaaaatctaccccgacagcgactacacctattacgccgacagcgtgaagggcagattcaccatcagcgccgacaccagcaagaacaccgcctacctccagatgaactccctgagagccgaggacaccgccgtgtactactgtagcagagacagcagcttctactacgtgtacgctatggactactggggccagggcacactggtcacagtctcttctacgcgtatccagaaccctgatcctgccgtgtaccagctgcgggatagcaagagcagcgacaagagcgtgtgtctgttcaccgacttcgacagccagaccaacgtgtcccagagcaaggactccgacgtgtacatcaccgataagaccgtgctggacatgcggagcatggacttcaagagcaactccgccgtggcctggtccaacaagtccgatttcgcctgcgccaacgccttcaacaacagcattatccccgaggacacattcttcccaagccccgagagcagctgcggtacccagagttttgggttgttggaccctaaattgtgctatctgttggacggaatcctgttcatttacggagtgatcctgaccgcattgttcctgcgggttaagttttccagatccgcagacgcacccgcttaccaacaagggcagaaccaactctacaatgaacttaatttggggcggagggaagagtacgacgttctggacaaaaggaggggacgagatcccgagatgggcggaaagcctcagcgaaggaagaatccgcaagaggggctttataacgaactccagaaagataaaatggcagaagcctatagtgagattgggatgaagggagaaaggaggaggggtaaaggtcacgatgggttgtaccaaggattgagcacagccactaaagatacctatgatgcgctccacatgcaggccctgccgccaaga

SEQ ID NO: 39213 - DNA, 2583 bp, synthetic construct
  source 1..2583: mol_type = other DNA
atggccttaccagtgaccgccttgctcctgccgctggccttgctgctccacgccgccaggccggacatccagatgacacagagccctagcagcctgtctgccagcgtgggagacagagtgaccatcacctgtagagccagccaggacatcaacacagccgtggcttggtatcagcagaagcctggcaaggcccctaagctgctgatctacagcgcctacttcctgtacagcggcgtgcccagcagattcagcggaagcagaagcggcaccgacttcaccctgacaatatccagcctccagcctgaggacttcgccacctactactgccagcagtacagcagatacagccccgtgacctttggacagggcaccaaggtggaaatcaagagactcgaggaggacctgaagaacgtgttcccacctgaggtggccgtgttcgagcctagcgaggccgagatcagccacacccagaaagccaccctcgtgtgcctggctaccggcttctaccccgaccatgtggaactgtcttggtgggtcaacggcaaagaggtgcacagcggcgtgtctaccgacccccagccactgaaagaacagcccgccctgaacgacagccggtactgcctgagcagcagactgagagtgtccgccaccttctggcagaacccccggaaccacttcagatgccaggtgcagttctacggcctgagcgagaacgacgagtggacccaggacagagccaagcccgtgacccagatcgtgtctgccgaagcctggggcagagccgattgcggatcccagagcttcggcctgctggaccccaagctgtgctacctgctggatggcatcctgttcatctacggcgtgatcctgaccgccctgttcctgagagtgaagttcagcagaagcgccgacgcccctgcctaccagcagggacagaaccaactgtacaacgagctgaacctgggcagacgggaagagtacgacgtgctggacaagcggagaggcagggaccctgagatgggcggaaagccccagcggagaaagaacccccaggaaggactgtataacgaactccagaaagacaagatggccgaagcctacagcgagatcggcatgaagggcgagcggagaagaggcaagggccacgatggcctgtaccagggcctgagcaccgccaccaaggacacctatgacgccctgcacatgcaggccctgcctccaagaagggccaagcgatctggatctggagcaacaaacttctcactactcaaacaagcaggtgacgtggaggagaatcccgggcctactagtatggactggatttggcgcatccttttccttgtcggcgctgctaccggcgcgcattccttcgaagaagttcagctggttgaaagtggtggcggcctggttcaacctggcggatctctgagactgagctgtgccgccagcggcttcaatgtgtacgcctctggaatgcactgggtccgacaggcccctggcaaaggacttgagtgggtcgccaaaatctaccccgacagcgactacacctattacgccgacagcgtgaagggcagattcaccatcagcgccgacaccagcaagaacaccgcctacctccagatgaactccctgagagccgaggacaccgccgtgtactactgtagcagagacagcagcttctactacgtgtacgctatggactactggggccagggcacactggtcacagtctcttctacgcgtatccagaaccctgatcctgccgtgtaccagctgcgggatagcaagagcagcgacaagagcgtgtgtctgttcaccgacttcgacagccagaccaacgtgtcccagagcaaggactccgacgtgtacatcaccgataagaccgtgctggacatgcggagcatggacttcaagagcaactccgccgtggcctggtccaacaagtccgatttcgcctgcgccaacgccttcaacaacagcattatccccgaggacacattcttcccaagccccgagagcagctgcggtacccagagttttgggttgttggaccctaaattgtgctatctgttggacggaatcctgttcatttacggagtgatcctgaccgcattgttcctgaggagcaagcggtcacggctgctccacagcgattacatgaatatgacaccacgaagaccgggtcctactcgcaaacactaccaaccctacgcacctccccgcgactttgcagcgtaccgatctcgggttaagttttccagatccgcagacgcacccgcttaccaacaagggcagaaccaactctacaatgaacttaatttggggcggagggaagagtacgacgttctggacaaaaggaggggacgagatcccgagatgggcggaaagcctcagcgaaggaagaatccgcaagaggggctttataacgaactccagaaagataaaatggcagaagcctatagtgagattgggatgaagggagaaaggaggaggggtaaaggtcacgatgggttgtaccaaggattgagcacagccactaaagatacctatgatgcgctccacatgcaggccctgccgccaaga

SEQ ID NO: 39214 - DNA, 2712 bp, synthetic construct
  source 1..2712: mol_type = other DNA
atggccttaccagtgaccgccttgctcctgccgctggccttgctgctccacgccgccaggccggacatccagatgacacagagccctagcagcctgtctgccagcgtgggagacagagtgaccatcacctgtagagccagccaggacatcaacacagccgtggcttggtatcagcagaagcctggcaaggcccctaagctgctgatctacagcgcctacttcctgtacagcggcgtgcccagcagattcagcggaagcagaagcggcaccgacttcaccctgacaatatccagcctccagcctgaggacttcgccacctactactgccagcagtacagcagatacagccccgtgacctttggacagggcaccaaggtggaaatcaagagactcgaggaggacctgaagaacgtgttcccacctgaggtggccgtgttcgagcctagcgaggccgagatcagccacacccagaaagccaccctcgtgtgcctggctaccggcttctaccccgaccatgtggaactgtcttggtgggtcaacggcaaagaggtgcacagcggcgtgtctaccgacccccagccactgaaagaacagcccgccctgaacgacagccggtactgcctgagcagcagactgagagtgtccgccaccttctggcagaacccccggaaccacttcagatgccaggtgcagttctacggcctgagcgagaacgacgagtggacccaggacagagccaagcccgtgacccagatcgtgtctgccgaagcctggggcagagccgattgcggatcccagagcttcggcctgctggaccccaagctgtgctacctgctggatggcatcctgttcatctacggcgtgatcctgaccgccctgttcctgaaacggggcagaaagaaactcctgtatatattcaaacaaccatttatgagaccagtacaaactactcaagaggaagatggctgtagctgccgatttccagaagaagaagaaggaggatgtgaactgagagtgaagttcagcagaagcgccgacgcccctgcctaccagcagggacagaaccaactgtacaacgagctgaacctgggcagacgggaagagtacgacgtgctggacaagcggagaggcagggaccctgagatgggcggaaagccccagcggagaaagaacccccaggaaggactgtataacgaactccagaaagacaagatggccgaagcctacagcgagatcggcatgaagggcgagcggagaagaggcaagggccacgatggcctgtaccagggcctgagcaccgccaccaaggacacctatgacgccctgcacatgcaggccctgcctccaagaagggccaagcgatctggatctggagcaacaaacttctcactactcaaacaagcaggtgacgtggaggagaatcccgggcctactagtatggactggatttggcgcatccttttccttgtcggcgctgctaccggcgcgcattccttcgaagaagttcagctggttgaaagtggtggcggcctggttcaacctggcggatctctgagactgagctgtgccgccagcggcttcaatgtgtacgcctctggaatgcactgggtccgacaggcccctggcaaaggacttgagtgggtcgccaaaatctaccccgacagcgactacacctattacgccgacagcgtgaagggcagattcaccatcagcgccgacaccagcaagaacaccgcctacctccagatgaactccctgagagccgaggacaccgccgtgtactactgtagcagagacagcagcttctactacgtgtacgctatggactactggggccagggcacactggtcacagtctcttctacgcgtatccagaaccctgatcctgccgtgtaccagctgcgggatagcaagagcagcgacaagagcgtgtgtctgttcaccgacttcgacagccagaccaacgtgtcccagagcaaggactccgacgtgtacatcaccgataagaccgtgctggacatgcggagcatggacttcaagagcaactccgccgtggcctggtccaacaagtccgatttcgcctgcgccaacgccttcaacaacagcattatccccgaggacacattcttcccaagccccgagagcagctgcggtacccagagttttgggttgttggaccctaaattgtgctatctgttggacggaatcctgttcatttacggagtgatcctgaccgcattgttcctgaagagaggccggaagaagctgctgtacatcttcaagcagcctttcatgcggcccgtgcagaccacccaggaagaggacggctgctcctgccggttccccgaggaagaagaaggcggctgcgagctgcgggttaagttttccagatccgcagacgcacccgcttaccaacaagggcagaaccaactctacaatgaacttaatttggggcggagggaagagtacgacgttctggacaaaaggaggggacgagatcccgagatgggcggaaagcctcagcgaaggaagaatccgcaagaggggctttataacgaactccagaaagataaaatggcagaagcctatagtgagattgggatgaagggagaaaggaggaggggtaaaggtcacgatgggttgtaccaaggattgagcacagccactaaagatacctatgatgcgctccacatgcaggccctgccgccaaga

SEQ ID NO: 39215 - DNA, 1773 bp, synthetic construct
  source 1..1773: mol_type = other DNA
atggccttaccagtgaccgccttgctcctgccgctggccttgctgctccacgccgccaggccggacatccagatgacacagagccctagcagcctgtctgccagcgtgggagacagagtgaccatcacctgtagagccagccaggacatcaacacagccgtggcttggtatcagcagaagcctggcaaggcccctaagctgctgatctacagcgcctacttcctgtacagcggcgtgcccagcagattcagcggaagcagaagcggcaccgacttcaccctgacaatatccagcctccagcctgaggacttcgccacctactactgccagcagtacagcagatacagccccgtgacctttggacagggcaccaaggtggaaatcaagagactcgagcagagcttcggcctgctggaccccaagctgtgctacctgctggatggcatcctgttcatctacggcgtgatcctgaccgccctgttcctgagagtgaagttcagcagaagcgccgacgcccctgcctaccagcagggacagaaccaactgtacaacgagctgaacctgggcagacgggaagagtacgacgtgctggacaagcggagaggcagggaccctgagatgggcggaaagccccagcggagaaagaacccccaggaaggactgtataacgaactccagaaagacaagatggccgaagcctacagcgagatcggcatgaagggcgagcggagaagaggcaagggccacgatggcctgtaccagggcctgagcaccgccaccaaggacacctatgacgccctgcacatgcaggccctgcctccaagaagggccaagcgatctggatctggagcaacaaacttctcactactcaaacaagcaggtgacgtggaggagaatcccgggcctactagtatggactggatttggcgcatccttttccttgtcggcgctgctaccggcgcgcattccttcgaagaagttcagctggttgaaagtggtggcggcctggttcaacctggcggatctctgagactgagctgtgccgccagcggcttcaatgtgtacgcctctggaatgcactgggtccgacaggcccctggcaaaggacttgagtgggtcgccaaaatctaccccgacagcgactacacctattacgccgacagcgtgaagggcagattcaccatcagcgccgacaccagcaagaacaccgcctacctccagatgaactccctgagagccgaggacaccgccgtgtactactgtagcagagacagcagcttctactacgtgtacgctatggactactggggccagggcacactggtcacagtctcttctacgcgtcagagttttgggttgttggaccctaaattgtgctatctgttggacggaatcctgttcatttacggagtgatcctgaccgcattgttcctgcgggttaagttttccagatccgcagacgcacccgcttaccaacaagggcagaaccaactctacaatgaacttaatttggggcggagggaagagtacgacgttctggacaaaaggaggggacgagatcccgagatgggcggaaagcctcagcgaaggaagaatccgcaagaggggctttataacgaactccagaaagataaaatggcagaagcctatagtgagattgggatgaagggagaaaggaggaggggtaaaggtcacgatgggttgtaccaaggattgagcacagccactaaagatacctatgatgcgctccacatgcaggccctgccgccaaga

SEQ ID NO: 39216 - DNA, 1947 bp, synthetic construct
  source 1..1947: mol_type = other DNA
atggccttaccagtgaccgccttgctcctgccgctggccttgctgctccacgccgccaggccggacatccagatgacacagagccctagcagcctgtctgccagcgtgggagacagagtgaccatcacctgtagagccagccaggacatcaacacagccgtggcttggtatcagcagaagcctggcaaggcccctaagctgctgatctacagcgcctacttcctgtacagcggcgtgcccagcagattcagcggaagcagaagcggcaccgacttcaccctgacaatatccagcctccagcctgaggacttcgccacctactactgccagcagtacagcagatacagccccgtgacctttggacagggcaccaaggtggaaatcaagagactcgagggacagcctaaggccaatcctaccgtgacactgttccctccaagcagcgaagaactccaggccaacaaggccacacttgtgtgcctgatctccgacttctaccctggggctgtgacagtggcttggaaggccgatggatctcctgtgaaagccggcgtggaaaccaccaagccatccaagcagagcaacaacaaatacgccgccagctcctacctgagcctgacacctgagcagtggaagtcccacagatcctacagctgccaagtgacccacgaaggcagcaccgtggaaaagacagtggcccctacagagtgcagccccatcaagaccgatgtgattacaatggaccccaaggacaactgctccaaggacgccaacgataccctgctgctccagctgaccaacaccagcgcctactacatgtacttgttgctgctgctgaagtccgtggtgtacttcgccatcatcacatgctgcctgctgcggagaaccgccttctgctgcaacggcgagaagtctagggccaagcgatctggatctggagcaacaaacttctcactactcaaacaagcaggtgacgtggaggagaatcccgggcctactagtatggactggatttggcgcatccttttccttgtcggcgctgctaccggcgcgcattccttcgaagaagttcagctggttgaaagtggtggcggcctggttcaacctggcggatctctgagactgagctgtgccgccagcggcttcaatgtgtacgcctctggaatgcactgggtccgacaggcccctggcaaaggacttgagtgggtcgccaaaatctaccccgacagcgactacacctattacgccgacagcgtgaagggcagattcaccatcagcgccgacaccagcaagaacaccgcctacctccagatgaactccctgagagccgaggacaccgccgtgtactactgtagcagagacagcagcttctactacgtgtacgctatggactactggggccagggcacactggtcacagtctcttctacgcgtgcctctacaaagggaccctccgtgtttcctctggctcccagcagcaagtctacaagcggaggaacagccgctctgggctgcctggtcaaggattactttcccgagcctgtgaccgtgtcctggaatagcggagcactgacaagcggcgtgcacacctttccagccgtgctgcaaagcagcggcctgtactctctgagcagcgtggtcacagtgcctagctctagcctgggcacccagacctacatctgcaatgtgaaccacaagcctagcaacaccaaggtggacaagagagtggaacccaagagctgtgaagtgaaaaccgactccaccgaccacgtgaagcccaaagagacagagaacaccaagcagcccagcaagagctgccacaagcccaaggccatcgtgcacaccgagaaagtgaacatgatgagcctgaccgtgctgggcctgcggatgctgttcgccaaaaccgtggccgtgaacttcctgctgaccgccaagctgttcttcctc

SEQ ID NO: 39217 - DNA, 1881 bp, synthetic construct
  source 1..1881: mol_type = other DNA
atggccttaccagtgaccgccttgctcctgccgctggccttgctgctccacgccgccaggccggacatccagatgacacagagccctagcagcctgtctgccagcgtgggagacagagtgaccatcacctgtagagccagccaggacatcaacacagccgtggcttggtatcagcagaagcctggcaaggcccctaagctgctgatctacagcgcctacttcctgtacagcggcgtgcccagcagattcagcggaagcagaagcggcaccgacttcaccctgacaatatccagcctccagcctgaggacttcgccacctactactgccagcagtacagcagatacagccccgtgacctttggacagggcaccaaggtggaaatcaagagactcgagggacagcctaaggccaatcctaccgtgacactgttccctccaagcagcgaagaactccaggccaacaaggccacacttgtgtgcctgatctccgacttctaccctggggctgtgacagtggcttggaaggccgatggatctcctgtgaaagccggcgtggaaaccaccaagccatccaagcagagcaacaacaaatacgccgccagctcctacctgagcctgacacctgagcagtggaagtcccacagatcctacagctgccaagtgacccacgaaggcagcaccgtggaaaagacagtggcccctacagagtgcagcggcagagccgattgcggcatcaccagcgccagctaccaccagggcgtgctgagcgccaccatcctgtacgagatcctgctgggcaaggccaccctgtacgccgtgctggtgtctgccctggtgctgatggctatggtcaagcggaaggacagccggggaagggccaagcgatctggatctggagcaacaaacttctcactactcaaacaagcaggtgacgtggaggagaatcccgggcctactagtatggactggatttggcgcatccttttccttgtcggcgctgctaccggcgcgcattccttcgaagaagttcagctggttgaaagtggtggcggcctggttcaacctggcggatctctgagactgagctgtgccgccagcggcttcaatgtgtacgcctctggaatgcactgggtccgacaggcccctggcaaaggacttgagtgggtcgccaaaatctaccccgacagcgactacacctattacgccgacagcgtgaagggcagattcaccatcagcgccgacaccagcaagaacaccgcctacctccagatgaactccctgagagccgaggacaccgccgtgtactactgtagcagagacagcagcttctactacgtgtacgctatggactactggggccagggcacactggtcacagtctcttctacgcgtgcctctacaaagggaccctccgtgtttcctctggctcccagcagcaagtctacaagcggaggaacagccgctctgggctgcctggtcaaggattactttcccgagcctgtgaccgtgtcctggaatagcggagcactgacaagcggcgtgcacacctttccagccgtgctgcaaagcagcggcctgtactctctgagcagcgtggtcacagtgcctagctctagcctgggcacccagacctacatctgcaatgtgaaccacaagcctagcaacaccaaggtggacaagagagtggaacccaagagctgtatccccgaggacacattcttcccaagcagcgacgtgccctgcgacgtgaagctggtggaaaagagcttcgagacagacaccaacctgaacttccagaacctgagcgtgatcggcttcagaatcctgctgctgaaagtggccggctttaacctgctgatgaccctgcggctgtggtccagc

SEQ ID NO: 39218 - DNA, 1881 bp, synthetic construct
  source 1..1881: mol_type = other DNA
atggccttaccagtgaccgccttgctcctgccgctggccttgctgctccacgccgccaggccggacatccagatgacacagagccctagcagcctgtctgccagcgtgggagacagagtgaccatcacctgtagagccagccaggacatcaacacagccgtggcttggtatcagcagaagcctggcaaggcccctaagctgctgatctacagcgcctacttcctgtacagcggcgtgcccagcagattcagcggaagcagaagcggcaccgacttcaccctgacaatatccagcctccagcctgaggacttcgccacctactactgccagcagtacagcagatacagccccgtgacctttggacagggcaccaaggtggaaatcaagagactcgagggacagcctaaggccaatcctaccgtgacactgttccctccaagcagcgaagaactccaggccaacaaggccacacttgtgtgcctgatctccgacttctaccctggggctgtgacagtggcttggaaggccgatggatctcctgtgaaagccggcgtggaaaccaccaagccatccaagcagagcaacaacaaatacgccgccagctcctacctgagcctgacacctgagcagtggaagtcccacagatcctacagctgccaagtgacccacgaaggcagcaccgtggaaaagacagtggcccctacagagtgcagcggcagagccgattgcggctttaccagcgagagctaccagcagggcgtgctgagcgccaccatcctgtacgagatcctgctgggcaaggccaccctgtacgccgtgctggtgtctgccctggtgctgatggctatggtcaagcggaaggacagccggggaagggccaagcgatctggatctggagcaacaaacttctcactactcaaacaagcaggtgacgtggaggagaatcccgggcctactagtatggactggatttggcgcatccttttccttgtcggcgctgctaccggcgcgcattccttcgaagaagttcagctggttgaaagtggtggcggcctggttcaacctggcggatctctgagactgagctgtgccgccagcggcttcaatgtgtacgcctctggaatgcactgggtccgacaggcccctggcaaaggacttgagtgggtcgccaaaatctaccccgacagcgactacacctattacgccgacagcgtgaagggcagattcaccatcagcgccgacaccagcaagaacaccgcctacctccagatgaactccctgagagccgaggacaccgccgtgtactactgtagcagagacagcagcttctactacgtgtacgctatggactactggggccagggcacactggtcacagtctcttctacgcgtgcctctacaaagggaccctccgtgtttcctctggctcccagcagcaagtctacaagcggaggaacagccgctctgggctgcctggtcaaggattactttcccgagcctgtgaccgtgtcctggaatagcggagcactgacaagcggcgtgcacacctttccagccgtgctgcaaagcagcggcctgtactctctgagcagcgtggtcacagtgcctagctctagcctgggcacccagacctacatctgcaatgtgaaccacaagcctagcaacaccaaggtggacaagagagtggaacccaagagctgtatccccgaggacacattcttcccaagccccgagagcagctgcgacgtgaagctggtggaaaagagcttcgagacagacaccaacctgaacttccagaacctgagcgtgatcggcttcagaatcctgctgctgaaagtggccggctttaacctgctgatgaccctgcggctgtggtccagc

SEQ ID NO: 39219 - DNA, 1359 bp, synthetic construct
  source 1..1359: mol_type = other DNA
atggccttaccagtgaccgccttgctcctgccgctggccttgctgctccacgccgccaggccggacatccagatgacacagagccctagcagcctgtctgccagcgtgggagacagagtgaccatcacctgtagagccagccaggacatcaacacagccgtggcttggtatcagcagaagcctggcaaggcccctaagctgctgatctacagcgcctacttcctgtacagcggcgtgcccagcagattcagcggaagcagaagcggcaccgacttcaccctgacaatatccagcctccagcctgaggacttcgccacctactactgccagcagtacagcagatacagccccgtgacctttggacagggcaccaaggtggaaatcaagagaggcggaggcggaagtggaggcggaggatctggcggcggaggctctgaagttcagctggttgaaagtggtggcggcctggttcaacctggcggatctctgagactgagctgtgccgccagcggcttcaatgtgtacgcctctggaatgcactgggtccgacaggcccctggcaaaggacttgagtgggtcgccaaaatctaccccgacagcgactacacctattacgccgacagcgtgaagggcagattcaccatcagcgccgacaccagcaagaacaccgcctacctccagatgaactccctgagagccgaggacaccgccgtgtactactgtagcagagacagcagcttctactacgtgtacgctatggactactggggccagggcacactggtcacagtctcttctacgcgtgacggtaacgaggagatgggaggaatcactcaaaccccttacaaagtctcaatttcaggaacaactgttatccttacatgtccccagtatcctggcagcgagatcctttggcagcataacgacaagaatatagggggagatgaagacgataagaatatcggatctgacgaggatcacttgagcctgaaagagttctccgagcttgaacaaagcggatattatgtgtgctatccgcgcgggtcaaagccggaagacgctaacttttacctttatctccgagccagagtgtgcgaaaattgcatggaaatggacgttatgtccgttgctacaatagttatcgtagatatatgcatcacgggtggactgcttctgctggtttattattggtccaagaatagaaaggccaaagctaaacccgtgaccagaggcgctggcgcaggcggaaggcaaaggggacaaaacaaagaacggccaccaccagtgccaaatccagattatgagcctattcggaaaggacagagggacctgtactctggcctgaatcagagaagaatc

SEQ ID NO: 39220 - DNA, 1254 bp, synthetic construct
  source 1..1254: mol_type = other DNA
atggccttaccagtgaccgccttgctcctgccgctggccttgctgctccacgccgccaggccggacatccagatgacacagagccctagcagcctgtctgccagcgtgggagacagagtgaccatcacctgtagagccagccaggacatcaacacagccgtggcttggtatcagcagaagcctggcaaggcccctaagctgctgatctacagcgcctacttcctgtacagcggcgtgcccagcagattcagcggaagcagaagcggcaccgacttcaccctgacaatatccagcctccagcctgaggacttcgccacctactactgccagcagtacagcagatacagccccgtgacctttggacagggcaccaaggtggaaatcaagagaggcggaggcggaagtggaggcggaggatctggcggcggaggctctgaagttcagctggttgaaagtggtggcggcctggttcaacctggcggatctctgagactgagctgtgccgccagcggcttcaatgtgtacgcctctggaatgcactgggtccgacaggcccctggcaaaggacttgagtgggtcgccaaaatctaccccgacagcgactacacctattacgccgacagcgtgaagggcagattcaccatcagcgccgacaccagcaagaacaccgcctacctccagatgaactccctgagagccgaggacaccgccgtgtactactgtagcagagacagcagcttctactacgtgtacgctatggactactggggccagggcacactggtcacagtctcttctacgcgtttcaagatccccatcgaggaactggaagatcgggtgttcgtgaactgcaacacctctatcacctgggtggaaggcaccgtgggaacactgctgagcgacatcaccagactggacctcggcaagcggattctggaccctcggggcatctacagatgcaacggcaccgacatctacaaggacaaagaaagcaccgtgcaggtccactacagaatgtgccagtcctgcgtggaactggaccctgctacagtggccggcatcatcgtgaccgatgtgatcgctactctgctgctggctctgggagtgttctgcttcgccggacacgaaacaggcagactgtctggcgctgccgatacacaggccctgctgagaaacgaccaagtgtatcagcccctgcgcgacagagatgatgcccagtattctcacctcggcggcaactgggctagaaacaag

SEQ ID NO: 39221 - DNA, 1284 bp, synthetic construct
  source 1..1284: mol_type = other DNA
atggccttaccagtgaccgccttgctcctgccgctggccttgctgctccacgccgccaggccggacatccagatgacacagagccctagcagcctgtctgccagcgtgggagacagagtgaccatcacctgtagagccagccaggacatcaacacagccgtggcttggtatcagcagaagcctggcaaggcccctaagctgctgatctacagcgcctacttcctgtacagcggcgtgcccagcagattcagcggaagcagaagcggcaccgacttcaccctgacaatatccagcctccagcctgaggacttcgccacctactactgccagcagtacagcagatacagccccgtgacctttggacagggcaccaaggtggaaatcaagagaggcggaggcggaagtggaggcggaggatctggcggcggaggctctgaagttcagctggttgaaagtggtggcggcctggttcaacctggcggatctctgagactgagctgtgccgccagcggcttcaatgtgtacgcctctggaatgcactgggtccgacaggcccctggcaaaggacttgagtgggtcgccaaaatctaccccgacagcgactacacctattacgccgacagcgtgaagggcagattcaccatcagcgccgacaccagcaagaacaccgcctacctccagatgaactccctgagagccgaggacaccgccgtgtactactgtagcagagacagcagcttctactacgtgtacgctatggactactggggccagggcacactggtcacagtctcttctacgcgtcagagcatcaagggcaaccacctggtcaaggtgtacgactaccaagaggacggcagcgtgctgctgacatgtgatgccgaggccaagaacatcacctggtttaaggacggcaagatgatcggcttcctgaccgaggacaagaagaagtggaacctgggcagcaacgctaaggaccccagaggcatgtatcagtgcaagggcagccagaacaagagcaagcccctccaggtgtactaccggatgtgccagaactgcatcgagctgaacgccgctaccatcagcggctttctgttcgccgagatcgtgtccatcttcgtgctggccgtgggcgtgtactttatcgctggacaggatggcgtgcggcagagcagagcttccgataagcaaaccctgctgcctaacgaccagctgtaccagcctctgaaggacagagaggacgaccagtacagccacctccagggcaatcagctgagaagaaac

SEQ ID NO: 39222 - DNA, 1233 bp, synthetic construct
  source 1..1233: mol_type = other DNA
atggccttaccagtgaccgccttgctcctgccgctggccttgctgctccacgccgccaggccggacatccagatgacacagagccctagcagcctgtctgccagcgtgggagacagagtgaccatcacctgtagagccagccaggacatcaacacagccgtggcttggtatcagcagaagcctggcaaggcccctaagctgctgatctacagcgcctacttcctgtacagcggcgtgcccagcagattcagcggaagcagaagcggcaccgacttcaccctgacaatatccagcctccagcctgaggacttcgccacctactactgccagcagtacagcagatacagccccgtgacctttggacagggcaccaaggtggaaatcaagagaggcggaggcggaagtggaggcggaggatctggcggcggaggctctgaagttcagctggttgaaagtggtggcggcctggttcaacctggcggatctctgagactgagctgtgccgccagcggcttcaatgtgtacgcctctggaatgcactgggtccgacaggcccctggcaaaggacttgagtgggtcgccaaaatctaccccgacagcgactacacctattacgccgacagcgtgaagggcagattcaccatcagcgccgacaccagcaagaacaccgcctacctccagatgaactccctgagagccgaggacaccgccgtgtactactgtagcagagacagcagcttctactacgtgtacgctatggactactggggccagggcacactggtcacagtctcttctacgcgtcagagttttgggttgttggaccctaaattgtgctatctgttggacggaatcctgttcatttacggagtgatcctgaccgcattgttcctgcgggttaagttttccagatccgcagacgcacccgcttaccaacaagggcagaaccaactctacaatgaacttaatttggggcggagggaagagtacgacgttctggacaaaaggaggggacgagatcccgagatgggcggaaagcctcagcgaaggaagaatccgcaagaggggctttataacgaactccagaaagataaaatggcagaagcctatagtgagattgggatgaagggagaaaggaggaggggtaaaggtcacgatgggttgtaccaaggattgagcacagccactaaagatacctatgatgcgctccacatgcaggccctgccgccaaga

SEQ ID NO: 39223 - DNA, 1518 bp, synthetic construct
  source 1..1518: mol_type = other DNA
atggccttaccagtgaccgccttgctcctgccgctggccttgctgctccacgccgccaggccggacatccagatgacacagagccctagcagcctgtctgccagcgtgggagacagagtgaccatcacctgtagagccagccaggacatcaacacagccgtggcttggtatcagcagaagcctggcaaggcccctaagctgctgatctacagcgcctacttcctgtacagcggcgtgcccagcagattcagcggaagcagaagcggcaccgacttcaccctgacaatatccagcctccagcctgaggacttcgccacctactactgccagcagtacagcagatacagccccgtgacctttggacagggcaccaaggtggaaatcaagagaggcggaggcggaagtggaggcggaggatctggcggcggaggctctgaagttcagctggttgaaagtggtggcggcctggttcaacctggcggatctctgagactgagctgtgccgccagcggcttcaatgtgtacgcctctggaatgcactgggtccgacaggcccctggcaaaggacttgagtgggtcgccaaaatctaccccgacagcgactacacctattacgccgacagcgtgaagggcagattcaccatcagcgccgacaccagcaagaacaccgcctacctccagatgaactccctgagagccgaggacaccgccgtgtactactgtagcagagacagcagcttctactacgtgtacgctatggactactggggccagggcacactggtcacagtctcttctacgcgtggaatgaggactgaggatcttcccaaagctgtcgtctttctcgaaccccaatggtatcgggtgctcgaaaaagactctgtgacactgaaatgccaaggggcctactctcccgaggacaactccacacagtggtttcataatgagtccctcatcagctctcaggccagctcttatttcattgatgccgctacagtggacgactccggcgagtatcggtgtcagaccaatctgtctacactgtctgaccccgtgcagcttgaggtccacattggatggttgctcttgcaagccccacgctgggttttcaaagaggaagatccaatccatctgcggtgccacagctggaaaaacaccgctctccacaaagtcacatacctgcaaaatggcaaaggacgcaaatacttccatcacaattccgatttttacattccgaaggctaccctgaaagacagcggcagctatttctgccggggactcgtcggctccaagaatgtgtcctccgaaaccgtgaatatcacgattacccaaggactggctgtgcctacaatctctagcttctttccgcctggataccaagtctccttctgtcttgtgatggtcctcctgtttgctgtggacacaggactgtacttttccgtgaaaacgaacatccgcagctccacacgcgattggaaagatcacaagtttaaatggcgcaaagatccccaggacaag

SEQ ID NO: 39224 - DNA, 1443 bp, synthetic construct
  source 1..1443: mol_type = other DNA
atggccttaccagtgaccgccttgctcctgccgctggccttgctgctccacgccgccaggccggacatccagatgacacagagccctagcagcctgtctgccagcgtgggagacagagtgaccatcacctgtagagccagccaggacatcaacacagccgtggcttggtatcagcagaagcctggcaaggcccctaagctgctgatctacagcgcctacttcctgtacagcggcgtgcccagcagattcagcggaagcagaagcggcaccgacttcaccctgacaatatccagcctccagcctgaggacttcgccacctactactgccagcagtacagcagatacagccccgtgacctttggacagggcaccaaggtggaaatcaagagaggcggaggcggaagtggaggcggaggatctggcggcggaggctctgaagttcagctggttgaaagtggtggcggcctggttcaacctggcggatctctgagactgagctgtgccgccagcggcttcaatgtgtacgcctctggaatgcactgggtccgacaggcccctggcaaaggacttgagtgggtcgccaaaatctaccccgacagcgactacacctattacgccgacagcgtgaagggcagattcaccatcagcgccgacaccagcaagaacaccgcctacctccagatgaactccctgagagccgaggacaccgccgtgtactactgtagcagagacagcagcttctactacgtgtacgctatggactactggggccagggcacactggtcacagtctcttctacgcgtggaatgaggactgaggatcttcccaaagctgtcgtctttctcgaaccccaatggtatcgggtgctcgaaaaagactctgtgacactgaaatgccaaggggcctactctcccgaggacaactccacacagtggtttcataatgagtccctcatcagctctcaggccagctcttatttcattgatgccgctacagtggacgactccggcgagtatcggtgtcagaccaatctgtctacactgtctgaccccgtgcagcttgaggtccacattggatggttgctcttgcaagccccacgctgggttttcaaagaggaagatccaatccatctgcggtgccacagctggaaaaacaccgctctccacaaagtcacatacctgcaaaatggcaaaggacgcaaatacttccatcacaattccgatttttacattccgaaggctaccctgaaagacagcggcagctatttctgccggggactcgtcggctccaagaatgtgtcctccgaaaccgtgaatatcacgattacccaaggactggctgtgcctacaatctctagcttctttccgcctggataccaagtctccttctgtcttgtgatggtcctcctgtttgctgtggacacaggactgtacttttccgtg

SEQ ID NO: 39225 - DNA, 1446 bp, synthetic construct
  source 1..1446: mol_type = other DNA
atggccttaccagtgaccgccttgctcctgccgctggccttgctgctccacgccgccaggccggacatccagatgacacagagccctagcagcctgtctgccagcgtgggagacagagtgaccatcacctgtagagccagccaggacatcaacacagccgtggcttggtatcagcagaagcctggcaaggcccctaagctgctgatctacagcgcctacttcctgtacagcggcgtgcccagcagattcagcggaagcagaagcggcaccgacttcaccctgacaatatccagcctccagcctgaggacttcgccacctactactgccagcagtacagcagatacagccccgtgacctttggacagggcaccaaggtggaaatcaagagaggcggaggcggaagtggaggcggaggatctggcggcggaggctctgaagttcagctggttgaaagtggtggcggcctggttcaacctggcggatctctgagactgagctgtgccgccagcggcttcaatgtgtacgcctctggaatgcactgggtccgacaggcccctggcaaaggacttgagtgggtcgccaaaatctaccccgacagcgactacacctattacgccgacagcgtgaagggcagattcaccatcagcgccgacaccagcaagaacaccgcctacctccagatgaactccctgagagccgaggacaccgccgtgtactactgtagcagagacagcagcttctactacgtgtacgctatggactactggggccagggcacactggtcacagtctcttctacgcgtggaatgaggactgaggatcttcccaaagctgtcgtctttctcgaaccccaatggtatcgggtgctcgaaaaagactctgtgacactgaaatgccaaggggcctactctcccgaggacaactccacacagtggtttcataatgagtccctcatcagctctcaggccagctcttatttcattgatgccgctacagtggacgactccggcgagtatcggtgtcagaccaatctgtctacactgtctgaccccgtgcagcttgaggtccacattggatggttgctcttgcaagccccacgctgggttttcaaagaggaagatccaatccatctgcggtgccacagctggaaaaacaccgctctccacaaagtcacatacctgcaaaatggcaaaggacgcaaatacttccatcacaattccgatttttacattccgaaggctaccctgaaagacagcggcagctatttctgccggggactcgtcggctccaagaatgtgtcctccgaaaccgtgaatatcacgattacccaaggactggctgtgcctacaatctctagcttctttccgcctggataccaagtctccttctgtcttgtgatggtcctcctgtttgctgtggacacaggactgtacttttccgtgaaa

SEQ ID NO: 39226 - DNA, 2178 bp, synthetic construct
  source 1..2178: mol_type = other DNA
atggccttaccagtgaccgccttgctcctgccgctggccttgctgctccacgccgccaggccggacatccagatgacacagagccctagcagcctgtctgccagcgtgggagacagagtgaccatcacctgtagagccagccaggacatcaacacagccgtggcttggtatcagcagaagcctggcaaggcccctaagctgctgatctacagcgcctacttcctgtacagcggcgtgcccagcagattcagcggaagcagaagcggcaccgacttcaccctgacaatatccagcctccagcctgaggacttcgccacctactactgccagcagtacagcagatacagccccgtgacctttggacagggcaccaaggtggaaatcaagagactcgagggacagcctaaggccaatcctaccgtgacactgttccctccaagcagcgaagaactccaggccaacaaggccacacttgtgtgcctgatctccgacttctaccctggggctgtgacagtggcttggaaggccgatggatctcctgtgaaagccggcgtggaaaccaccaagccatccaagcagagcaacaacaaatacgccgccagctcctacctgagcctgacacctgagcagtggaagtcccacagatcctacagctgccaagtgacccacgaaggcagcaccgtggaaaagacagtggcccctacagagtgcagcggatcccagagcttcggcctgctggaccccaagctgtgctacctgctggatggcatcctgttcatctacggcgtgatcctgaccgccctgttcctgagagtgaagttcagcagaagcgccgacgcccctgcctaccagcagggacagaaccaactgtacaacgagctgaacctgggcagacgggaagagtacgacgtgctggacaagcggagaggcagggaccctgagatgggcggaaagccccagcggagaaagaacccccaggaaggactgtataacgaactccagaaagacaagatggccgaagcctacagcgagatcggcatgaagggcgagcggagaagaggcaagggccacgatggcctgtaccagggcctgagcaccgccaccaaggacacctatgacgccctgcacatgcaggccctgcctccaagaagggccaagcgatctggatctggagcaacaaacttctcactactcaaacaagcaggtgacgtggaggagaatcccgggcctactagtatggactggatttggcgcatccttttccttgtcggcgctgctaccggcgcgcattccttcgaagaagttcagctggttgaaagtggtggcggcctggttcaacctggcggatctctgagactgagctgtgccgccagcggcttcaatgtgtacgcctctggaatgcactgggtccgacaggcccctggcaaaggacttgagtgggtcgccaaaatctaccccgacagcgactacacctattacgccgacagcgtgaagggcagattcaccatcagcgccgacaccagcaagaacaccgcctacctccagatgaactccctgagagccgaggacaccgccgtgtactactgtagcagagacagcagcttctactacgtgtacgctatggactactggggccagggcacactggtcacagtctcttctacgcgtgcctctacaaagggaccctccgtgtttcctctggctcccagcagcaagtctacaagcggaggaacagccgctctgggctgcctggtcaaggattactttcccgagcctgtgaccgtgtcctggaatagcggagcactgacaagcggcgtgcacacctttccagccgtgctgcaaagcagcggcctgtactctctgagcagcgtggtcacagtgcctagctctagcctgggcacccagacctacatctgcaatgtgaaccacaagcctagcaacaccaaggtggacaagagagtggaacccaagagctgtggtaccatcactcaaggtttggcagtgtcaaccatctcatcattctttccacctggctaccaagtgtccttctgcctggtcatggtgctgctgttcgccgtggataccggcctgtacttcagcgtcaagaccaacatccggtccagcaccagagactggaaggaccacaagttcaagtggcggaaggaccctcaggacaag

SEQ ID NO: 39227 - DNA, 2223 bp, synthetic construct
  source 1..2223: mol_type = other DNA
atggccttaccagtgaccgccttgctcctgccgctggccttgctgctccacgccgccaggccggacatccagatgacacagagccctagcagcctgtctgccagcgtgggagacagagtgaccatcacctgtagagccagccaggacatcaacacagccgtggcttggtatcagcagaagcctggcaaggcccctaagctgctgatctacagcgcctacttcctgtacagcggcgtgcccagcagattcagcggaagcagaagcggcaccgacttcaccctgacaatatccagcctccagcctgaggacttcgccacctactactgccagcagtacagcagatacagccccgtgacctttggacagggcaccaaggtggaaatcaagagactcgaggacctgaagaacgtgttcccacctgaggtggccgtgttcgagcctagcgaggccgagatcagccacacccagaaagccaccctcgtgtgcctggctaccggcttctaccccgaccatgtggaactgtcttggtgggtcaacggcaaagaggtgcacagcggcgtgtctaccgacccccagccactgaaagaacagcccgccctgaacgacagccggtactgcctgagcagcagactgagagtgtccgccaccttctggcagaacccccggaaccacttcagatgccaggtgcagttctacggcctgagcgagaacgacgagtggacccaggacagagccaagcccgtgacccagatcgtgtctgccgaagcctggggcagagccgattgcggatcccagagcttcggcctgctggaccccaagctgtgctacctgctggatggcatcctgttcatctacggcgtgatcctgaccgccctgttcctgagagtgaagttcagcagaagcgccgacgcccctgcctaccagcagggacagaaccaactgtacaacgagctgaacctgggcagacgggaagagtacgacgtgctggacaagcggagaggcagggaccctgagatgggcggaaagccccagcggagaaagaacccccaggaaggactgtataacgaactccagaaagacaagatggccgaagcctacagcgagatcggcatgaagggcgagcggagaagaggcaagggccacgatggcctgtaccagggcctgagcaccgccaccaaggacacctatgacgccctgcacatgcaggccctgcctccaagaagggccaagcgatctggatctggagcaacaaacttctcactactcaaacaagcaggtgacgtggaggagaatcccgggcctactagtatggactggatttggcgcatccttttccttgtcggcgctgctaccggcgcgcattccttcgaagaagttcagctggttgaaagtggtggcggcctggttcaacctggcggatctctgagactgagctgtgccgccagcggcttcaatgtgtacgcctctggaatgcactgggtccgacaggcccctggcaaaggacttgagtgggtcgccaaaatctaccccgacagcgactacacctattacgccgacagcgtgaagggcagattcaccatcagcgccgacaccagcaagaacaccgcctacctccagatgaactccctgagagccgaggacaccgccgtgtactactgtagcagagacagcagcttctactacgtgtacgctatggactactggggccagggcacactggtcacagtctcttctacgcgtatccagaaccctgatcctgccgtgtaccagctgcgggatagcaagagcagcgacaagagcgtgtgtctgttcaccgacttcgacagccagaccaacgtgtcccagagcaaggactccgacgtgtacatcaccgataagaccgtgctggacatgcggagcatggacttcaagagcaactccgccgtggcctggtccaacaagtccgatttcgcctgcgccaacgccttcaacaacagcattatccccgaggacacattcttcccaagccccgagagcagctgcggtaccatcactcaaggtttggcagtgtcaaccatctcatcattctttccacctggctaccaagtgtccttctgcctggtcatggtgctgctgttcgccgtggataccggcctgtacttcagcgtcaagaccaacatccggtccagcaccagagactggaaggaccacaagttcaagtggcggaaggaccctcaggacaag

SEQ ID NO: 39228 - DNA, 2148 bp, synthetic construct
  source 1..2148: mol_type = other DNA
atggccttaccagtgaccgccttgctcctgccgctggccttgctgctccacgccgccaggccggacatccagatgacacagagccctagcagcctgtctgccagcgtgggagacagagtgaccatcacctgtagagccagccaggacatcaacacagccgtggcttggtatcagcagaagcctggcaaggcccctaagctgctgatctacagcgcctacttcctgtacagcggcgtgcccagcagattcagcggaagcagaagcggcaccgacttcaccctgacaatatccagcctccagcctgaggacttcgccacctactactgccagcagtacagcagatacagccccgtgacctttggacagggcaccaaggtggaaatcaagagactcgaggacctgaagaacgtgttcccacctgaggtggccgtgttcgagcctagcgaggccgagatcagccacacccagaaagccaccctcgtgtgcctggctaccggcttctaccccgaccatgtggaactgtcttggtgggtcaacggcaaagaggtgcacagcggcgtgtctaccgacccccagccactgaaagaacagcccgccctgaacgacagccggtactgcctgagcagcagactgagagtgtccgccaccttctggcagaacccccggaaccacttcagatgccaggtgcagttctacggcctgagcgagaacgacgagtggacccaggacagagccaagcccgtgacccagatcgtgtctgccgaagcctggggcagagccgattgcggatcccagagcttcggcctgctggaccccaagctgtgctacctgctggatggcatcctgttcatctacggcgtgatcctgaccgccctgttcctgagagtgaagttcagcagaagcgccgacgcccctgcctaccagcagggacagaaccaactgtacaacgagctgaacctgggcagacgggaagagtacgacgtgctggacaagcggagaggcagggaccctgagatgggcggaaagccccagcggagaaagaacccccaggaaggactgtataacgaactccagaaagacaagatggccgaagcctacagcgagatcggcatgaagggcgagcggagaagaggcaagggccacgatggcctgtaccagggcctgagcaccgccaccaaggacacctatgacgccctgcacatgcaggccctgcctccaagaagggccaagcgatctggatctggagcaacaaacttctcactactcaaacaagcaggtgacgtggaggagaatcccgggcctactagtatggactggatttggcgcatccttttccttgtcggcgctgctaccggcgcgcattccttcgaagaagttcagctggttgaaagtggtggcggcctggttcaacctggcggatctctgagactgagctgtgccgccagcggcttcaatgtgtacgcctctggaatgcactgggtccgacaggcccctggcaaaggacttgagtgggtcgccaaaatctaccccgacagcgactacacctattacgccgacagcgtgaagggcagattcaccatcagcgccgacaccagcaagaacaccgcctacctccagatgaactccctgagagccgaggacaccgccgtgtactactgtagcagagacagcagcttctactacgtgtacgctatggactactggggccagggcacactggtcacagtctcttctacgcgtatccagaaccctgatcctgccgtgtaccagctgcgggatagcaagagcagcgacaagagcgtgtgtctgttcaccgacttcgacagccagaccaacgtgtcccagagcaaggactccgacgtgtacatcaccgataagaccgtgctggacatgcggagcatggacttcaagagcaactccgccgtggcctggtccaacaagtccgatttcgcctgcgccaacgccttcaacaacagcattatccccgaggacacattcttcccaagccccgagagcagctgcggtaccatcactcaaggtttggcagtgtcaaccatctcatcattctttccacctggctaccaagtgtccttctgcctggtcatggtgctgctgttcgccgtggataccggcctgtacttcagcgtc

SEQ ID NO: 39229 - DNA, 2151 bp, synthetic construct
  source 1..2151: mol_type = other DNA
atggccttaccagtgaccgccttgctcctgccgctggccttgctgctccacgccgccaggccggacatccagatgacacagagccctagcagcctgtctgccagcgtgggagacagagtgaccatcacctgtagagccagccaggacatcaacacagccgtggcttggtatcagcagaagcctggcaaggcccctaagctgctgatctacagcgcctacttcctgtacagcggcgtgcccagcagattcagcggaagcagaagcggcaccgacttcaccctgacaatatccagcctccagcctgaggacttcgccacctactactgccagcagtacagcagatacagccccgtgacctttggacagggcaccaaggtggaaatcaagagactcgaggacctgaagaacgtgttcccacctgaggtggccgtgttcgagcctagcgaggccgagatcagccacacccagaaagccaccctcgtgtgcctggctaccggcttctaccccgaccatgtggaactgtcttggtgggtcaacggcaaagaggtgcacagcggcgtgtctaccgacccccagccactgaaagaacagcccgccctgaacgacagccggtactgcctgagcagcagactgagagtgtccgccaccttctggcagaacccccggaaccacttcagatgccaggtgcagttctacggcctgagcgagaacgacgagtggacccaggacagagccaagcccgtgacccagatcgtgtctgccgaagcctggggcagagccgattgcggatcccagagcttcggcctgctggaccccaagctgtgctacctgctggatggcatcctgttcatctacggcgtgatcctgaccgccctgttcctgagagtgaagttcagcagaagcgccgacgcccctgcctaccagcagggacagaaccaactgtacaacgagctgaacctgggcagacgggaagagtacgacgtgctggacaagcggagaggcagggaccctgagatgggcggaaagccccagcggagaaagaacccccaggaaggactgtataacgaactccagaaagacaagatggccgaagcctacagcgagatcggcatgaagggcgagcggagaagaggcaagggccacgatggcctgtaccagggcctgagcaccgccaccaaggacacctatgacgccctgcacatgcaggccctgcctccaagaagggccaagcgatctggatctggagcaacaaacttctcactactcaaacaagcaggtgacgtggaggagaatcccgggcctactagtatggactggatttggcgcatccttttccttgtcggcgctgctaccggcgcgcattccttcgaagaagttcagctggttgaaagtggtggcggcctggttcaacctggcggatctctgagactgagctgtgccgccagcggcttcaatgtgtacgcctctggaatgcactgggtccgacaggcccctggcaaaggacttgagtgggtcgccaaaatctaccccgacagcgactacacctattacgccgacagcgtgaagggcagattcaccatcagcgccgacaccagcaagaacaccgcctacctccagatgaactccctgagagccgaggacaccgccgtgtactactgtagcagagacagcagcttctactacgtgtacgctatggactactggggccagggcacactggtcacagtctcttctacgcgtatccagaaccctgatcctgccgtgtaccagctgcgggatagcaagagcagcgacaagagcgtgtgtctgttcaccgacttcgacagccagaccaacgtgtcccagagcaaggactccgacgtgtacatcaccgataagaccgtgctggacatgcggagcatggacttcaagagcaactccgccgtggcctggtccaacaagtccgatttcgcctgcgccaacgccttcaacaacagcattatccccgaggacacattcttcccaagccccgagagcagctgcggtaccatcactcaaggtttggcagtgtcaaccatctcatcattctttccacctggctaccaagtgtccttctgcctggtcatggtgctgctgttcgccgtggataccggcctgtacttcagcgtcaag

SEQ ID NO: 39230 - DNA, 2154 bp, synthetic construct
  source 1..2154: mol_type = other DNA
atggccttaccagtgaccgccttgctcctgccgctggccttgctgctccacgccgccaggccggacatccagatgacacagagccctagcagcctgtctgccagcgtgggagacagagtgaccatcacctgtagagccagccaggacatcaacacagccgtggcttggtatcagcagaagcctggcaaggcccctaagctgctgatctacagcgcctacttcctgtacagcggcgtgcccagcagattcagcggaagcagaagcggcaccgacttcaccctgacaatatccagcctccagcctgaggacttcgccacctactactgccagcagtacagcagatacagccccgtgacctttggacagggcaccaaggtggaaatcaagagactcgaggacctgaagaacgtgttcccacctgaggtggccgtgttcgagcctagcgaggccgagatcagccacacccagaaagccaccctcgtgtgcctggctaccggcttctaccccgaccatgtggaactgtcttggtgggtcaacggcaaagaggtgcacagcggcgtgtctaccgacccccagccactgaaagaacagcccgccctgaacgacagccggtactgcctgagcagcagactgagagtgtccgccaccttctggcagaacccccggaaccacttcagatgccaggtgcagttctacggcctgagcgagaacgacgagtggacccaggacagagccaagcccgtgacccagatcgtgtctgccgaagcctggggcagagccgattgcggatcccagagcttcggcctgctggaccccaagctgtgctacctgctggatggcatcctgttcatctacggcgtgatcctgaccgccctgttcctgagagtgaagttcagcagaagcgccgacgcccctgcctaccagcagggacagaaccaactgtacaacgagctgaacctgggcagacgggaagagtacgacgtgctggacaagcggagaggcagggaccctgagatgggcggaaagccccagcggagaaagaacccccaggaaggactgtataacgaactccagaaagacaagatggccgaagcctacagcgagatcggcatgaagggcgagcggagaagaggcaagggccacgatggcctgtaccagggcctgagcaccgccaccaaggacacctatgacgccctgcacatgcaggccctgcctccaagaagggccaagcgatctggatctggagcaacaaacttctcactactcaaacaagcaggtgacgtggaggagaatcccgggcctactagtatggactggatttggcgcatccttttccttgtcggcgctgctaccggcgcgcattccttcgaagaagttcagctggttgaaagtggtggcggcctggttcaacctggcggatctctgagactgagctgtgccgccagcggcttcaatgtgtacgcctctggaatgcactgggtccgacaggcccctggcaaaggacttgagtgggtcgccaaaatctaccccgacagcgactacacctattacgccgacagcgtgaagggcagattcaccatcagcgccgacaccagcaagaacaccgcctacctccagatgaactccctgagagccgaggacaccgccgtgtactactgtagcagagacagcagcttctactacgtgtacgctatggactactggggccagggcacactggtcacagtctcttctacgcgtatccagaaccctgatcctgccgtgtaccagctgcgggatagcaagagcagcgacaagagcgtgtgtctgttcaccgacttcgacagccagaccaacgtgtcccagagcaaggactccgacgtgtacatcaccgataagaccgtgctggacatgcggagcatggacttcaagagcaactccgccgtggcctggtccaacaagtccgatttcgcctgcgccaacgccttcaacaacagcattatccccgaggacacattcttcccaagccccgagagcagctgcggtaccatcactcaaggtttggcagtgtcaaccatctcatcattctttccacctggctaccaagtgtccttctgcctggtcatggtgctgctgttcgccgtggataccggcctgtacttcagcgtcaagacc

SEQ ID NO: 39231 - DNA, 1965 bp, synthetic construct
  source 1..1965: mol_type = other DNA
atggccttaccagtgaccgccttgctcctgccgctggccttgctgctccacgccgccaggccggacatccagatgacacagagccctagcagcctgtctgccagcgtgggagacagagtgaccatcacctgtagagccagccaggacatcaacacagccgtggcttggtatcagcagaagcctggcaaggcccctaagctgctgatctacagcgcctacttcctgtacagcggcgtgcccagcagattcagcggaagcagaagcggcaccgacttcaccctgacaatatccagcctccagcctgaggacttcgccacctactactgccagcagtacagcagatacagccccgtgacctttggacagggcaccaaggtggaaatcaagagactcgagggacagcctaaggccaatcctaccgtgacactgttccctccaagcagcgaagaactccaggccaacaaggccacacttgtgtgcctgatctccgacttctaccctggggctgtgacagtggcttggaaggccgatggatctcctgtgaaagccggcgtggaaaccaccaagccatccaagcagagcaacaacaaatacgccgccagctcctacctgagcctgacacctgagcagtggaagtcccacagatcctacagctgccaagtgacccacgaaggcagcaccgtggaaaagacagtggcccctacagagtgcagcggatccctgggagagcctcagctgtgctatatcctggacgccatcctgtttctgtacggcatcgtgctgaccctgctgtactgccggctgaagatccaagtgcggaaggccgccatcaccagctacgagaaatccgacggcgtgtacaccggcctgagcaccagaaatcaagagacatacgagacactgaagcacgaaaagcctccacaaagggccaagcgatctggatctggagcaacaaacttctcactactcaaacaagcaggtgacgtggaggagaatcccgggcctactagtatggactggatttggcgcatccttttccttgtcggcgctgctaccggcgcgcattccttcgaagaagttcagctggttgaaagtggtggcggcctggttcaacctggcggatctctgagactgagctgtgccgccagcggcttcaatgtgtacgcctctggaatgcactgggtccgacaggcccctggcaaaggacttgagtgggtcgccaaaatctaccccgacagcgactacacctattacgccgacagcgtgaagggcagattcaccatcagcgccgacaccagcaagaacaccgcctacctccagatgaactccctgagagccgaggacaccgccgtgtactactgtagcagagacagcagcttctactacgtgtacgctatggactactggggccagggcacactggtcacagtctcttctacgcgtgcctctacaaagggaccctccgtgtttcctctggctcccagcagcaagtctacaagcggaggaacagccgctctgggctgcctggtcaaggattactttcccgagcctgtgaccgtgtcctggaatagcggagcactgacaagcggcgtgcacacctttccagccgtgctgcaaagcagcggcctgtactctctgagcagcgtggtcacagtgcctagctctagcctgggcacccagacctacatctgcaatgtgaaccacaagcctagcaacaccaaggtggacaagagagtggaacccaagagctgtggtaccctcggagaaccacagctctgttacattctggatgctatcctgttcctctatgggatcgtcctgacactcctgtattgcagactcaaaattcaagttcgcaaagccgccattacctcttacgagaagagtgatggggtgtacacaggactgtctacccggaatcaagaaacctacgaaaccctcaaacatgagaagccacctcagtaa

SEQ ID NO: 39232 - DNA, 1872 bp, synthetic construct
  source 1..1872: mol_type = other DNA
atggccttaccagtgaccgccttgctcctgccgctggccttgctgctccacgccgccaggccggacatccagatgacacagagccctagcagcctgtctgccagcgtgggagacagagtgaccatcacctgtagagccagccaggacatcaacacagccgtggcttggtatcagcagaagcctggcaaggcccctaagctgctgatctacagcgcctacttcctgtacagcggcgtgcccagcagattcagcggaagcagaagcggcaccgacttcaccctgacaatatccagcctccagcctgaggacttcgccacctactactgccagcagtacagcagatacagccccgtgacctttggacagggcaccaaggtggaaatcaagagactcgaggacctgaagaacgtgttcccacctgaggtggccgtgttcgagcctagcgaggccgagatcagccacacccagaaagccaccctcgtgtgcctggctaccggcttctaccccgaccatgtggaactgtcttggtgggtcaacggcaaagaggtgcacagcggcgtgtgtaccgacccccagccactgaaagaacagcccgccctgaacgacagccggtactgcctgagcagcagactgagagtgtccgccaccttctggcagaacccccggaaccacttcagatgccaggtgcagttctacggcctgagcgagaacgacgagtggacccaggacagagccaagcccgtgacccagatcgtgtctgccgaagcctggggcagagccgattgcggctttaccagcgagagctaccagcagggcgtgctgagcgcctactacatgtacttgttgctgctgctgaagtccgtggtgtacttcgccatcatcacatgctgcctgctgcggagaaccgccttctgctgcaacggcgagaagtctagggccaagcgatctggatctggagcaacaaacttctcactactcaaacaagcaggtgacgtggaggagaatcccgggcctactagtatggactggatttggcgcatccttttccttgtcggcgctgctaccggcgcgcattccttcgaagaagttcagctggttgaaagtggtggcggcctggttcaacctggcggatctctgagactgagctgtgccgccagcggcttcaatgtgtacgcctctggaatgcactgggtccgacaggcccctggcaaaggacttgagtgggtcgccaaaatctaccccgacagcgactacacctattacgccgacagcgtgaagggcagattcaccatcagcgccgacaccagcaagaacaccgcctacctccagatgaactccctgagagccgaggacaccgccgtgtactactgtagcagagacagcagcttctactacgtgtacgctatggactactggggccagggcacactggtcacagtctcttctacgcgtatccagaaccctgatcctgccgtgtaccagctgcgggatagcaagagcagcgacaagagcgtgtgtctgttcaccgacttcgacagccagaccaacgtgtcccagagcaaggactccgacgtgtacatcaccgataagtgcgtgctggacatgcggagcatggacttcaagagcaactccgccgtggcctggtccaacaagtccgatttcgcctgcgccaacgccttcaacaacagcattatccccgaggacacattcttcccaagccccgagagcagctgcgacgtgaagctggtggaaaagagcttcgagacagacaccaacctgaacttccagaacctgagcgtgatcggcttcagaatcctgctgctgaaagtggccggctttaacctgctgatgaccctgcggctgtggtccagc

SEQ ID NO: 39233 - DNA, 1893 bp, synthetic construct
  source 1..1893: mol_type = other DNA
atggccttaccagtgaccgccttgctcctgccgctggccttgctgctccacgccgccaggccggacatccagatgacacagagccctagcagcctgtctgccagcgtgggagacagagtgaccatcacctgtagagccagccaggacatcaacacagccgtggcttggtatcagcagaagcctggcaaggcccctaagctgctgatctacagcgcctacttcctgtacagcggcgtgcccagcagattcagcggaagcagaagcggcaccgacttcaccctgacaatatccagcctccagcctgaggacttcgccacctactactgccagcagtacagcagatacagccccgtgacctttggacagggcaccaaggtggaaatcaagagactcgaggacaagcagctggacgccgacgtgtcccccaagcctaccatcttcctgccctctatcgccgagacaaagctccagaaggccggcacctacctgtgcctgctggaaaagttcttcccagatgtgattaagatccactggcaggaaaagaagtccaacaccatcctgggcagccaggaaggcaacaccatgaagaccaacgacacctacatgaagttcagctggctgaccgtgcccgagaagtccctggacaaagaacacagatgcatcgtgcggcacgaaaacaacaagaacggcgtggaccaggaaatcatcttcccacccatcaagaccgatgtgattacaatggaccccaaggacaactgctccaaggacgccaacgataccctgctgctccagctgaccaacaccagcgcctactacatgtacgagatcctgctgggcaaggccaccctgtacgccgtgctggtgtctgccctggtgctgatggctatggtcaagcggaaggacagccggggaagggccaagcgatctggatctggagcaacaaacttctcactactcaaacaagcaggtgacgtggaggagaatcccgggcctactagtatggactggatttggcgcatccttttccttgtcggcgctgctaccggcgcgcattccttcgaagaagttcagctggttgaaagtggtggcggcctggttcaacctggcggatctctgagactgagctgtgccgccagcggcttcaatgtgtacgcctctggaatgcactgggtccgacaggcccctggcaaaggacttgagtgggtcgccaaaatctaccccgacagcgactacacctattacgccgacagcgtgaagggcagattcaccatcagcgccgacaccagcaagaacaccgcctacctccagatgaactccctgagagccgaggacaccgccgtgtactactgtagcagagacagcagcttctactacgtgtacgctatggactactggggccagggcacactggtcacagtctcttctacgcgtagccagcctcacaccaagcccagcgtgttcgtgatgaagaacggcaccaacgtggcctgcctcgtgaaagagttctaccccaaggacatcaggatcaacctggtgtccagcaagaagatcaccgagttcgaccccgccatcgtgatctcccccagcggcaagtacaacgccgtgaagctggggaagtatgaggacagcaacagcgtgacctgctccgtgcagcacgacaacaagaccgtgcacagcaccgactttgaagtgaaaaccgactccaccgaccacgtgaagcccaaagagacagagaacaccaagcagcccagcaagagctgccacaagcccaaggccatcgtgcacaccgagaaagtgaacatgatgagcctgaccgtgatcggcttcagaatcctgctgctgaaagtggccggctttaacctgctgatgaccctgcggctgtggtccagctaa

SEQ ID NO: 39234 - DNA, 1893 bp, synthetic construct
  source 1..1893: mol_type = other DNA
atggccttaccagtgaccgccttgctcctgccgctggccttgctgctccacgccgccaggccggacatccagatgacacagagccctagcagcctgtctgccagcgtgggagacagagtgaccatcacctgtagagccagccaggacatcaacacagccgtggcttggtatcagcagaagcctggcaaggcccctaagctgctgatctacagcgcctacttcctgtacagcggcgtgcccagcagattcagcggaagcagaagcggcaccgacttcaccctgacaatatccagcctccagcctgaggacttcgccacctactactgccagcagtacagcagatacagccccgtgacctttggacagggcaccaaggtggaaatcaagagactcgaggacaagcagctggacgccgacgtgtcccccaagcctaccatcttcctgccctctatcgccgagacaaagctccagaaggccggcacctacctgtgcctgctggaaaagttcttcccagatgtgattaagatccactggcaggaaaagaagtccaacaccatcctgggcagccaggaaggcaacaccatgaagaccaacgacacctacatgaagttcagctggctgaccgtgcccgagaagtccctggacaaagaacacagatgcatcgtgcggcacgaaaacaacaagaacggcgtggaccaggaaatcatcttcccacccatcaagaccgatgtgattacaatggaccccaaggacaactgctccaaggacgccaacgataccctgctgctccagctgaccaacaccagcgccaccatcctgtacgagatcctgctgggcaaggccaccctgtacgccgtgctggtgtctgccctggtgctgatggctatggtcaagcggaaggacagccggggaagggccaagcgatctggatctggagcaacaaacttctcactactcaaacaagcaggtgacgtggaggagaatcccgggcctactagtatggactggatttggcgcatccttttccttgtcggcgctgctaccggcgcgcattccttcgaagaagttcagctggttgaaagtggtggcggcctggttcaacctggcggatctctgagactgagctgtgccgccagcggcttcaatgtgtacgcctctggaatgcactgggtccgacaggcccctggcaaaggacttgagtgggtcgccaaaatctaccccgacagcgactacacctattacgccgacagcgtgaagggcagattcaccatcagcgccgacaccagcaagaacaccgcctacctccagatgaactccctgagagccgaggacaccgccgtgtactactgtagcagagacagcagcttctactacgtgtacgctatggactactggggccagggcacactggtcacagtctcttctacgcgtagccagcctcacaccaagcccagcgtgttcgtgatgaagaacggcaccaacgtggcctgcctcgtgaaagagttctaccccaaggacatcaggatcaacctggtgtccagcaagaagatcaccgagttcgaccccgccatcgtgatctcccccagcggcaagtacaacgccgtgaagctggggaagtatgaggacagcaacagcgtgacctgctccgtgcagcacgacaacaagaccgtgcacagcaccgactttgaagtgaaaaccgactccaccgaccacgtgaagcccaaagagacagagaacaccaagcagcccagcaagagctgccacaagcccaaggccatcgtgcacaccgagaaagtgaacatgatgagcctgaccgtgatcggcttcagaatcctgctgctgaaagtggccggctttaacctgctgatgaccctgcggctgtggtccagctaa

SEQ ID NO: 39235 - DNA, 1893 bp, synthetic construct
  source 1..1893: mol_type = other DNA
atggccttaccagtgaccgccttgctcctgccgctggccttgctgctccacgccgccaggccggacatccagatgacacagagccctagcagcctgtctgccagcgtgggagacagagtgaccatcacctgtagagccagccaggacatcaacacagccgtggcttggtatcagcagaagcctggcaaggcccctaagctgctgatctacagcgcctacttcctgtacagcggcgtgcccagcagattcagcggaagcagaagcggcaccgacttcaccctgacaatatccagcctccagcctgaggacttcgccacctactactgccagcagtacagcagatacagccccgtgacctttggacagggcaccaaggtggaaatcaagagactcgaggacaagcagctggacgccgacgtgtcccccaagcctaccatcttcctgccctctatcgccgagacaaagctccagaaggccggcacctacctgtgcctgctggaaaagttcttcccagatgtgattaagatccactggcaggaaaagaagtccaacaccatcctgggcagccaggaaggcaacaccatgaagaccaacgacacctacatgaagttcagctggctgaccgtgcccgagaagtccctggacaaagaacacagatgcatcgtgcggcacgaaaacaacaagaacggcgtggaccaggaaatcatcttcccacccatcaagaccgatgtgattacaatggaccccaaggacaactgctccaaggacgccaacgataccctgctgctccagctgaccaacaccagcgcctactacatgtacgagatcctgctgggcaaggccaccctgtacgccgtgctggtgtctgccctggtgctgatggctatggtcaagcggaaggacagccggggaagggccaagcgatctggatctggagcaacaaacttctcactactcaaacaagcaggtgacgtggaggagaatcccgggcctactagtatggactggatttggcgcatccttttccttgtcggcgctgctaccggcgcgcattccttcgaagaagttcagctggttgaaagtggtggcggcctggttcaacctggcggatctctgagactgagctgtgccgccagcggcttcaatgtgtacgcctctggaatgcactgggtccgacaggcccctggcaaaggacttgagtgggtcgccaaaatctaccccgacagcgactacacctattacgccgacagcgtgaagggcagattcaccatcagcgccgacaccagcaagaacaccgcctacctccagatgaactccctgagagccgaggacaccgccgtgtactactgtagcagagacagcagcttctactacgtgtacgctatggactactggggccagggcacactggtcacagtctcttctacgcgtagccagcctcacaccaagcccagcgtgttcgtgatgaagaacggcaccaacgtggcctgcctcgtgaaagagttctaccccaaggacatcaggatcaacctggtgtccagcaagaagatcaccgagttcgaccccgccatcgtgatctcccccagcggcaagtacaacgccgtgaagctggggaagtacgaggacagcaacagcgtgacctgctccgtgcagcacgacaacaagaccgtgcacagcaccgactttgaagtgaaaaccgactccaccgaccacgtgaagcccaaagagacagagaacaccaagcagcccagcaagagctgccacaagcccaaggccatcgtgcacaccgagaaagtgaacatgatgagcctgaccgtgctgggcttcagaatcctgctgctgaaagtggccggctttaacctgctgatgaccctgcggctgtggtccagctaa

SEQ ID NO: 39236 - DNA, 1893 bp, synthetic construct
  source 1..1893: mol_type = other DNA
atggccttaccagtgaccgccttgctcctgccgctggccttgctgctccacgccgccaggccggacatccagatgacacagagccctagcagcctgtctgccagcgtgggagacagagtgaccatcacctgtagagccagccaggacatcaacacagccgtggcttggtatcagcagaagcctggcaaggcccctaagctgctgatctacagcgcctacttcctgtacagcggcgtgcccagcagattcagcggaagcagaagcggcaccgacttcaccctgacaatatccagcctccagcctgaggacttcgccacctactactgccagcagtacagcagatacagccccgtgacctttggacagggcaccaaggtggaaatcaagagactcgaggacaagcagctggacgccgacgtgtcccccaagcctaccatcttcctgccctctatcgccgagacaaagctccagaaggccggcacctacctgtgcctgctggaaaagttcttcccagatgtgattaagatccactggcaggaaaagaagtccaacaccatcctgggcagccaggaaggcaacaccatgaagaccaacgacacctacatgaagttcagctggctgaccgtgcccgagaagtccctggacaaagaacacagatgcatcgtgcggcacgaaaacaacaagaacggcgtggaccaggaaatcatcttcccacccatcaagaccgatgtgattacaatggaccccaaggacaactgctccaaggacgccaacgataccctgctgctccagctgaccaacaccagcgccaccatcctgtacgagatcctgctgggcaaggccaccctgtacgccgtgctggtgtctgccctggtgctgatggctatggtcaagcggaaggacagccggggaagggccaagcgatctggatctggagcaacaaacttctcactactcaaacaagcaggtgacgtggaggagaatcccgggcctactagtatggactggatttggcgcatccttttccttgtcggcgctgctaccggcgcgcattccttcgaagaagttcagctggttgaaagtggtggcggcctggttcaacctggcggatctctgagactgagctgtgccgccagcggcttcaatgtgtacgcctctggaatgcactgggtccgacaggcccctggcaaaggacttgagtgggtcgccaaaatctaccccgacagcgactacacctattacgccgacagcgtgaagggcagattcaccatcagcgccgacaccagcaagaacaccgcctacctccagatgaactccctgagagccgaggacaccgccgtgtactactgtagcagagacagcagcttctactacgtgtacgctatggactactggggccagggcacactggtcacagtctcttctacgcgtagccagcctcacaccaagcccagcgtgttcgtgatgaagaacggcaccaacgtggcctgcctcgtgaaagagttctaccccaaggacatcaggatcaacctggtgtccagcaagaagatcaccgagttcgaccccgccatcgtgatctcccccagcggcaagtacaacgccgtgaagctggggaagtacgaggacagcaacagcgtgacctgctccgtgcagcacgacaacaagaccgtgcacagcaccgactttgaagtgaaaaccgactccaccgaccacgtgaagcccaaagagacagagaacaccaagcagcccagcaagagctgccacaagcccaaggccatcgtgcacaccgagaaagtgaacatgatgagcctgaccgtgctgggcttcagaatcctgctgctgaaagtggccggctttaacctgctgatgaccctgcggctgtggtccagctaa

SEQ ID NO: 39237 - DNA, 1875 bp, synthetic construct
  source 1..1875: mol_type = other DNA
atggccttaccagtgaccgccttgctcctgccgctggccttgctgctccacgccgccaggccggacatccagatgacacagagccctagcagcctgtctgccagcgtgggagacagagtgaccatcacctgtagagccagccaggacatcaacacagccgtggcttggtatcagcagaagcctggcaaggcccctaagctgctgatctacagcgcctacttcctgtacagcggcgtgcccagcagattcagcggaagcagaagcggcaccgacttcaccctgacaatatccagcctccagcctgaggacttcgccacctactactgccagcagtacagcagatacagccccgtgacctttggacagggcaccaaggtggaaatcaagagactcgaggacctgaagaacgtgttcccacctgaggtggccgtgttcgagcctagcgaggccgagatcagccacacccagaaagccaccctcgtgtgcctggctaccggcttctaccccgaccatgtggaactgtcttggtgggtcaacggcaaagaggtgcacagcggcgtgtgtaccgacccccagccactgaaagaacagcccgccctgaacgacagccggtactgcctgagcagcagactgagagtgtccgccaccttctggcagaacccccggaaccacttcagatgccaggtgcagttctacggcctgagcgagaacgacgagtggacccaggacagagccaagcccgtgacccagatcgtgtctgccgaagcctggggcagagccgattgcggctttaccagcgagagctaccagcagggcgtgctgagcgccaccatcctgtacttgttgctgctgctgaagtccgtggtgtacttcgccatcatcacatgctgcctgctgcggagaaccgccttctgctgcaacggcgagaagtctagggccaagcgatctggatctggagcaacaaacttctcactactcaaacaagcaggtgacgtggaggagaatcccgggcctactagtatggactggatttggcgcatccttttccttgtcggcgctgctaccggcgcgcattccttcgaagaagttcagctggttgaaagtggtggcggcctggttcaacctggcggatctctgagactgagctgtgccgccagcggcttcaatgtgtacgcctctggaatgcactgggtccgacaggcccctggcaaaggacttgagtgggtcgccaaaatctaccccgacagcgactacacctattacgccgacagcgtgaagggcagattcaccatcagcgccgacaccagcaagaacaccgcctacctccagatgaactccctgagagccgaggacaccgccgtgtactactgtagcagagacagcagcttctactacgtgtacgctatggactactggggccagggcacactggtcacagtctcttctacgcgtatccagaaccctgatcctgccgtgtaccagctgcgggatagcaagagcagcgacaagagcgtgtgtctgttcaccgacttcgacagccagaccaacgtgtcccagagcaaggactccgacgtgtacatcaccgataagtgcgtgctggacatgcggagcatggacttcaagagcaactccgccgtggcctggtccaacaagtccgatttcgcctgcgccaacgccttcaacaacagcattatccccgaggacacattcttcccaagccccgagagcagctgcgacgtgaagctggtggaaaagagcttcgagacagacaccaacctgaacttccagaacctgagcgtgatcggcctgcggatgctgttcgccaaaaccgtggccgtgaacttcctgctgaccgccaagctgttcttcctctaa

SEQ ID NO: 39238 - DNA, 1962 bp, synthetic construct
  source 1..1962: mol_type = other DNA
atggccttaccagtgaccgccttgctcctgccgctggccttgctgctccacgccgccaggccggacatccagatgacacagagccctagcagcctgtctgccagcgtgggagacagagtgaccatcacctgtagagccagccaggacatcaacacagccgtggcttggtatcagcagaagcctggcaaggcccctaagctgctgatctacagcgcctacttcctgtacagcggcgtgcccagcagattcagcggaagcagaagcggcaccgacttcaccctgacaatatccagcctccagcctgaggacttcgccacctactactgccagcagtacagcagatacagccccgtgacctttggacagggcaccaaggtggaaatcaagagactcgaggacctgaagaacgtgttcccacctgaggtggccgtgttcgagcctagcgaggccgagatcagccacacccagaaagccaccctcgtgtgcctggctaccggcttctaccccgaccatgtggaactgtcttggtgggtcaacggcaaagaggtgcacagcggcgtgtctaccgacccccagccactgaaagaacagcccgccctgaacgacagccggtactgcctgagcagcagactgagagtgtccgccaccttctggcagaacccccggaaccacttcagatgccaggtgcagttctacggcctgagcgagaacgacgagtggacccaggacagagccaagcccgtgacccagatcgtgtctgccgaagcctggggcagagccgattgcggatcctccaaggacgccaacgataccctgctgctccagctgaccaacaccagcgcctactacatgtacttgttgctgctgctgaagtccgtggtgtacttcgccatcatcacatgctgcctgctgcggagaaccgccttctgctgcaacggcgagaagtctagggccaagcgatctggatctggagcaacaaacttctcactactcaaacaagcaggtgacgtggaggagaatcccgggcctactagtatggactggatttggcgcatccttttccttgtcggcgctgctaccggcgcgcattccttcgaagaagttcagctggttgaaagtggtggcggcctggttcaacctggcggatctctgagactgagctgtgccgccagcggcttcaatgtgtacgcctctggaatgcactgggtccgacaggcccctggcaaaggacttgagtgggtcgccaaaatctaccccgacagcgactacacctattacgccgacagcgtgaagggcagattcaccatcagcgccgacaccagcaagaacaccgcctacctccagatgaactccctgagagccgaggacaccgccgtgtactactgtagcagagacagcagcttctactacgtgtacgctatggactactggggccagggcacactggtcacagtctcttctacgcgtatccagaaccctgatcctgccgtgtaccagctgcgggatagcaagagcagcgacaagagcgtgtgtctgttcaccgacttcgacagccagaccaacgtgtcccagagcaaggactccgacgtgtacatcaccgataagaccgtgctggacatgcggagcatggacttcaagagcaactccgccgtggcctggtccaacaagtccgatttcgcctgcgccaacgccttcaacaacagcattatccccgaggacacattcttcccaagccccgagagcagctgcggtaccgaagtgaaaaccgactccaccgaccacgtgaagcccaaagagacagagaacaccaagcagcccagcaagagctgccacaagcccaaggccatcgtgcacaccgagaaagtgaacatgatgagcctgaccgtgctgggcctgcggatgctgttcgccaaaaccgtggccgtgaacttcctgctgaccgccaagctgttcttcctctaa

SEQ ID NO: 39239 - DNA, 1872 bp, synthetic construct
  source 1..1872: mol_type = other DNA
atggccttaccagtgaccgccttgctcctgccgctggccttgctgctccacgccgccaggccggacatccagatgacacagagccctagcagcctgtctgccagcgtgggagacagagtgaccatcacctgtagagccagccaggacatcaacacagccgtggcttggtatcagcagaagcctggcaaggcccctaagctgctgatctacagcgcctacttcctgtacagcggcgtgcccagcagattcagcggaagcagaagcggcaccgacttcaccctgacaatatccagcctccagcctgaggacttcgccacctactactgccagcagtacagcagatacagccccgtgacctttggacagggcaccaaggtggaaatcaagagactcgaggacctgaagaacgtgttcccacctgaggtggccgtgttcgagcctagcgaggccgagatcagccacacccagaaagccaccctcgtgtgcctggctaccggcttctaccccgaccatgtggaactgtcttggtgggtcaacggcaaagaggtgcacagcggcgtgtgtaccgacccccagccactgaaagaacagcccgccctgaacgacagccggtactgcctgagcagcagactgagagtgtccgccaccttctggcagaacccccggaaccacttcagatgccaggtgcagttctacggcctgagcgagaacgacgagtggacccaggacagagccaagcccgtgacccagatcgtgtctgccgaagcctggggcagagccgattgcgacgtgaagctggtggaaaagagcttcgagacagacaccaacctgaacttccagaacctgagcgtgatcggcttcagaatcctgctgctgaaagtggccggctttaacctgctgatgaccctgcggctgtggtccagcagggccaagcgatctggatctggagcaacaaacttctcactactcaaacaagcaggtgacgtggaggagaatcccgggcctactagtatggactggatttggcgcatccttttccttgtcggcgctgctaccggcgcgcattccttcgaagaagttcagctggttgaaagtggtggcggcctggttcaacctggcggatctctgagactgagctgtgccgccagcggcttcaatgtgtacgcctctggaatgcactgggtccgacaggcccctggcaaaggacttgagtgggtcgccaaaatctaccccgacagcgactacacctattacgccgacagcgtgaagggcagattcaccatcagcgccgacaccagcaagaacaccgcctacctccagatgaactccctgagagccgaggacaccgccgtgtactactgtagcagagacagcagcttctactacgtgtacgctatggactactggggccagggcacactggtcacagtctcttctacgcgtatccagaaccctgatcctgccgtgtaccagctgcgggatagcaagagcagcgacaagagcgtgtgtctgttcaccgacttcgacagccagaccaacgtgtcccagagcaaggactccgacgtgtacatcaccgataagtgcgtgctggacatgcggagcatggacttcaagagcaactccgccgtggcctggtccaacaagtccgatttcgcctgcgccaacgccttcaacaacagcattatccccgaggacacattcttcccaagccccgagagcagctgcggctttaccagcgagagctaccagcagggcgtgctgagcgccaccatcctgtacgagatcctgctgggcaaggccaccctgtacgccgtgctggtgtctgccctggtgctgatggctatggtcaagcggaaggacagccggggataa

SEQ ID NO: 39240 - DNA, 1872 bp, synthetic construct
  source 1..1872: mol_type = other DNA
atggccttaccagtgaccgccttgctcctgccgctggccttgctgctccacgccgccaggccggacatccagatgacacagagccctagcagcctgtctgccagcgtgggagacagagtgaccatcacctgtagagccagccaggacatcaacacagccgtggcttggtatcagcagaagcctggcaaggcccctaagctgctgatctacagcgcctacttcctgtacagcggcgtgcccagcagattcagcggaagcagaagcggcaccgacttcaccctgacaatatccagcctccagcctgaggacttcgccacctactactgccagcagtacagcagatacagccccgtgacctttggacagggcaccaaggtggaaatcaagagactcgaggacctgaagaacgtgttcccacctgaggtggccgtgttcgagcctagcgaggccgagatcagccacacccagaaagccaccctcgtgtgcctggctaccggcttctaccccgaccatgtggaactgtcttggtgggtcaacggcaaagaggtgcacagcggcgtgtgtaccgacccccagccactgaaagaacagcccgccctgaacgacagccggtactgcctgagcagcagactgagagtgtccgccaccttctggcagaacccccggaaccacttcagatgccaggtgcagttctacggcctgagcgagaacgacgagtggacccaggacagagccaagcccgtgacccagatcgtgtctgccgaagcctggggcagagccgattgcggctttaccagcgagagctaccagcagggcgtgctgagcgccaccaacctgagcgtgatcggcttcagaatcctgctgctgaaagtggccggctttaacctgctgatgaccctgcggctgtggtccagcagggccaagcgatctggatctggagcaacaaacttctcactactcaaacaagcaggtgacgtggaggagaatcccgggcctactagtatggactggatttggcgcatccttttccttgtcggcgctgctaccggcgcgcattccttcgaagaagttcagctggttgaaagtggtggcggcctggttcaacctggcggatctctgagactgagctgtgccgccagcggcttcaatgtgtacgcctctggaatgcactgggtccgacaggcccctggcaaaggacttgagtgggtcgccaaaatctaccccgacagcgactacacctattacgccgacagcgtgaagggcagattcaccatcagcgccgacaccagcaagaacaccgcctacctccagatgaactccctgagagccgaggacaccgccgtgtactactgtagcagagacagcagcttctactacgtgtacgctatggactactggggccagggcacactggtcacagtctcttctacgcgtatccagaaccctgatcctgccgtgtaccagctgcgggatagcaagagcagcgacaagagcgtgtgtctgttcaccgacttcgacagccagaccaacgtgtcccagagcaaggactccgacgtgtacatcaccgataagtgcgtgctggacatgcggagcatggacttcaagagcaactccgccgtggcctggtccaacaagtccgatttcgcctgcgccaacgccttcaacaacagcattatccccgaggacacattcttcccaagccccgagagcagctgcgacgtgaagctggtggaaaagagcttcgagacagacaccaacctgaacttccagatcctgtacgagatcctgctgggcaaggccaccctgtacgccgtgctggtgtctgccctggtgctgatggctatggtcaagcggaaggacagccggggataa

SEQ ID NO: 39241 - DNA, 1872 bp, synthetic construct; identical to SEQ ID NO: 39239
  source 1..1872: mol_type = other DNA

SEQ ID NO: 39242 - DNA, 1872 bp, synthetic construct; identical to SEQ ID NO: 39240
  source 1..1872: mol_type = other DNA

SEQ ID NO: 39243 - DNA, 1869 bp, synthetic construct
  source 1..1869: mol_type = other DNA
atggccttaccagtgaccgccttgctcctgccgctggccttgctgctccacgccgccaggccggacatccagatgacacagagccctagcagcctgtctgccagcgtgggagacagagtgaccatcacctgtagagccagccaggacatcaacacagccgtggcttggtatcagcagaagcctggcaaggcccctaagctgctgatctacagcgcctacttcctgtacagcggcgtgcccagcagattcagcggaagcagaagcggcaccgacttcaccctgacaatatccagcctccagcctgaggacttcgccacctactactgccagcagtacagcagatacagccccgtgacctttggacagggcaccaaggtggaaatcaagagactcgaggacctgaagaacgtgttcccacctgaggtggccgtgttcgagcctagcgaggccgagatcagccacacccagaaagccaccctcgtgtgcctggctaccggcttctaccccgaccatgtggaactgtcttggtgggtcaacggcaaagaggtgcacagcggcgtgtgtaccgacccccagccactgaaagaacagcccgccctgaacgacagccggtactgcctgagcagcagactgagagtgtccgccaccttctggcagaacccccggaaccacttcagatgccaggtgcagttctacggcctgagcgagaacgacgagtggacccaggacagagccaagcccgtgacccagatcgtgtctgccgaagcctggggcagagccgattgcgacgtgaagctggtggaaaagagcttcgagacagacaccaacctgaacttccagaacctgagcgtgatcggcttcagaatcctgctgctgaaagtggccggctttaacctgctgatgaccctgcggctgtggtccagcagggccaagcgatctggatctggagcaacaaacttctcactactcaaacaagcaggtgacgtggaggagaatcccgggcctactagtatggactggatttggcgcatccttttccttgtcggcgctgctaccggcgcgcattccttcgaagaagttcagctggttgaaagtggtggcggcctggttcaacctggcggatctctgagactgagctgtgccgccagcggcttcaatgtgtacgcctctggaatgcactgggtccgacaggcccctggcaaaggacttgagtgggtcgccaaaatctaccccgacagcgactacacctattacgccgacagcgtgaagggcagattcaccatcagcgccgacaccagcaagaacaccgcctacctccagatgaactccctgagagccgaggacaccgccgtgtactactgtagcagagacagcagcttctactacgtgtacgctatggactactggggccagggcacactggtcacagtctcttctacgcgtatccagaaccctgatcctgccgtgtaccagctgcgggatagcaagagcagcgacaagagcgtgtgtctgttcaccgacttcgacagccagaccaacgtgtcccagagcaaggactccgacgtgtacatcaccgataagtgcgtgctggacatgcggagcatggacttcaagagcaactccgccgtggcctggtccaacaagtccgatttcgcctgcgccaacgccttcaacaacagcattatccccgaggacacattcttcccaagccccgagagcagctgcggctttaccagcgagagctaccagcagggcgtgctgagcgccaccatcctgtacgagatcctgctgggcaaggccaccctgtacgccgtgctggtgtctgccctggtgctgatggctatggtcaagcggaaggacagccgggga

SEQ ID NO: 39244 - DNA, 1881 bp, synthetic construct
  source 1..1881: mol_type = other DNA
atggccttaccagtgaccgccttgctcctgccgctggccttgctgctccacgccgccaggccggacatccagatgacacagagccctagcagcctgtctgccagcgtgggagacagagtgaccatcacctgtagagccagccaggacatcaacacagccgtggcttggtatcagcagaagcctggcaaggcccctaagctgctgatctacagcgcctacttcctgtacagcggcgtgcccagcagattcagcggaagcagaagcggcaccgacttcaccctgacaatatccagcctccagcctgaggacttcgccacctactactgccagcagtacagcagatacagccccgtgacctttggacagggcaccaaggtggaaatcaagagactcgaggccgacgtgtcccccaagcctaccatcttcctgccctctatcgccgagacaaagctccagaaggccggcacctacctgtgcctgctggaaaagttcttcccagatgtgattaagatccactggcaggaaaagaagtccaacaccatcctgggcagccaggaaggcaacaccatgaagaccaacgacacctacatgaagttcagctggctgaccgtgcccgagaagtccctggacaaagaacacagatgcatcgtgcggcacgaaaacaacaagaacggcgtggaccaggaaatcatcttcccacccatcaagaccgatgtgattacaatggaccccaaggacaactgctccaaggacgccaacgataccctgctgctccagctgaccaacaccagcgcctactacatgtacttgttgctgctgctgaagtccgtggtgtacttcgccatcatcacatgctgcctgctgcggagaaccgccttctgctgcaacggcgagaagtctagggccaagcgatctggatctggagcaacaaacttctcactactcaaacaagcaggtgacgtggaggagaatcccgggcctactagtatggactggatttggcgcatccttttccttgtcggcgctgctaccggcgcgcattccttcgaagaagttcagctggttgaaagtggtggcggcctggttcaacctggcggatctctgagactgagctgtgccgccagcggcttcaatgtgtacgcctctggaatgcactgggtccgacaggcccctggcaaaggacttgagtgggtcgccaaaatctaccccgacagcgactacacctattacgccgacagcgtgaagggcagattcaccatcagcgccgacaccagcaagaacaccgcctacctccagatgaactccctgagagccgaggacaccgccgtgtactactgtagcagagacagcagcttctactacgtgtacgctatggactactggggccagggcacactggtcacagtctcttctacgcgtagccagcctcacaccaagcccagcgtgttcgtgatgaagaacggcaccaacgtggcctgcctcgtgaaagagttctaccccaaggacatcaggatcaacctggtgtccagcaagaagatcaccgagttcgaccccgccatcgtgatctcccccagcggcaagtacaacgccgtgaagctggggaagtatgaggacagcaacagcgtgacctgctccgtgcagcacgacaacaagaccgtgcacagcaccgactttgaagtgaaaaccgactccaccgaccacgtgaagcccaaagagacagagaacaccaagcagcccagcaagagctgccacaagcccaaggccatcgtgcacaccgagaaagtgaacatgatgagcctgaccgtgatcggcttcagaatcctgctgctgaaagtggccggctttaacctgctgatgaccctgcggctgtggtccagctaa

SEQ ID NO: 39245 - DNA, 1881 bp, synthetic construct
  source 1..1881: mol_type = other DNA
atggccttaccagtgaccgccttgctcctgccgctggccttgctgctccacgccgccaggccggacatccagatgacacagagccctagcagcctgtctgccagcgtgggagacagagtgaccatcacctgtagagccagccaggacatcaacacagccgtggcttggtatcagcagaagcctggcaaggcccctaagctgctgatctacagcgcctacttcctgtacagcggcgtgcccagcagattcagcggaagcagaagcggcaccgacttcaccctgacaatatccagcctccagcctgaggacttcgccacctactactgccagcagtacagcagatacagccccgtgacctttggacagggcaccaaggtggaaatcaagagactcgaggccgacgtgtcccccaagcctaccatcttcctgccctctatcgccgagacaaagctccagaaggccggcacctacctgtgcctgctggaaaagttcttcccagatgtgattaagatccactggcaggaaaagaagtccaacaccatcctgggcagccaggaaggcaacaccatgaagaccaacgacacctacatgaagttcagctggctgaccgtgcccgagaagtccctggacaaagaacacagatgcatcgtgcggcacgaaaacaacaagaacggcgtggaccaggaaatcatcttcccacccatcaagaccgatgtgattacaatggaccccaaggacaactgctccaaggacgccaacgataccctgctgctccagctgaccaacaccagcgcctactacatgtacttgttgctgctgctgaagtccgtggtgtacttcgccatcatcacatgctgcctgctgcggagaaccgccttctgctgcaacggcgagaagtctagggccaagcgatctggatctggagcaacaaacttctcactactcaaacaagcaggtgacgtggaggagaatcccgggcctactagtatggactggatttggcgcatccttttccttgtcggcgctgctaccggcgcgcattccttcgaagaagttcagctggttgaaagtggtggcggcctggttcaacctggcggatctctgagactgagctgtgccgccagcggcttcaatgtgtacgcctctggaatgcactgggtccgacaggcccctggcaaaggacttgagtgggtcgccaaaatctaccccgacagcgactacacctattacgccgacagcgtgaagggcagattcaccatcagcgccgacaccagcaagaacaccgcctacctccagatgaactccctgagagccgaggacaccgccgtgtactactgtagcagagacagcagcttctactacgtgtacgctatggactactggggccagggcacactggtcacagtctcttctacgcgtagccagcctcacaccaagcccagcgtgttcgtgatgaagaacggcaccaacgtggcctgcctcgtgaaagagttctaccccaaggacatcaggatcaacctggtgtccagcaagaagatcaccgagttcgaccccgccatcgtgatctcccccagcggcaagtacaacgccgtgaagctggggaagtacgaggacagcaacagcgtgacctgctccgtgcagcacgacaacaagaccgtgcacagcaccgactttgaagtgaaaaccgactccaccgaccacgtgaagcccaaagagacagagaacaccaagcagcccagcaagagctgccacaagcccaaggccatcgtgcacaccgagaaagtgaacatgatgagcctgaccgtgctgggcttcagaatcctgctgctgaaagtggccggctttaacctgctgatgaccctgcggctgtggtccagctaa

SEQ ID NO: 39246 - DNA, 1869 bp, synthetic construct; identical to SEQ ID NO: 39243
  source 1..1869: mol_type = other DNA

SEQ ID NO: 39247 - DNA, 1881 bp, synthetic construct
  source 1..1881: mol_type = other DNA
atggccttaccagtgaccgccttgctcctgccgctggccttgctgctccacgccgccaggccggacatccagatgacacagagccctagcagcctgtctgccagcgtgggagacagagtgaccatcacctgtagagccagccaggacatcaacacagccgtggcttggtatcagcagaagcctggcaaggcccctaagctgctgatctacagcgcctacttcctgtacagcggcgtgcccagcagattcagcggaagcagaagcggcaccgacttcaccctgacaatatccagcctccagcctgaggacttcgccacctactactgccagcagtacagcagatacagccccgtgacctttggacagggcaccaaggtggaaatcaagagactcgagatccagaaccctgatcctgccgtgtaccagctgcgggatagcaagagcagcgacaagagcgtgtgtctgttcaccgacttcgacagccagaccaacgtgtcccagagcaaggactccgacgtgtacatcaccgataagtgcgtgctggacatgcggagcatggacttcaagagcaactccgccgtggcctggtccaacaagtccgatttcgcctgcgccaacgccttcaacaacagcattatccccgaggacacattcttcccaagccccgagagcagctgcggctttaccagcgagagctaccagcagggcgtgctgagcgccaccatcctgtacgagatcctgctgggcaaggccaccctgtacgccgtgctggtgtctgccctggtgctgatggctatggtcaagcggaaggacagccggggacgcgccaagagaagcggatctggcgtgaagcagaccctgaatttcgacctgctgaagctggctggcgacgtggaatccaacccaggccctactagtatggactggatttggcgcatccttttccttgtcggcgctgctaccggcgcgcattccttcgaagaagttcagctggttgaaagtggtggcggcctggttcaacctggcggatctctgagactgagctgtgccgccagcggcttcaatgtgtacgcctctggaatgcactgggtccgacaggcccctggcaaaggacttgagtgggtcgccaaaatctaccccgacagcgactacacctattacgccgacagcgtgaagggcagattcaccatcagcgccgacaccagcaagaacaccgcctacctccagatgaactccctgagagccgaggacaccgccgtgtactactgtagcagagacagcagcttctactacgtgtacgctatggactactggggccagggcacactggtcacagtctcttctacgcgtgaggacctgaagaacgtgttcccacctgaggtggccgtgttcgagcctagcgaggccgagatcagccacacccagaaagccaccctcgtgtgcctggctaccggcttctaccccgaccatgtggaactgtcttggtgggtcaacggcaaagaggtgcacagcggcgtgtgtaccgacccccagccactgaaagaacagcccgccctgaacgacagccggtactgcctgagcagcagactgagagtgtccgccaccttctggcagaacccccggaaccacttcagatgccaggtgcagttctacggcctgagcgagaacgacgagtggacccaggacagagccaagcccgtgacccagatcgtgtctgccgaagcctggggcagagccgattgcgacgtgaagctggtggaaaagagcttcgagacagacaccaacctgaacttccagaacctgagcgtgatcggcttcagaatcctgctgctgaaagtggccggctttaacctgctgatgaccctgcggctgtggtccagc

SEQ ID NO: 39248 - DNA, 2274 bp, synthetic construct
  source 1..2274: mol_type = other DNA
atggccttaccagtgaccgccttgctcctgccgctggccttgctgctccacgccgccaggccggaagtgcagctggttgaatctggcggaggactggttcagcctggcggatctctgagactgtcttgtgccgccagcggcttcagcttcagcgacttttggatgagctgggtccgacaggcccctggcaaaggacttgaatgggtcgccacaatcagccaggccggcagcgagaaggactacgtggactctgtgaagggcagattcaccatcagccgggacaacgccaagaagtccctgtacctccagatgaacagcctgagagccgaggacaccgccgtgtactattgtgcctctggcgtgtacagcttcgactacagaggccagggcaccctggtcacagtctcttctggtaccggcggaggcggatctggcggcggaggtagcggtggcggaggatctgaattcgacatccagatgacacagagccctagcagcctgtctgccagcgtgggagacagagtgaccatcacctgtagagccagccaggacatcaacacagccgtggcttggtatcagcagaagcctggcaaggcccctaagctgctgatctacagcgcctacttcctgtacagcggcgtgcccagcagattcagcggaagcagaagcggcaccgacttcaccctgacaatatccagcctccagcctgaggacttcgccacctactactgccagcagtacagcagatacagccccgtgacctttggacagggcaccaaggtggaaatcaagagactcgaggacctgaagaacgtgttcccacctgaggtggccgtgttcgagcctagcgaggccgagatcagccacacccagaaagccaccctcgtgtgcctggctaccggcttctaccccgaccatgtggaactgtcttggtgggtcaacggcaaagaggtgcacagcggcgtgtgtaccgacccccagccactgaaagaacagcccgccctgaacgacagccggtactgcctgagcagcagactgagagtgtccgccaccttctggcagaacccccggaaccacttcagatgccaggtgcagttctacggcctgagcgagaacgacgagtggacccaggacagagccaagcccgtgacccagatcgtgtctgccgaagcctggggcagagccgattgcgacgtgaagctggtggaaaagagcttcgagacagacaccaacctgaacttccagaacctgagcgtgatcggcttcagaatcctgctgctgaaagtggccggctttaacctgctgatgaccctgcggctgtggtccagcagggccaagcgatctggatctggagcaacaaacttctcactactcaaacaagcaggtgacgtggaggagaatcccgggcctactagtatggactggatttggcgcatccttttccttgtcggcgctgctaccggcgcgcattccttcgaagaagttcagctggttgaaagtggtggcggcctggttcaacctggcggatctctgagactgagctgtgccgccagcggcttcaatgtgtacgcctctggaatgcactgggtccgacaggcccctggcaaaggacttgagtgggtcgccaaaatctaccccgacagcgactacacctattacgccgacagcgtgaagggcagattcaccatcagcgccgacaccagcaagaacaccgcctacctccagatgaactccctgagagccgaggacaccgccgtgtactactgtagcagagacagcagcttctactacgtgtacgctatggactactggggccagggcacactggtcacagtctcttctacgcgtatccagaaccctgatcctgccgtgtaccagctgcgggatagcaagagcagcgacaagagcgtgtgtctgttcaccgacttcgacagccagaccaacgtgtcccagagcaaggactccgacgtgtacatcaccgataagtgcgtgctggacatgcggagcatggacttcaagagcaactccgccgtggcctggtccaacaagtccgatttcgcctgcgccaacgccttcaacaacagcattatccccgaggacacattcttcccaagccccgagagcagctgcggctttaccagcgagagctaccagcagggcgtgctgagcgccaccatcctgtacgagatcctgctgggcaaggccaccctgtacgccgtgctggtgtctgccctggtgctgatggctatggtcaagcggaaggacagccgggga

SEQ ID NO: 39249 - DNA, 2286 bp, synthetic construct
  source 1..2286: mol_type = other DNA
atggccttaccagtgaccgccttgctcctgccgctggccttgctgctccacgccgccaggccggaagtgcagctggttgaatctggcggaggactggttcagcctggcggatctctgagactgtcttgtgccgccagcggcttcagcttcagcgacttttggatgagctgggtccgacaggcccctggcaaaggacttgaatgggtcgccacaatcagccaggccggcagcgagaaggactacgtggactctgtgaagggcagattcaccatcagccgggacaacgccaagaagtccctgtacctccagatgaacagcctgagagccgaggacaccgccgtgtactattgtgcctctggcgtgtacagcttcgactacagaggccagggcaccctggtcacagtctcttctggtaccggcggaggcggatctggcggcggaggtagcggtggcggaggatctgaattcgacatccagatgacacagagccctagcagcctgtctgccagcgtgggagacagagtgaccatcacctgtagagccagccaggacatcaacacagccgtggcttggtatcagcagaagcctggcaaggcccctaagctgctgatctacagcgcctacttcctgtacagcggcgtgcccagcagattcagcggaagcagaagcggcaccgacttcaccctgacaatatccagcctccagcctgaggacttcgccacctactactgccagcagtacagcagatacagccccgtgacctttggacagggcaccaaggtggaaatcaagagactcgagatccagaaccctgatcctgccgtgtaccagctgcgggatagcaagagcagcgacaagagcgtgtgtctgttcaccgacttcgacagccagaccaacgtgtcccagagcaaggactccgacgtgtacatcaccgataagtgcgtgctggacatgcggagcatggacttcaagagcaactccgccgtggcctggtccaacaagtccgatttcgcctgcgccaacgccttcaacaacagcattatccccgaggacacattcttcccaagccccgagagcagctgcggctttaccagcgagagctaccagcagggcgtgctgagcgccaccatcctgtacgagatcctgctgggcaaggccaccctgtacgccgtgctggtgtctgccctggtgctgatggctatggtcaagcggaaggacagccggggacgcgccaagagaagcggatctggcgtgaagcagaccctgaatttcgacctgctgaagctggctggcgacgtggaatccaacccaggccctactagtatggactggatttggcgcatccttttccttgtcggcgctgctaccggcgcgcattccttcgaagaagttcagctggttgaaagtggtggcggcctggttcaacctggcggatctctgagactgagctgtgccgccagcggcttcaatgtgtacgcctctggaatgcactgggtccgacaggcccctggcaaaggacttgagtgggtcgccaaaatctaccccgacagcgactacacctattacgccgacagcgtgaagggcagattcaccatcagcgccgacaccagcaagaacaccgcctacctccagatgaactccctgagagccgaggacaccgccgtgtactactgtagcagagacagcagcttctactacgtgtacgctatggactactggggccagggcacactggtcacagtctcttctacgcgtgaggacctgaagaacgtgttcccacctgaggtggccgtgttcgagcctagcgaggccgagatcagccacacccagaaagccaccctcgtgtgcctggctaccggcttctaccccgaccatgtggaactgtcttggtgggtcaacggcaaagaggtgcacagcggcgtgtgtaccgacccccagccactgaaagaacagcccgccctgaacgacagccggtactgcctgagcagcagactgagagtgtccgccaccttctggcagaacccccggaaccacttcagatgccaggtgcagttctacggcctgagcgagaacgacgagtggacccaggacagagccaagcccgtgacccagatcgtgtctgccgaagcctggggcagagccgattgcgacgtgaagctggtggaaaagagcttcgagacagacaccaacctgaacttccagaacctgagcgtgatcggcttcagaatcctgctgctgaaagtggccggctttaacctgctgatgaccctgcggctgtggtccagc

SEQ ID NO: 39250 - DNA, 2685 bp, synthetic construct
  source 1..2685: mol_type = other DNA
atggccttaccagtgaccgccttgctcctgccgctggccttgctgctccacgccgccaggccggaagtgcagctggttgaatctggcggaggactggttcagcctggcggatctctgagactgtcttgtgccgccagcggcttcagcttcagcgacttttggatgagctgggtccgacaggcccctggcaaaggacttgaatgggtcgccacaatcagccaggccggcagcgagaaggactacgtggactctgtgaagggcagattcaccatcagccgggacaacgccaagaagtccctgtacctccagatgaacagcctgagagccgaggacaccgccgtgtactattgtgcctctggcgtgtacagcttcgactacagaggccagggcaccctggtcacagtctcttctggtaccggcggaggcggatctggcggcggaggtagcggtggcggaggatctgaattcgacatccagatgacacagagccctagcagcctgtctgccagcgtgggagacagagtgaccatcacctgtagagccagccaggacatcaacacagccgtggcttggtatcagcagaagcctggcaaggcccctaagctgctgatctacagcgcctacttcctgtacagcggcgtgcccagcagattcagcggaagcagaagcggcaccgacttcaccctgacaatatccagcctccagcctgaggacttcgccacctactactgccagcagtacagcagatacagccccgtgacctttggacagggcaccaaggtggaaatcaagagactcgaggacctgaagaacgtgttcccacctgaggtggccgtgttcgagcctagcgaggccgagatcagccacacccagaaagccaccctcgtgtgcctggctaccggcttctaccccgaccatgtggaactgtcttggtgggtcaacggcaaagaggtgcacagcggcgtgtgtaccgacccccagccactgaaagaacagcccgccctgaacgacagccggtactgcctgagcagcagactgagagtgtccgccaccttctggcagaacccccggaaccacttcagatgccaggtgcagttctacggcctgagcgagaacgacgagtggacccaggacagagccaagcccgtgacccagatcgtgtctgccgaagcctggggcagagccgattgcgacgtgaagctggtggaaaagagcttcgagacagacaccaacctgaacttccagaacctgagcgtgatcggcttcagaatcctgctgctgaaagtggccggctttaacctgctgatgaccctgcggctgtggtccagcagggccaagcgatctggatctggagcaacaaacttctcactactcaaacaagcaggtgacgtggaggagaatcccgggcctactagtatggactggatttggcgcatccttttccttgtcggcgctgctaccggcgcgcattccgggccccagctccagctgcaagagtctggacctggcctggtcaagcctagcgagacactgagcctgacctgtaccgtgtccggcgatagcatcagcagcggcgattactactggggctggatcagacagcctcctggcaaaggactggaatggatcggccacatctactacagcggcgtgacctactacaaccccagcctgaagtccagagtgaccatcagcgtggacaccagccggaaccagttctccctgaagctgtctagcgtgacagccgccgataccgccgtgtactactgcaccagagaggacagcagcaactggcggagtagaggccagggaacactggtcacagttagctctggatccggcggaggcggaagtggaggcggaggatctggcggcggaggctctttcgaagaagttcagctggttgaaagtggtggcggcctggttcaacctggcggatctctgagactgagctgtgccgccagcggcttcaatgtgtacgcctctggaatgcactgggtccgacaggcccctggcaaaggacttgagtgggtcgccaaaatctaccccgacagcgactacacctattacgccgacagcgtgaagggcagattcaccatcagcgccgacaccagcaagaacaccgcctacctccagatgaactccctgagagccgaggacaccgccgtgtactactgtagcagagacagcagcttctactacgtgtacgctatggactactggggccagggcacactggtcacagtctcttctacgcgtatccagaaccctgatcctgccgtgtaccagctgcgggatagcaagagcagcgacaagagcgtgtgtctgttcaccgacttcgacagccagaccaacgtgtcccagagcaaggactccgacgtgtacatcaccgataagtgcgtgctggacatgcggagcatggacttcaagagcaactccgccgtggcctggtccaacaagtccgatttcgcctgcgccaacgccttcaacaacagcattatccccgaggacacattcttcccaagccccgagagcagctgcggctttaccagcgagagctaccagcagggcgtgctgagcgccaccatcctgtacgagatcctgctgggcaaggccaccctgtacgccgtgctggtgtctgccctggtgctgatggctatggtcaagcggaaggacagccgggga

SEQ ID NO: 39251 - DNA, 2697 bp, synthetic construct
  source 1..2697: mol_type = other DNA
atggccttaccagtgaccgccttgctcctgccgctggccttgctgctccacgccgccaggccggaagtgcagctggttgaatctggcggaggactggttcagcctggcggatctctgagactgtcttgtgccgccagcggcttcagcttcagcgacttttggatgagctgggtccgacaggcccctggcaaaggacttgaatgggtcgccacaatcagccaggccggcagcgagaaggactacgtggactctgtgaagggcagattcaccatcagccgggacaacgccaagaagtccctgtacctccagatgaacagcctgagagccgaggacaccgccgtgtactattgtgcctctggcgtgtacagcttcgactacagaggccagggcaccctggtcacagtctcttctggtaccggcggaggcggatctggcggcggaggtagcggtggcggaggatctgaattcgacatccagatgacacagagccctagcagcctgtctgccagcgtgggagacagagtgaccatcacctgtagagccagccaggacatcaacacagccgtggcttggtatcagcagaagcctggcaaggcccctaagctgctgatctacagcgcctacttcctgtacagcggcgtgcccagcagattcagcggaagcagaagcggcaccgacttcaccctgacaatatccagcctccagcctgaggacttcgccacctactactgccagcagtacagcagatacagccccgtgacctttggacagggcaccaaggtggaaatcaagagactcgagatccagaaccctgatcctgccgtgtaccagctgcgggatagcaagagcagcgacaagagcgtgtgtctgttcaccgacttcgacagccagaccaacgtgtcccagagcaaggactccgacgtgtacatcaccgataagtgcgtgctggacatgcggagcatggacttcaagagcaactccgccgtggcctggtccaacaagtccgatttcgcctgcgccaacgccttcaacaacagcattatccccgaggacacattcttcccaagccccgagagcagctgcggctttaccagcgagagctaccagcagggcgtgctgagcgccaccatcctgtacgagatcctgctgggcaaggccaccctgtacgccgtgctggtgtctgccctggtgctgatggctatggtcaagcggaaggacagccggggacgcgccaagagaagcggatctggcgtgaagcagaccctgaatttcgacctgctgaagctggctggcgacgtggaatccaacccaggccctactagtatggactggatttggcgcatccttttccttgtcggcgctgctaccggcgcgcattccgggccccagctccagctgcaagagtctggacctggcctggtcaagcctagcgagacactgagcctgacctgtaccgtgtccggcgatagcatcagcagcggcgattactactggggctggatcagacagcctcctggcaaaggactggaatggatcggccacatctactacagcggcgtgacctactacaaccccagcctgaagtccagagtgaccatcagcgtggacaccagccggaaccagttctccctgaagctgtctagcgtgacagccgccgataccgccgtgtactactgcaccagagaggacagcagcaactggcggagtagaggccagggaacactggtcacagttagctctggatccggcggaggcggaagtggaggcggaggatctggcggcggaggctctttcgaagaagttcagctggttgaaagtggtggcggcctggttcaacctggcggatctctgagactgagctgtgccgccagcggcttcaatgtgtacgcctctggaatgcactgggtccgacaggcccctggcaaaggacttgagtgggtcgccaaaatctaccccgacagcgactacacctattacgccgacagcgtgaagggcagattcaccatcagcgccgacaccagcaagaacaccgcctacctccagatgaactccctgagagccgaggacaccgccgtgtactactgtagcagagacagcagcttctactacgtgtacgctatggactactggggccagggcacactggtcacagtctcttctacgcgtgaggacctgaagaacgtgttcccacctgaggtggccgtgttcgagcctagcgaggccgagatcagccacacccagaaagccaccctcgtgtgcctggctaccggcttctaccccgaccatgtggaactgtcttggtgggtcaacggcaaagaggtgcacagcggcgtgtgtaccgacccccagccactgaaagaacagcccgccctgaacgacagccggtactgcctgagcagcagactgagagtgtccgccaccttctggcagaacccccggaaccacttcagatgccaggtgcagttctacggcctgagcgagaacgacgagtggacccaggacagagccaagcccgtgacccagatcgtgtctgccgaagcctggggcagagccgattgcgacgtgaagctggtggaaaagagcttcgagacagacaccaacctgaacttccagaacctgagcgtgatcggcttcagaatcctgctgctgaaagtggccggctttaacctgctgatgaccctgcggctgtggtccagc

SEQ ID NO: 39252 - DNA, 2079 bp, synthetic construct
  source 1..2079: mol_type = other DNA
atggccttaccagtgaccgccttgctcctgccgctggccttgctgctccacgccgccaggccggacatccagatgacacagagccctagcagcctgtctgccagcgtgggagacagagtgaccatcacctgtagagccagccaggacatcaacacagccgtggcttggtatcagcagaagcctggcaaggcccctaagctgctgatctacagcgcctacttcctgtacagcggcgtgcccagcagattcagcggaagcagaagcggcaccgacttcaccctgacaatatccagcctccagcctgaggacttcgccacctactactgccagcagtacagcagatacagccccgtgacctttggacagggcaccaaggtggaaatcaagagactcgaggacctgaagaacgtgttcccacctgaggtggccgtgttcgagcctagcgaggccgagatcagccacacccagaaagccaccctcgtgtgcctggctaccggcttctaccccgaccatgtggaactgtcttggtgggtcaacggcaaagaggtgcacagcggcgtgtgtaccgacccccagccactgaaagaacagcccgccctgaacgacagccggtactgcctgagcagcagactgagagtgtccgccaccttctggcagaacccccggaaccacttcagatgccaggtgcagttctacggcctgagcgagaacgacgagtggacccaggacagagccaagcccgtgacccagatcgtgtctgccgaagcctggggcagagccgattgcgacgtgaagctggtggaaaagagcttcgagacagacaccaacctgaacttccagaacctgagcgtgatcggcttcagaatcctgctgctgaaagtggccggctttaacctgctgatgaccctgcggctgtggtccagcagggccaagcgatctggatctggagcaacaaacttctcactactcaaacaagcaggtgacgtggaggagaatcccgggcctactagtatggactggatttggcgcatccttttccttgtcggcgctgctaccggcgcccattccgggcccatggaccccgacctggaaatcagagccgccttcctgcggcagagaaacacagccctgagaacagaggtggccgagctggaacaagaggtgcagcggctggaaaacgaggtgtcccagtacgagacaagatacggccctctcggaggcggaaaaggatccggcggcggaggatctggcggaggcggatctgggggcggaggctctttcgaagaagttcagctggttgaaagtggtggcggcctggttcaacctggcggatctctgagactgagctgtgccgccagcggcttcaatgtgtacgcctctggaatgcactgggtccgacaggcccctggcaaaggacttgagtgggtcgccaaaatctaccccgacagcgactacacctattacgccgacagcgtgaagggcagattcaccatcagcgccgacaccagcaagaacaccgcctacctccagatgaactccctgagagccgaggacaccgccgtgtactactgtagcagagacagcagcttctactacgtgtacgctatggactactggggccagggcacactggtcacagtctcttctacgcgtatccagaaccctgatcctgccgtgtaccagctgcgggatagcaagagcagcgacaagagcgtgtgtctgttcaccgacttcgacagccagaccaacgtgtcccagagcaaggactccgacgtgtacatcaccgataagtgcgtgctggacatgcggagcatggacttcaagagcaactccgccgtggcctggtccaacaagtccgatttcgcctgcgccaacgccttcaacaacagcattatccccgaggacacattcttcccaagccccgagagcagctgcggctttaccagcgagagctaccagcagggcgtgctgagcgccaccatcctgtacgagatcctgctgggcaaggccaccctgtacgccgtgctggtgtctgccctggtgctgatggctatggtcaagcggaaggacagccgggga

SEQ ID NO: 39253 - DNA, 2091 bp, synthetic construct
  source 1..2091: mol_type = other DNA
atggccttaccagtgaccgccttgctcctgccgctggccttgctgctccacgccgccaggccggacatccagatgacacagagccctagcagcctgtctgccagcgtgggagacagagtgaccatcacctgtagagccagccaggacatcaacacagccgtggcttggtatcagcagaagcctggcaaggcccctaagctgctgatctacagcgcctacttcctgtacagcggcgtgcccagcagattcagcggaagcagaagcggcaccgacttcaccctgacaatatccagcctccagcctgaggacttcgccacctactactgccagcagtacagcagatacagccccgtgacctttggacagggcaccaaggtggaaatcaagagactcgagatccagaaccctgatcctgccgtgtaccagctgcgggatagcaagagcagcgacaagagcgtgtgtctgttcaccgacttcgacagccagaccaacgtgtcccagagcaaggactccgacgtgtacatcaccgataagtgcgtgctggacatgcggagcatggacttcaagagcaactccgccgtggcctggtccaacaagtccgatttcgcctgcgccaacgccttcaacaacagcattatccccgaggacacattcttcccaagccccgagagcagctgcggctttaccagcgagagctaccagcagggcgtgctgagcgccaccatcctgtacgagatcctgctgggcaaggccaccctgtacgccgtgctggtgtctgccctggtgctgatggctatggtcaagcggaaggacagccggggacgcgccaagagaagcggatctggcgtgaagcagaccctgaatttcgacctgctgaagctggctggcgacgtggaatccaacccaggccctactagtatggactggatttggcgcatccttttccttgtcggcgctgctaccggcgcccattccgggcccatggaccccgacctggaaatcagagccgccttcctgcggcagagaaacacagccctgagaacagaggtggccgagctggaacaagaggtgcagcggctggaaaacgaggtgtcccagtacgagacaagatacggccctctcggaggcggaaaaggatccggcggcggaggatctggcggaggcggatctgggggcggaggctctttcgaagaagttcagctggttgaaagtggtggcggcctggttcaacctggcggatctctgagactgagctgtgccgccagcggcttcaatgtgtacgcctctggaatgcactgggtccgacaggcccctggcaaaggacttgagtgggtcgccaaaatctaccccgacagcgactacacctattacgccgacagcgtgaagggcagattcaccatcagcgccgacaccagcaagaacaccgcctacctccagatgaactccctgagagccgaggacaccgccgtgtactactgtagcagagacagcagcttctactacgtgtacgctatggactactggggccagggcacactggtcacagtctcttctacgcgtgaggacctgaagaacgtgttcccacctgaggtggccgtgttcgagcctagcgaggccgagatcagccacacccagaaagccaccctcgtgtgcctggctaccggcttctaccccgaccatgtggaactgtcttggtgggtcaacggcaaagaggtgcacagcggcgtgtgtaccgacccccagccactgaaagaacagcccgccctgaacgacagccggtactgcctgagcagcagactgagagtgtccgccaccttctggcagaacccccggaaccacttcagatgccaggtgcagttctacggcctgagcgagaacgacgagtggacccaggacagagccaagcccgtgacccagatcgtgtctgccgaagcctggggcagagccgattgcgacgtgaagctggtggaaaagagcttcgagacagacaccaacctgaacttccagaacctgagcgtgatcggcttcagaatcctgctgctgaaagtggccggctttaacctgctgatgaccctgcggctgtggtccagc

SEQ ID NO: 39254 - DNA, 2010 bp, synthetic construct
  source 1..2010: mol_type = other DNA
atggccttaccagtgaccgccttgctcctgccgctggccttgctgctccacgccgccaggccggacatccagatgacacagagccctagcagcctgtctgccagcgtgggagacagagtgaccatcacctgtagagccagccaggacatcaacacagccgtggcttggtatcagcagaagcctggcaaggcccctaagctgctgatctacagcgcctacttcctgtacagcggcgtgcccagcagattcagcggaagcagaagcggcaccgacttcaccctgacaatatccagcctccagcctgaggacttcgccacctactactgccagcagtacagcagatacagccccgtgacctttggacagggcaccaaggtggaaatcaagagactcgaggacctgaagaacgtgttcccacctgaggtggccgtgttcgagcctagcgaggccgagatcagccacacccagaaagccaccctcgtgtgcctggctaccggcttctaccccgaccatgtggaactgtcttggtgggtcaacggcaaagaggtgcacagcggcgtgtgtaccgacccccagccactgaaagaacagcccgccctgaacgacagccggtactgcctgagcagcagactgagagtgtccgccaccttctggcagaacccccggaaccacttcagatgccaggtgcagttctacggcctgagcgagaacgacgagtggacccaggacagagccaagcccgtgacccagatcgtgtctgccgaagcctggggcagagccgattgcgacgtgaagctggtggaaaagagcttcgagacagacaccaacctgaacttccagaacctgagcgtgatcggcttcagaatcctgctgctgaaagtggccggctttaacctgctgatgaccctgcggctgtggtccagcagggccaagcgatctggatctggagcaacaaacttctcactactcaaacaagcaggtgacgtggaggagaatcccgggcctactagtatggactggatttggcgcatccttttccttgtcggcgctgctaccggcgcccattccgggcccgaagttgctgccctcgagaaggaggtagcagctttggaaaaagaagtcgcagcccttgagaaagaagttgcggctctggagaagggatccggcggcggaggatctggcggaggcggatctgggggcggaggctctttcgaagaagttcagctggttgaaagtggtggcggcctggttcaacctggcggatctctgagactgagctgtgccgccagcggcttcaatgtgtacgcctctggaatgcactgggtccgacaggcccctggcaaaggacttgagtgggtcgccaaaatctaccccgacagcgactacacctattacgccgacagcgtgaagggcagattcaccatcagcgccgacaccagcaagaacaccgcctacctccagatgaactccctgagagccgaggacaccgccgtgtactactgtagcagagacagcagcttctactacgtgtacgctatggactactggggccagggcacactggtcacagtctcttctacgcgtatccagaaccctgatcctgccgtgtaccagctgcgggatagcaagagcagcgacaagagcgtgtgtctgttcaccgacttcgacagccagaccaacgtgtcccagagcaaggactccgacgtgtacatcaccgataagtgcgtgctggacatgcggagcatggacttcaagagcaactccgccgtggcctggtccaacaagtccgatttcgcctgcgccaacgccttcaacaacagcattatccccgaggacacattcttcccaagccccgagagcagctgcggctttaccagcgagagctaccagcagggcgtgctgagcgccaccatcctgtacgagatcctgctgggcaaggccaccctgtacgccgtgctggtgtctgccctggtgctgatggctatggtcaagcggaaggacagccgggga

SEQ ID NO: 39255 - DNA, 2022 bp, synthetic construct
  source 1..2022: mol_type = other DNA
atggccttaccagtgaccgccttgctcctgccgctggccttgctgctccacgccgccaggccggacatccagatgacacagagccctagcagcctgtctgccagcgtgggagacagagtgaccatcacctgtagagccagccaggacatcaacacagccgtggcttggtatcagcagaagcctggcaaggcccctaagctgctgatctacagcgcctacttcctgtacagcggcgtgcccagcagattcagcggaagcagaagcggcaccgacttcaccctgacaatatccagcctccagcctgaggacttcgccacctactactgccagcagtacagcagatacagccccgtgacctttggacagggcaccaaggtggaaatcaagagactcgagatccagaaccctgatcctgccgtgtaccagctgcgggatagcaagagcagcgacaagagcgtgtgtctgttcaccgacttcgacagccagaccaacgtgtcccagagcaaggactccgacgtgtacatcaccgataagtgcgtgctggacatgcggagcatggacttcaagagcaactccgccgtggcctggtccaacaagtccgatttcgcctgcgccaacgccttcaacaacagcattatccccgaggacacattcttcccaagccccgagagcagctgcggctttaccagcgagagctaccagcagggcgtgctgagcgccaccatcctgtacgagatcctgctgggcaaggccaccctgtacgccgtgctggtgtctgccctggtgctgatggctatggtcaagcggaaggacagccggggacgcgccaagagaagcggatctggcgtgaagcagaccctgaatttcgacctgctgaagctggctggcgacgtggaatccaacccaggccctactagtatggactggatttggcgcatccttttccttgtcggcgctgctaccggcgcccattccgggcccgaagttgctgccctcgagaaggaggtagcagctttggaaaaagaagtcgcagcccttgagaaagaagttgcggctctggagaagggatccggcggcggaggatctggcggaggcggatctgggggcggaggctctttcgaagaagttcagctggttgaaagtggtggcggcctggttcaacctggcggatctctgagactgagctgtgccgccagcggcttcaatgtgtacgcctctggaatgcactgggtccgacaggcccctggcaaaggacttgagtgggtcgccaaaatctaccccgacagcgactacacctattacgccgacagcgtgaagggcagattcaccatcagcgccgacaccagcaagaacaccgcctacctccagatgaactccctgagagccgaggacaccgccgtgtactactgtagcagagacagcagcttctactacgtgtacgctatggactactggggccagggcacactggtcacagtctcttctacgcgtgaggacctgaagaacgtgttcccacctgaggtggccgtgttcgagcctagcgaggccgagatcagccacacccagaaagccaccctcgtgtgcctggctaccggcttctaccccgaccatgtggaactgtcttggtgggtcaacggcaaagaggtgcacagcggcgtgtgtaccgacccccagccactgaaagaacagcccgccctgaacgacagccggtactgcctgagcagcagactgagagtgtccgccaccttctggcagaacccccggaaccacttcagatgccaggtgcagttctacggcctgagcgagaacgacgagtggacccaggacagagccaagcccgtgacccagatcgtgtctgccgaagcctggggcagagccgattgcgacgtgaagctggtggaaaagagcttcgagacagacaccaacctgaacttccagaacctgagcgtgatcggcttcagaatcctgctgctgaaagtggccggctttaacctgctgatgaccctgcggctgtggtccagc

SEQ ID NO: 39256 - DNA, 2280 bp, synthetic construct
  source 1..2280: mol_type = other DNA
atggccttaccagtgaccgccttgctcctgccgctggccttgctgctccacgccgccaggccggacatccagatgacacagagccctagcagcctgtctgccagcgtgggagacagagtgaccatcacctgtagagccagccaggacatcaacacagccgtggcttggtatcagcagaagcctggcaaggcccctaagctgctgatctacagcgcctacttcctgtacagcggcgtgcccagcagattcagcggaagcagaagcggcaccgacttcaccctgacaatatccagcctccagcctgaggacttcgccacctactactgccagcagtacagcagatacagccccgtgacctttggacagggcaccaaggtggaaatcaagagactcgaggacctgaagaacgtgttcccacctgaggtggccgtgttcgagcctagcgaggccgagatcagccacacccagaaagccaccctcgtgtgcctggctaccggcttctaccccgaccatgtggaactgtcttggtgggtcaacggcaaagaggtgcacagcggcgtgtgtaccgacccccagccactgaaagaacagcccgccctgaacgacagccggtactgcctgagcagcagactgagagtgtccgccaccttctggcagaacccccggaaccacttcagatgccaggtgcagttctacggcctgagcgagaacgacgagtggacccaggacagagccaagcccgtgacccagatcgtgtctgccgaagcctggggcagagccgattgcgacgtgaagctggtggaaaagagcttcgagacagacaccaacctgaacttccagaacctgagcgtgatcggcttcagaatcctgctgctgaaagtggccggctttaacctgctgatgaccctgcggctgtggtccagcagggccaagcgatctggatctggagcaacaaacttctcactactcaaacaagcaggtgacgtggaggagaatcccgggcctactagtatggactggatttggcgcatccttttccttgtcggcgctgctaccggcgcccattccgggccccaggttcagctgcaagagtctggcggaggacttgctcaagctggcggaagcctgagactgtcttgtgccgcctctggcagaaccttcagcatgggctggtttagacaggcccctggcaaagagagagagttcgtcgccgccatcacatacagcggcggcagcccttactacgcctcttctgtcagaggccggttcaccatcagccgggacaacgccaagaacaccgtgtacctccagatgaacagcctgaagccagaggacaccgccgtgtactactgtgccgccaatccaacctacggcagcgactggaatgccgagaattggggccagggcacccaagtgacagtgtctagtggatccggcggcggaggatctggcggaggcggatctgggggcggaggctctttcgaagaagttcagctggttgaaagtggtggcggcctggttcaacctggcggatctctgagactgagctgtgccgccagcggcttcaatgtgtacgcctctggaatgcactgggtccgacaggcccctggcaaaggacttgagtgggtcgccaaaatctaccccgacagcgactacacctattacgccgacagcgtgaagggcagattcaccatcagcgccgacaccagcaagaacaccgcctacctccagatgaactccctgagagccgaggacaccgccgtgtactactgtagcagagacagcagcttctactacgtgtacgctatggactactggggccagggcacactggtcacagtctcttctacgcgtatccagaaccctgatcctgccgtgtaccagctgcgggatagcaagagcagcgacaagagcgtgtgtctgttcaccgacttcgacagccagaccaacgtgtcccagagcaaggactccgacgtgtacatcaccgataagtgcgtgctggacatgcggagcatggacttcaagagcaactccgccgtggcctggtccaacaagtccgatttcgcctgcgccaacgccttcaacaacagcattatccccgaggacacattcttcccaagccccgagagcagctgcggctttaccagcgagagctaccagcagggcgtgctgagcgccaccatcctgtacgagatcctgctgggcaaggccaccctgtacgccgtgctggtgtctgccctggtgctgatggctatggtcaagcggaaggacagccgggga

SEQ ID NO: 39257 - DNA, 2292 bp, synthetic construct
  source 1..2292: mol_type = other DNA
atggccttaccagtgaccgccttgctcctgccgctggccttgctgctccacgccgccaggccggacatccagatgacacagagccctagcagcctgtctgccagcgtgggagacagagtgaccatcacctgtagagccagccaggacatcaacacagccgtggcttggtatcagcagaagcctggcaaggcccctaagctgctgatctacagcgcctacttcctgtacagcggcgtgcccagcagattcagcggaagcagaagcggcaccgacttcaccctgacaatatccagcctccagcctgaggacttcgccacctactactgccagcagtacagcagatacagccccgtgacctttggacagggcaccaaggtggaaatcaagagactcgagatccagaaccctgatcctgccgtgtaccagctgcgggatagcaagagcagcgacaagagcgtgtgtctgttcaccgacttcgacagccagaccaacgtgtcccagagcaaggactccgacgtgtacatcaccgataagtgcgtgctggacatgcggagcatggacttcaagagcaactccgccgtggcctggtccaacaagtccgatttcgcctgcgccaacgccttcaacaacagcattatccccgaggacacattcttcccaagccccgagagcagctgcggctttaccagcgagagctaccagcagggcgtgctgagcgccaccatcctgtacgagatcctgctgggcaaggccaccctgtacgccgtgctggtgtctgccctggtgctgatggctatggtcaagcggaaggacagccggggacgcgccaagagaagcggatctggcgtgaagcagaccctgaatttcgacctgctgaagctggctggcgacgtggaatccaacccaggccctactagtatggactggatttggcgcatccttttccttgtcggcgctgctaccggcgcccattccgggccccaggttcagctgcaagagtctggcggaggacttgctcaagctggcggaagcctgagactgtcttgtgccgcctctggcagaaccttcagcatgggctggtttagacaggcccctggcaaagagagagagttcgtcgccgccatcacatacagcggcggcagcccttactacgcctcttctgtcagaggccggttcaccatcagccgggacaacgccaagaacaccgtgtacctccagatgaacagcctgaagccagaggacaccgccgtgtactactgtgccgccaatccaacctacggcagcgactggaatgccgagaattggggccagggcacccaagtgacagtgtctagtggatccggcggcggaggatctggcggaggcggatctgggggcggaggctctttcgaagaagttcagctggttgaaagtggtggcggcctggttcaacctggcggatctctgagactgagctgtgccgccagcggcttcaatgtgtacgcctctggaatgcactgggtccgacaggcccctggcaaaggacttgagtgggtcgccaaaatctaccccgacagcgactacacctattacgccgacagcgtgaagggcagattcaccatcagcgccgacaccagcaagaacaccgcctacctccagatgaactccctgagagccgaggacaccgccgtgtactactgtagcagagacagcagcttctactacgtgtacgctatggactactggggccagggcacactggtcacagtctcttctacgcgtgaggacctgaagaacgtgttcccacctgaggtggccgtgttcgagcctagcgaggccgagatcagccacacccagaaagccaccctcgtgtgcctggctaccggcttctaccccgaccatgtggaactgtcttggtgggtcaacggcaaagaggtgcacagcggcgtgtgtaccgacccccagccactgaaagaacagcccgccctgaacgacagccggtactgcctgagcagcagactgagagtgtccgccaccttctggcagaacccccggaaccacttcagatgccaggtgcagttctacggcctgagcgagaacgacgagtggacccaggacagagccaagcccgtgacccagatcgtgtctgccgaagcctggggcagagccgattgcgacgtgaagctggtggaaaagagcttcgagacagacaccaacctgaacttccagaacctgagcgtgatcggcttcagaatcctgctgctgaaagtggccggctttaacctgctgatgaccctgcggctgtggtccagc

SEQ ID NO: 39258 - DNA, 2298 bp, synthetic construct
  source 1..2298: mol_type = other DNA
atggccttaccagtgaccgccttgctcctgccgctggccttgctgctccacgccgccaggccggaagtgcaactggtggaatctggaggctctctggtgcagccagggggaagcctgagactgtcttgtgccgcttccggcttcaccttcgacgactacgccatgagctgggtgcgccaggtgccaggcaaaggcctggaatgggtgtccagcatcaactggagcggcacccacaccgattacgccgactccgtgaaaggcagattcacaatcagcagaaacaacgccaacaataccctgtacctgcagatgaactccctgaagtctgaggatacagcagtgtattattgcgccaagaactggcgggacgccggcaccacttggtttgagaaaagcggctctgccggacagggaacccaagtgacagtgtcctccggtaccggcggaggcggatctggcggcggaggtagcggtggcggaggatctgaattcgacatccagatgacacagagccctagcagcctgtctgccagcgtgggagacagagtgaccatcacctgtagagccagccaggacatcaacacagccgtggcttggtatcagcagaagcctggcaaggcccctaagctgctgatctacagcgcctacttcctgtacagcggcgtgcccagcagattcagcggaagcagaagcggcaccgacttcaccctgacaatatccagcctccagcctgaggacttcgccacctactactgccagcagtacagcagatacagccccgtgacctttggacagggcaccaaggtggaaatcaagagactcgaggacctgaagaacgtgttcccacctgaggtggccgtgttcgagcctagcgaggccgagatcagccacacccagaaagccaccctcgtgtgcctggctaccggcttctaccccgaccatgtggaactgtcttggtgggtcaacggcaaagaggtgcacagcggcgtgtgtaccgacccccagccactgaaagaacagcccgccctgaacgacagccggtactgcctgagcagcagactgagagtgtccgccaccttctggcagaacccccggaaccacttcagatgccaggtgcagttctacggcctgagcgagaacgacgagtggacccaggacagagccaagcccgtgacccagatcgtgtctgccgaagcctggggcagagccgattgcgacgtgaagctggtggaaaagagcttcgagacagacaccaacctgaacttccagaacctgagcgtgatcggcttcagaatcctgctgctgaaagtggccggctttaacctgctgatgaccctgcggctgtggtccagcagggccaagcgatctggatctggagcaacaaacttctcactactcaaacaagcaggtgacgtggaggagaatcccgggcctactagtatggactggatttggcgcatccttttccttgtcggcgctgctaccggcgcgcattccttcgaagaagttcagctggttgaaagtggtggcggcctggttcaacctggcggatctctgagactgagctgtgccgccagcggcttcaatgtgtacgcctctggaatgcactgggtccgacaggcccctggcaaaggacttgagtgggtcgccaaaatctaccccgacagcgactacacctattacgccgacagcgtgaagggcagattcaccatcagcgccgacaccagcaagaacaccgcctacctccagatgaactccctgagagccgaggacaccgccgtgtactactgtagcagagacagcagcttctactacgtgtacgctatggactactggggccagggcacactggtcacagtctcttctacgcgtatccagaaccctgatcctgccgtgtaccagctgcgggatagcaagagcagcgacaagagcgtgtgtctgttcaccgacttcgacagccagaccaacgtgtcccagagcaaggactccgacgtgtacatcaccgataagtgcgtgctggacatgcggagcatggacttcaagagcaactccgccgtggcctggtccaacaagtccgatttcgcctgcgccaacgccttcaacaacagcattatccccgaggacacattcttcccaagccccgagagcagctgcggctttaccagcgagagctaccagcagggcgtgctgagcgccaccatcctgtacgagatcctgctgggcaaggccaccctgtacgccgtgctggtgtctgccctggtgctgatggctatggtcaagcggaaggacagccgggga

SEQ ID NO: 39259 - DNA, 2310 bp, synthetic construct
  source 1..2310: mol_type = other DNA
atggccttaccagtgaccgccttgctcctgccgctggccttgctgctccacgccgccaggccggaagtgcaactggtggaatctggaggctctctggtgcagccagggggaagcctgagactgtcttgtgccgcttccggcttcaccttcgacgactacgccatgagctgggtgcgccaggtgccaggcaaaggcctggaatgggtgtccagcatcaactggagcggcacccacaccgattacgccgactccgtgaaaggcagattcacaatcagcagaaacaacgccaacaataccctgtacctgcagatgaactccctgaagtctgaggatacagcagtgtattattgcgccaagaactggcgggacgccggcaccacttggtttgagaaaagcggctctgccggacagggaacccaagtgacagtgtcctccggtaccggcggaggcggatctggcggcggaggtagcggtggcggaggatctgaattcgacatccagatgacacagagccctagcagcctgtctgccagcgtgggagacagagtgaccatcacctgtagagccagccaggacatcaacacagccgtggcttggtatcagcagaagcctggcaaggcccctaagctgctgatctacagcgcctacttcctgtacagcggcgtgcccagcagattcagcggaagcagaagcggcaccgacttcaccctgacaatatccagcctccagcctgaggacttcgccacctactactgccagcagtacagcagatacagccccgtgacctttggacagggcaccaaggtggaaatcaagagactcgagatccagaaccctgatcctgccgtgtaccagctgcgggatagcaagagcagcgacaagagcgtgtgtctgttcaccgacttcgacagccagaccaacgtgtcccagagcaaggactccgacgtgtacatcaccgataagtgcgtgctggacatgcggagcatggacttcaagagcaactccgccgtggcctggtccaacaagtccgatttcgcctgcgccaacgccttcaacaacagcattatccccgaggacacattcttcccaagccccgagagcagctgcggctttaccagcgagagctaccagcagggcgtgctgagcgccaccatcctgtacgagatcctgctgggcaaggccaccctgtacgccgtgctggtgtctgccctggtgctgatggctatggtcaagcggaaggacagccggggacgcgccaagagaagcggatctggcgtgaagcagaccctgaatttcgacctgctgaagctggctggcgacgtggaatccaacccaggccctactagtatggactggatttggcgcatccttttccttgtcggcgctgctaccggcgcgcattccttcgaagaagttcagctggttgaaagtggtggcggcctggttcaacctggcggatctctgagactgagctgtgccgccagcggcttcaatgtgtacgcctctggaatgcactgggtccgacaggcccctggcaaaggacttgagtgggtcgccaaaatctaccccgacagcgactacacctattacgccgacagcgtgaagggcagattcaccatcagcgccgacaccagcaagaacaccgcctacctccagatgaactccctgagagccgaggacaccgccgtgtactactgtagcagagacagcagcttctactacgtgtacgctatggactactggggccagggcacactggtcacagtctcttctacgcgtgaggacctgaagaacgtgttcccacctgaggtggccgtgttcgagcctagcgaggccgagatcagccacacccagaaagccaccctcgtgtgcctggctaccggcttctaccccgaccatgtggaactgtcttggtgggtcaacggcaaagaggtgcacagcggcgtgtgtaccgacccccagccactgaaagaacagcccgccctgaacgacagccggtactgcctgagcagcagactgagagtgtccgccaccttctggcagaacccccggaaccacttcagatgccaggtgcagttctacggcctgagcgagaacgacgagtggacccaggacagagccaagcccgtgacccagatcgtgtctgccgaagcctggggcagagccgattgcgacgtgaagctggtggaaaagagcttcgagacagacaccaacctgaacttccagaacctgagcgtgatcggcttcagaatcctgctgctgaaagtggccggctttaacctgctgatgaccctgcggctgtggtccagc

SEQ ID NO: 39260 - DNA, 2292 bp, synthetic construct
  source 1..2292: mol_type = other DNA
atggccttaccagtgaccgccttgctcctgccgctggccttgctgctccacgccgccaggccggaagttcagctgcttgagtctggcggaggactggttcaacctggcggaagcctgagactgtcttgtgccgccagcggcttcatcttcagcagctacgccatgagctgggtccgacaggctcctggaaagggccaagaatgggtttccggcgttagcggcacaggcgtgaacacctactacgccgatagcgtgaagggcagattcaccatcagccgggacaacagcaagaacaccctgtacctccagatgaacagcctgagagccgaggacaccgccgtgtactattgtgcctctggcaaaggctgggacagcggctcttggtacgaggactatagaggccagggcaccctggtcacagtttcttcaggtaccggcggaggcggatctggcggcggaggtagcggtggcggaggatctgaattcgacatccagatgacacagagccctagcagcctgtctgccagcgtgggagacagagtgaccatcacctgtagagccagccaggacatcaacacagccgtggcttggtatcagcagaagcctggcaaggcccctaagctgctgatctacagcgcctacttcctgtacagcggcgtgcccagcagattcagcggaagcagaagcggcaccgacttcaccctgacaatatccagcctccagcctgaggacttcgccacctactactgccagcagtacagcagatacagccccgtgacctttggacagggcaccaaggtggaaatcaagagactcgaggacctgaagaacgtgttcccacctgaggtggccgtgttcgagcctagcgaggccgagatcagccacacccagaaagccaccctcgtgtgcctggctaccggcttctaccccgaccatgtggaactgtcttggtgggtcaacggcaaagaggtgcacagcggcgtgtgtaccgacccccagccactgaaagaacagcccgccctgaacgacagccggtactgcctgagcagcagactgagagtgtccgccaccttctggcagaacccccggaaccacttcagatgccaggtgcagttctacggcctgagcgagaacgacgagtggacccaggacagagccaagcccgtgacccagatcgtgtctgccgaagcctggggcagagccgattgcgacgtgaagctggtggaaaagagcttcgagacagacaccaacctgaacttccagaacctgagcgtgatcggcttcagaatcctgctgctgaaagtggccggctttaacctgctgatgaccctgcggctgtggtccagcagggccaagcgatctggatctggagcaacaaacttctcactactcaaacaagcaggtgacgtggaggagaatcccgggcctactagtatggactggatttggcgcatccttttccttgtcggcgctgctaccggcgcgcattccttcgaagaagttcagctggttgaaagtggtggcggcctggttcaacctggcggatctctgagactgagctgtgccgccagcggcttcaatgtgtacgcctctggaatgcactgggtccgacaggcccctggcaaaggacttgagtgggtcgccaaaatctaccccgacagcgactacacctattacgccgacagcgtgaagggcagattcaccatcagcgccgacaccagcaagaacaccgcctacctccagatgaactccctgagagccgaggacaccgccgtgtactactgtagcagagacagcagcttctactacgtgtacgctatggactactggggccagggcacactggtcacagtctcttctacgcgtatccagaaccctgatcctgccgtgtaccagctgcgggatagcaagagcagcgacaagagcgtgtgtctgttcaccgacttcgacagccagaccaacgtgtcccagagcaaggactccgacgtgtacatcaccgataagtgcgtgctggacatgcggagcatggacttcaagagcaactccgccgtggcctggtccaacaagtccgatttcgcctgcgccaacgccttcaacaacagcattatccccgaggacacattcttcccaagccccgagagcagctgcggctttaccagcgagagctaccagcagggcgtgctgagcgccaccatcctgtacgagatcctgctgggcaaggccaccctgtacgccgtgctggtgtctgccctggtgctgatggctatggtcaagcggaaggacagccgggga

SEQ ID NO: 39261 - DNA, 2304 bp, synthetic construct
  source 1..2304: mol_type = other DNA
atggccttaccagtgaccgccttgctcctgccgctggccttgctgctccacgccgccaggccggaagttcagctgcttgagtctggcggaggactggttcaacctggcggaagcctgagactgtcttgtgccgccagcggcttcatcttcagcagctacgccatgagctgggtccgacaggctcctggaaagggccaagaatgggtttccggcgttagcggcacaggcgtgaacacctactacgccgatagcgtgaagggcagattcaccatcagccgggacaacagcaagaacaccctgtacctccagatgaacagcctgagagccgaggacaccgccgtgtactattgtgcctctggcaaaggctgggacagcggctcttggtacgaggactatagaggccagggcaccctggtcacagtttcttcaggtaccggcggaggcggatctggcggcggaggtagcggtggcggaggatctgaattcgacatccagatgacacagagccctagcagcctgtctgccagcgtgggagacagagtgaccatcacctgtagagccagccaggacatcaacacagccgtggcttggtatcagcagaagcctggcaaggcccctaagctgctgatctacagcgcctacttcctgtacagcggcgtgcccagcagattcagcggaagcagaagcggcaccgacttcaccctgacaatatccagcctccagcctgaggacttcgccacctactactgccagcagtacagcagatacagccccgtgacctttggacagggcaccaaggtggaaatcaagagactcgagatccagaaccctgatcctgccgtgtaccagctgcgggatagcaagagcagcgacaagagcgtgtgtctgttcaccgacttcgacagccagaccaacgtgtcccagagcaaggactccgacgtgtacatcaccgataagtgcgtgctggacatgcggagcatggacttcaagagcaactccgccgtggcctggtccaacaagtccgatttcgcctgcgccaacgccttcaacaacagcattatccccgaggacacattcttcccaagccccgagagcagctgcggctttaccagcgagagctaccagcagggcgtgctgagcgccaccatcctgtacgagatcctgctgggcaaggccaccctgtacgccgtgctggtgtctgccctggtgctgatggctatggtcaagcggaaggacagccggggacgcgccaagagaagcggatctggcgtgaagcagaccctgaatttcgacctgctgaagctggctggcgacgtggaatccaacccaggccctactagtatggactggatttggcgcatccttttccttgtcggcgctgctaccggcgcgcattccttcgaagaagttcagctggttgaaagtggtggcggcctggttcaacctggcggatctctgagactgagctgtgccgccagcggcttcaatgtgtacgcctctggaatgcactgggtccgacaggcccctggcaaaggacttgagtgggtcgccaaaatctaccccgacagcgactacacctattacgccgacagcgtgaagggcagattcaccatcagcgccgacaccagcaagaacaccgcctacctccagatgaactccctgagagccgaggacaccgccgtgtactactgtagcagagacagcagcttctactacgtgtacgctatggactactggggccagggcacactggtcacagtctcttctacgcgtgaggacctgaagaacgtgttcccacctgaggtggccgtgttcgagcctagcgaggccgagatcagccacacccagaaagccaccctcgtgtgcctggctaccggcttctaccccgaccatgtggaactgtcttggtgggtcaacggcaaagaggtgcacagcggcgtgtgtaccgacccccagccactgaaagaacagcccgccctgaacgacagccggtactgcctgagcagcagactgagagtgtccgccaccttctggcagaacccccggaaccacttcagatgccaggtgcagttctacggcctgagcgagaacgacgagtggacccaggacagagccaagcccgtgacccagatcgtgtctgccgaagcctggggcagagccgattgcgacgtgaagctggtggaaaagagcttcgagacagacaccaacctgaacttccagaacctgagcgtgatcggcttcagaatcctgctgctgaaagtggccggctttaacctgctgatgaccctgcggctgtggtccagc

SEQ ID NO: 39262 - DNA, 2196 bp, synthetic construct
  source 1..2196: mol_type = other DNA
atggccttaccagtgaccgccttgctcctgccgctggccttgctgctccacgccgccaggccgatgctgcccgctcctaagaatctggtggtgtccagaatcaccgaggacagcgccagactgtcttggacagctcctgatgccgccttcgacagcttccccatccggtacatcgagacactgatctggggcgaagccatctggctggatgtgcctggaagcgagagaagctacgacctgaccggactgaagcctggcacagagtatgccgtggtcatcaccggcgtgaaaggcggcagattctctagccctctggtggcctctttcaccaccggtaccggcggaggcggatctggcggcggaggtagcggtggcggaggatctgaattcgacatccagatgacacagagccctagcagcctgtctgccagcgtgggagacagagtgaccatcacctgtagagccagccaggacatcaacacagccgtggcttggtatcagcagaagcctggcaaggcccctaagctgctgatctacagcgcctacttcctgtacagcggcgtgcccagcagattcagcggaagcagaagcggcaccgacttcaccctgacaatatccagcctccagcctgaggacttcgccacctactactgccagcagtacagcagatacagccccgtgacctttggacagggcaccaaggtggaaatcaagagactcgaggacctgaagaacgtgttcccacctgaggtggccgtgttcgagcctagcgaggccgagatcagccacacccagaaagccaccctcgtgtgcctggctaccggcttctaccccgaccatgtggaactgtcttggtgggtcaacggcaaagaggtgcacagcggcgtgtgtaccgacccccagccactgaaagaacagcccgccctgaacgacagccggtactgcctgagcagcagactgagagtgtccgccaccttctggcagaacccccggaaccacttcagatgccaggtgcagttctacggcctgagcgagaacgacgagtggacccaggacagagccaagcccgtgacccagatcgtgtctgccgaagcctggggcagagccgattgcgacgtgaagctggtggaaaagagcttcgagacagacaccaacctgaacttccagaacctgagcgtgatcggcttcagaatcctgctgctgaaagtggccggctttaacctgctgatgaccctgcggctgtggtccagcagggccaagcgatctggatctggagcaacaaacttctcactactcaaacaagcaggtgacgtggaggagaatcccgggcctactagtatggactggatttggcgcatccttttccttgtcggcgctgctaccggcgcgcattccttcgaagaagttcagctggttgaaagtggtggcggcctggttcaacctggcggatctctgagactgagctgtgccgccagcggcttcaatgtgtacgcctctggaatgcactgggtccgacaggcccctggcaaaggacttgagtgggtcgccaaaatctaccccgacagcgactacacctattacgccgacagcgtgaagggcagattcaccatcagcgccgacaccagcaagaacaccgcctacctccagatgaactccctgagagccgaggacaccgccgtgtactactgtagcagagacagcagcttctactacgtgtacgctatggactactggggccagggcacactggtcacagtctcttctacgcgtatccagaaccctgatcctgccgtgtaccagctgcgggatagcaagagcagcgacaagagcgtgtgtctgttcaccgacttcgacagccagaccaacgtgtcccagagcaaggactccgacgtgtacatcaccgataagtgcgtgctggacatgcggagcatggacttcaagagcaactccgccgtggcctggtccaacaagtccgatttcgcctgcgccaacgccttcaacaacagcattatccccgaggacacattcttcccaagccccgagagcagctgcggctttaccagcgagagctaccagcagggcgtgctgagcgccaccatcctgtacgagatcctgctgggcaaggccaccctgtacgccgtgctggtgtctgccctggtgctgatggctatggtcaagcggaaggacagccgggga

SEQ ID NO: 39263 - DNA, 2208 bp, synthetic construct
  source 1..2208: mol_type = other DNA
atggccttaccagtgaccgccttgctcctgccgctggccttgctgctccacgccgccaggccgatgctgcccgctcctaagaatctggtggtgtccagaatcaccgaggacagcgccagactgtcttggacagctcctgatgccgccttcgacagcttccccatccggtacatcgagacactgatctggggcgaagccatctggctggatgtgcctggaagcgagagaagctacgacctgaccggactgaagcctggcacagagtatgccgtggtcatcaccggcgtgaaaggcggcagattctctagccctctggtggcctctttcaccaccggtaccggcggaggcggatctggcggcggaggtagcggtggcggaggatctgaattcgacatccagatgacacagagccctagcagcctgtctgccagcgtgggagacagagtgaccatcacctgtagagccagccaggacatcaacacagccgtggcttggtatcagcagaagcctggcaaggcccctaagctgctgatctacagcgcctacttcctgtacagcggcgtgcccagcagattcagcggaagcagaagcggcaccgacttcaccctgacaatatccagcctccagcctgaggacttcgccacctactactgccagcagtacagcagatacagccccgtgacctttggacagggcaccaaggtggaaatcaagagactcgagatccagaaccctgatcctgccgtgtaccagctgcgggatagcaagagcagcgacaagagcgtgtgtctgttcaccgacttcgacagccagaccaacgtgtcccagagcaaggactccgacgtgtacatcaccgataagtgcgtgctggacatgcggagcatggacttcaagagcaactccgccgtggcctggtccaacaagtccgatttcgcctgcgccaacgccttcaacaacagcattatccccgaggacacattcttcccaagccccgagagcagctgcggctttaccagcgagagctaccagcagggcgtgctgagcgccaccatcctgtacgagatcctgctgggcaaggccaccctgtacgccgtgctggtgtctgccctggtgctgatggctatggtcaagcggaaggacagccggggacgcgccaagagaagcggatctggcgtgaagcagaccctgaatttcgacctgctgaagctggctggcgacgtggaatccaacccaggccctactagtatggactggatttggcgcatccttttccttgtcggcgctgctaccggcgcgcattccttcgaagaagttcagctggttgaaagtggtggcggcctggttcaacctggcggatctctgagactgagctgtgccgccagcggcttcaatgtgtacgcctctggaatgcactgggtccgacaggcccctggcaaaggacttgagtgggtcgccaaaatctaccccgacagcgactacacctattacgccgacagcgtgaagggcagattcaccatcagcgccgacaccagcaagaacaccgcctacctccagatgaactccctgagagccgaggacaccgccgtgtactactgtagcagagacagcagcttctactacgtgtacgctatggactactggggccagggcacactggtcacagtctcttctacgcgtgaggacctgaagaacgtgttcccacctgaggtggccgtgttcgagcctagcgaggccgagatcagccacacccagaaagccaccctcgtgtgcctggctaccggcttctaccccgaccatgtggaactgtcttggtgggtcaacggcaaagaggtgcacagcggcgtgtgtaccgacccccagccactgaaagaacagcccgccctgaacgacagccggtactgcctgagcagcagactgagagtgtccgccaccttctggcagaacccccggaaccacttcagatgccaggtgcagttctacggcctgagcgagaacgacgagtggacccaggacagagccaagcccgtgacccagatcgtgtctgccgaagcctggggcagagccgattgcgacgtgaagctggtggaaaagagcttcgagacagacaccaacctgaacttccagaacctgagcgtgatcggcttcagaatcctgctgctgaaagtggccggctttaacctgctgatgaccctgcggctgtggtccagc

SEQ ID NO: 39264 - DNA, 2283 bp, synthetic construct
  source 1..2283: mol_type = other DNA
atggccttaccagtgaccgccttgctcctgccgctggccttgctgctccacgccgccaggccggaggtgcagctggttgaatctggcggaggactggttcagcctggcggatctctgagactgtcttgtgccgccagcggcttcaacatcaaggatacctgtatcggctgggttcgcagagcccctggcaaagaggaagaactggtcgccaaaatctgcaagtacagcggccacaccagatacgccgacagcgtgaagggcagattcaccatcagcgccgacaccagcaagaacaccgcctacctccagatgaacagcctgagagccgaggacaccgccgtgtactattgtgccgctgtgtccgtcagagatgggcactacaattactggggccagggcaccaccgtgaccgtttcttcaggtaccggcggaggcggatctggcggcggaggtagcggtggcggaggatctgaattcgacatccagatgacacagagccctagcagcctgtctgccagcgtgggagacagagtgaccatcacctgtagagccagccaggacatcaacacagccgtggcttggtatcagcagaagcctggcaaggcccctaagctgctgatctacagcgcctacttcctgtacagcggcgtgcccagcagattcagcggaagcagaagcggcaccgacttcaccctgacaatatccagcctccagcctgaggacttcgccacctactactgccagcagtacagcagatacagccccgtgacctttggacagggcaccaaggtggaaatcaagagactcgaggacctgaagaacgtgttcccacctgaggtggccgtgttcgagcctagcgaggccgagatcagccacacccagaaagccaccctcgtgtgcctggctaccggcttctaccccgaccatgtggaactgtcttggtgggtcaacggcaaagaggtgcacagcggcgtgtgtaccgacccccagccactgaaagaacagcccgccctgaacgacagccggtactgcctgagcagcagactgagagtgtccgccaccttctggcagaacccccggaaccacttcagatgccaggtgcagttctacggcctgagcgagaacgacgagtggacccaggacagagccaagcccgtgacccagatcgtgtctgccgaagcctggggcagagccgattgcgacgtgaagctggtggaaaagagcttcgagacagacaccaacctgaacttccagaacctgagcgtgatcggcttcagaatcctgctgctgaaagtggccggctttaacctgctgatgaccctgcggctgtggtccagcagggccaagcgatctggatctggagcaacaaacttctcactactcaaacaagcaggtgacgtggaggagaatcccgggcctactagtatggactggatttggcgcatccttttccttgtcggcgctgctaccggcgcgcattccttcgaagaagttcagctggttgaaagtggtggcggcctggttcaacctggcggatctctgagactgagctgtgccgccagcggcttcaatgtgtacgcctctggaatgcactgggtccgacaggcccctggcaaaggacttgagtgggtcgccaaaatctaccccgacagcgactacacctattacgccgacagcgtgaagggcagattcaccatcagcgccgacaccagcaagaacaccgcctacctccagatgaactccctgagagccgaggacaccgccgtgtactactgtagcagagacagcagcttctactacgtgtacgctatggactactggggccagggcacactggtcacagtctcttctacgcgtatccagaaccctgatcctgccgtgtaccagctgcgggatagcaagagcagcgacaagagcgtgtgtctgttcaccgacttcgacagccagaccaacgtgtcccagagcaaggactccgacgtgtacatcaccgataagtgcgtgctggacatgcggagcatggacttcaagagcaactccgccgtggcctggtccaacaagtccgatttcgcctgcgccaacgccttcaacaacagcattatccccgaggacacattcttcccaagccccgagagcagctgcggctttaccagcgagagctaccagcagggcgtgctgagcgccaccatcctgtacgagatcctgctgggcaaggccaccctgtacgccgtgctggtgtctgccctggtgctgatggctatggtcaagcggaaggacagccgggga

SEQ ID NO: 39265 - DNA, 2295 bp, synthetic construct
  source 1..2295: mol_type = other DNA
atggccttaccagtgaccgccttgctcctgccgctggccttgctgctccacgccgccaggccggaggtgcagctggttgaatctggcggaggactggttcagcctggcggatctctgagactgtcttgtgccgccagcggcttcaacatcaaggatacctgtatcggctgggttcgcagagcccctggcaaagaggaagaactggtcgccaaaatctgcaagtacagcggccacaccagatacgccgacagcgtgaagggcagattcaccatcagcgccgacaccagcaagaacaccgcctacctccagatgaacagcctgagagccgaggacaccgccgtgtactattgtgccgctgtgtccgtcagagatgggcactacaattactggggccagggcaccaccgtgaccgtttcttcaggtaccggcggaggcggatctggcggcggaggtagcggtggcggaggatctgaattcgacatccagatgacacagagccctagcagcctgtctgccagcgtgggagacagagtgaccatcacctgtagagccagccaggacatcaacacagccgtggcttggtatcagcagaagcctggcaaggcccctaagctgctgatctacagcgcctacttcctgtacagcggcgtgcccagcagattcagcggaagcagaagcggcaccgacttcaccctgacaatatccagcctccagcctgaggacttcgccacctactactgccagcagtacagcagatacagccccgtgacctttggacagggcaccaaggtggaaatcaagagactcgagatccagaaccctgatcctgccgtgtaccagctgcgggatagcaagagcagcgacaagagcgtgtgtctgttcaccgacttcgacagccagaccaacgtgtcccagagcaaggactccgacgtgtacatcaccgataagtgcgtgctggacatgcggagcatggacttcaagagcaactccgccgtggcctggtccaacaagtccgatttcgcctgcgccaacgccttcaacaacagcattatccccgaggacacattcttcccaagccccgagagcagctgcggctttaccagcgagagctaccagcagggcgtgctgagcgccaccatcctgtacgagatcctgctgggcaaggccaccctgtacgccgtgctggtgtctgccctggtgctgatggctatggtcaagcggaaggacagccggggacgcgccaagagaagcggatctggcgtgaagcagaccctgaatttcgacctgctgaagctggctggcgacgtggaatccaacccaggccctactagtatggactggatttggcgcatccttttccttgtcggcgctgctaccggcgcgcattccttcgaagaagttcagctggttgaaagtggtggcggcctggttcaacctggcggatctctgagactgagctgtgccgccagcggcttcaatgtgtacgcctctggaatgcactgggtccgacaggcccctggcaaaggacttgagtgggtcgccaaaatctaccccgacagcgactacacctattacgccgacagcgtgaagggcagattcaccatcagcgccgacaccagcaagaacaccgcctacctccagatgaactccctgagagccgaggacaccgccgtgtactactgtagcagagacagcagcttctactacgtgtacgctatggactactggggccagggcacactggtcacagtctcttctacgcgtgaggacctgaagaacgtgttcccacctgaggtggccgtgttcgagcctagcgaggccgagatcagccacacccagaaagccaccctcgtgtgcctggctaccggcttctaccccgaccatgtggaactgtcttggtgggtcaacggcaaagaggtgcacagcggcgtgtgtaccgacccccagccactgaaagaacagcccgccctgaacgacagccggtactgcctgagcagcagactgagagtgtccgccaccttctggcagaacccccggaaccacttcagatgccaggtgcagttctacggcctgagcgagaacgacgagtggacccaggacagagccaagcccgtgacccagatcgtgtctgccgaagcctggggcagagccgattgcgacgtgaagctggtggaaaagagcttcgagacagacaccaacctgaacttccagaacctgagcgtgatcggcttcagaatcctgctgctgaaagtggccggctttaacctgctgatgaccctgcggctgtggtccagc

SEQ ID NO: 39266 - DNA, 3399 bp, synthetic construct
  source 1..3399: mol_type = other DNA
atggccttaccagtgaccgccttgctcctgccgctggccttgctgctccacgccgccaggccggaagtgcagctggttgaatctggcggaggactggttcaggctggcggatctctgagactgtcttgtgccgccagcggcagaacctttagcatgggctggtttagacaggcccctggcaaagagagagagttcgtcgccgccatcacatactctggcggcagcccttactacgccgactctgtgaagggcagattcaccatcagccgggacaacgccaagaacaccgtgtacctccagatgaacagcctgaagcctgaggacaccgccgtgtactactgcgccgccaatccaacatacggcagcgactggaacgccgagaattggggccagggaacccaagtgacagtgtctagcggtaccggcggaggcggatctggcggcggaggtagcggtggcggaggatctgaattcgacatccagatgacacagagccctagcagcctgtctgccagcgtgggagacagagtgaccatcacctgtagagccagccaggacatcaacacagccgtggcttggtatcagcagaagcctggcaaggcccctaagctgctgatctacagcgcctacttcctgtacagcggcgtgcccagcagattcagcggaagcagaagcggcaccgacttcaccctgacaatatccagcctccagcctgaggacttcgccacctactactgccagcagtacagcagatacagccccgtgacctttggacagggcaccaaggtggaaatcaagagactcgaggacctgaagaacgtgttcccacctgaggtggccgtgttcgagcctagcgaggccgagatcagccacacccagaaagccaccctcgtgtgcctggctaccggcttctaccccgaccatgtggaactgtcttggtgggtcaacggcaaagaggtgcacagcggcgtgtgtaccgacccccagccactgaaagaacagcccgccctgaacgacagccggtactgcctgagcagcagactgagagtgtccgccaccttctggcagaacccccggaaccacttcagatgccaggtgcagttctacggcctgagcgagaacgacgagtggacccaggacagagccaagcccgtgacccagatcgtgtctgccgaagcctggggcagagccgattgcgacgtgaagctggtggaaaagagcttcgagacagacaccaacctgaacttccagaacctgagcgtgatcggcttcagaatcctgctgctgaaagtggccggctttaacctgctgatgaccctgcggctgtggtccagcagggccaagcgatctggatctggagcaacaaacttctcactactcaaacaagcaggtgacgtggaggagaatcccgggcctactagtgccaccatggactggatttggcgcatccttttccttgtcggcgctgctaccggcgcccattccgggcccgaagtgcaactggttgaatccggtggcggcctggtgcaagcaggcggatctctcagacttagctgtgccgcctccggcagaaccttcacaatgggatggtttaggcaggctccagggaaagagagagagttcgtcgccgccatctctctgtctcccacactggcctactacgccgactctgtgaaaggccggttcaccatctccagagataatgccaagaacaccgtggtgctgcaaatgaactctctgaaacccgaggatacagccctgtactattgtgccgctgaccggaagtccgtgatgagcatcagacccgattactggggacagggcacacaagtcacagtgtcctctggatccggcggcggaggatctggcggaggcggatctgggggcggaggctctttcgaagaagttcagctggttgaaagtggtggcggcctggttcaacctggcggatctctgagactgagctgtgccgccagcggcttcaatgtgtacgcctctggaatgcactgggtccgacaggcccctggcaaaggacttgagtgggtcgccaaaatctaccccgacagcgactacacctattacgccgacagcgtgaagggcagattcaccatcagcgccgacaccagcaagaacaccgcctacctccagatgaactccctgagagccgaggacaccgccgtgtactactgtagcagagacagcagcttctactacgtgtacgctatggactactggggccagggcacactggtcacagtctcttctacgcgtatccagaaccctgatcctgccgtgtaccagctgcgggatagcaagagcagcgacaagagcgtgtgtctgttcaccgacttcgacagccagaccaacgtgtcccagagcaaggactccgacgtgtacatcaccgataagtgcgtgctggacatgcggagcatggacttcaagagcaactccgccgtggcctggtccaacaagtccgatttcgcctgcgccaacgccttcaacaacagcattatccccgaggacacattcttcccaagccccgagagcagctgcggctttaccagcgagagctaccagcagggcgtgctgagcgccaccatcctgtacgagatcctgctgggcaaggccaccctgtacgccgtgctggtgtctgccctggtgctgatggctatggtcaagcggaaggacagccggggacgcgccaagagaagcggatctggcgtgaagcagaccctgaatttcgacctgctgaagctggctggcgacgtggaatccaacccaggcccttctagaggccatatgaccgagtacaagcccacggtgcgcctcgccacccgcgacgacgtccccagggccgtacgcaccctcgccgccgcgttcgccgactaccccgccacgcgccacaccgtcgatccggaccgccacatcgagcgggtcaccgagctgcaagaactcttcctcacgcgcgtcgggctcgacatcggcaaggtgtgggtcgcggacgacggcgccgcggtggcggtctggaccacgccggagagcgtcgaagcgggggcggtgttcgccgagatcggcccgcgcatggccgagttgagcggttcccggctggccgcgcagcaacagatggaaggcctcctggcgccgcaccggcccaaggagcccgcgtggttcctggccaccgtcggcgtctcgcccgaccaccagggcaagggtctgggcagcgccgtcgtgctccccggagtggaggcggccgagcgcgccggggtgcccgccttcctggagacctccgcgccccgcaacctccccttctacgagcggctcggcttcaccgtcaccgccgacgtcgaggtgcccgaaggaccgcgcacctggtgcatgacccgcaagcccggtgcctga

SEQ ID NO: 39267 - DNA, 2313 bp, synthetic construct
  source 1..2313: mol_type = other DNA
atggccttaccagtgaccgccttgctcctgccgctggccttgctgctccacgccgccaggccggaagtgcagctggttgaatctggcggaggactggttcagcctggcggatctctgagactgtcttgtgccgcctctggcttcgccagcgactactatatcatcggctggttcagacaggcccctggcaaagagagagagggcgtcagctgtatcagcagcagatacgccaacaccaactacgccgacagcgtgaagggcagattcaccatcagccgggacaacgccaagaacaccgtgtacctccagatgaacagcctgaagcctgaggacaccgccgtgtactactgtgccgccgacaccagaagatacacctgtcctgacattgccaccatgcaccggaacttcgattcttggggccagggcacactggtcaccgtttcttctggtaccggcggaggcggatctggcggcggaggtagcggtggcggaggatctgaattcgacatccagatgacacagagccctagcagcctgtctgccagcgtgggagacagagtgaccatcacctgtagagccagccaggacatcaacacagccgtggcttggtatcagcagaagcctggcaaggcccctaagctgctgatctacagcgcctacttcctgtacagcggcgtgcccagcagattcagcggaagcagaagcggcaccgacttcaccctgacaatatccagcctccagcctgaggacttcgccacctactactgccagcagtacagcagatacagccccgtgacctttggacagggcaccaaggtggaaatcaagagactcgaggacctgaagaacgtgttcccacctgaggtggccgtgttcgagcctagcgaggccgagatcagccacacccagaaagccaccctcgtgtgcctggctaccggcttctaccccgaccatgtggaactgtcttggtgggtcaacggcaaagaggtgcacagcggcgtgtgtaccgacccccagccactgaaagaacagcccgccctgaacgacagccggtactgcctgagcagcagactgagagtgtccgccaccttctggcagaacccccggaaccacttcagatgccaggtgcagttctacggcctgagcgagaacgacgagtggacccaggacagagccaagcccgtgacccagatcgtgtctgccgaagcctggggcagagccgattgcgacgtgaagctggtggaaaagagcttcgagacagacaccaacctgaacttccagaacctgagcgtgatcggcttcagaatcctgctgctgaaagtggccggctttaacctgctgatgaccctgcggctgtggtccagcagggccaagcgatctggatctggagcaacaaacttctcactactcaaacaagcaggtgacgtggaggagaatcccgggcctactagtatggactggatttggcgcatccttttccttgtcggcgctgctaccggcgcgcattccttcgaagaagttcagctggttgaaagtggtggcggcctggttcaacctggcggatctctgagactgagctgtgccgccagcggcttcaatgtgtacgcctctggaatgcactgggtccgacaggcccctggcaaaggacttgagtgggtcgccaaaatctaccccgacagcgactacacctattacgccgacagcgtgaagggcagattcaccatcagcgccgacaccagcaagaacaccgcctacctccagatgaactccctgagagccgaggacaccgccgtgtactactgtagcagagacagcagcttctactacgtgtacgctatggactactggggccagggcacactggtcacagtctcttctacgcgtatccagaaccctgatcctgccgtgtaccagctgcgggatagcaagagcagcgacaagagcgtgtgtctgttcaccgacttcgacagccagaccaacgtgtcccagagcaaggactccgacgtgtacatcaccgataagtgcgtgctggacatgcggagcatggacttcaagagcaactccgccgtggcctggtccaacaagtccgatttcgcctgcgccaacgccttcaacaacagcattatccccgaggacacattcttcccaagccccgagagcagctgcggctttaccagcgagagctaccagcagggcgtgctgagcgccaccatcctgtacgagatcctgctgggcaaggccaccctgtacgccgtgctggtgtctgccctggtgctgatggctatggtcaagcggaaggacagccggggataa

SEQ ID NO: 39268 - DNA, 2313 bp, synthetic construct
  source 1..2313: mol_type = other DNA
atggccttaccagtgaccgccttgctcctgccgctggccttgctgctccacgccgccaggccggaagtgcagctggttgaatctggcggaggactggttcagcctggcggatctctgagactgagctgtgaagccagcggcttcgccagcgacgattacatcatcggctggttcagacaggcccctggcaaagagagagagggcgtcagctgcatcagctctaagtacgccaacaccgtgtacaccgacagcgtgaagggcagattcagactgagcagaggcaccgccaagaataccgtgtacctccagatgagcgccctgaagcctgaggataccgccgtgtactactgcgctatggacagccgcagagtgacatgccctgagatcagcaccatgcaccggaacttcgattcttggggccagggcacactggtcacagtgtcatctggtaccggcggaggcggatctggcggcggaggtagcggtggcggaggatctgaattcgacatccagatgacacagagccctagcagcctgtctgccagcgtgggagacagagtgaccatcacctgtagagccagccaggacatcaacacagccgtggcttggtatcagcagaagcctggcaaggcccctaagctgctgatctacagcgcctacttcctgtacagcggcgtgcccagcagattcagcggaagcagaagcggcaccgacttcaccctgacaatatccagcctccagcctgaggacttcgccacctactactgccagcagtacagcagatacagccccgtgacctttggacagggcaccaaggtggaaatcaagagactcgaggacctgaagaacgtgttcccacctgaggtggccgtgttcgagcctagcgaggccgagatcagccacacccagaaagccaccctcgtgtgcctggctaccggcttctaccccgaccatgtggaactgtcttggtgggtcaacggcaaagaggtgcacagcggcgtgtgtaccgacccccagccactgaaagaacagcccgccctgaacgacagccggtactgcctgagcagcagactgagagtgtccgccaccttctggcagaacccccggaaccacttcagatgccaggtgcagttctacggcctgagcgagaacgacgagtggacccaggacagagccaagcccgtgacccagatcgtgtctgccgaagcctggggcagagccgattgcgacgtgaagctggtggaaaagagcttcgagacagacaccaacctgaacttccagaacctgagcgtgatcggcttcagaatcctgctgctgaaagtggccggctttaacctgctgatgaccctgcggctgtggtccagcagggccaagcgatctggatctggagcaacaaacttctcactactcaaacaagcaggtgacgtggaggagaatcccgggcctactagtatggactggatttggcgcatccttttccttgtcggcgctgctaccggcgcgcattccttcgaagaagttcagctggttgaaagtggtggcggcctggttcaacctggcggatctctgagactgagctgtgccgccagcggcttcaatgtgtacgcctctggaatgcactgggtccgacaggcccctggcaaaggacttgagtgggtcgccaaaatctaccccgacagcgactacacctattacgccgacagcgtgaagggcagattcaccatcagcgccgacaccagcaagaacaccgcctacctccagatgaactccctgagagccgaggacaccgccgtgtactactgtagcagagacagcagcttctactacgtgtacgctatggactactggggccagggcacactggtcacagtctcttctacgcgtatccagaaccctgatcctgccgtgtaccagctgcgggatagcaagagcagcgacaagagcgtgtgtctgttcaccgacttcgacagccagaccaacgtgtcccagagcaaggactccgacgtgtacatcaccgataagtgcgtgctggacatgcggagcatggacttcaagagcaactccgccgtggcctggtccaacaagtccgatttcgcctgcgccaacgccttcaacaacagcattatccccgaggacacattcttcccaagccccgagagcagctgcggctttaccagcgagagctaccagcagggcgtgctgagcgccaccatcctgtacgagatcctgctgggcaaggccaccctgtacgccgtgctggtgtctgccctggtgctgatggctatggtcaagcggaaggacagccggggataa

SEQ ID NO: 39269 - DNA, 2310 bp, synthetic construct
  source 1..2310: mol_type = other DNA
atggccttaccagtgaccgccttgctcctgccgctggccttgctgctccacgccgccaggccggaagtgcagctggttgaatctggcggaggactggttcagcctggcggatctctgagactgtcttgtgccgcctctggcttcgccagcgactactatatcatcggctggttcagacaggcccctggcaaagagagagagggcgtcagctgtatcagcagcagatacgccaacaccaactacgccgacagcgtgaagggcagattcaccatcagccgggacaacgccaagaacaccgtgtacctccagatgaacagcctgaagcctgaggacaccgccgtgtactactgtgccgccgacaccagaagatacacctgtcctgacattgccaccatgcaccggaacttcgattcttggggccagggcacactggtcaccgtttcttctggtaccggcggaggcggatctggcggcggaggtagcggtggcggaggatctgaattcgacatccagatgacacagagccctagcagcctgtctgccagcgtgggagacagagtgaccatcacctgtagagccagccaggacatcaacacagccgtggcttggtatcagcagaagcctggcaaggcccctaagctgctgatctacagcgcctacttcctgtacagcggcgtgcccagcagattcagcggaagcagaagcggcaccgacttcaccctgacaatatccagcctccagcctgaggacttcgccacctactactgccagcagtacagcagatacagccccgtgacctttggacagggcaccaaggtggaaatcaagagactcgagatccagaaccctgatcctgccgtgtaccagctgcgggatagcaagagcagcgacaagagcgtgtgtctgttcaccgacttcgacagccagaccaacgtgtcccagagcaaggactccgacgtgtacatcaccgataagtgcgtgctggacatgcggagcatggacttcaagagcaactccgccgtggcctggtccaacaagtccgatttcgcctgcgccaacgccttcaacaacagcattatccccgaggacacattcttcccaagccccgagagcagctgcggctttaccagcgagagctaccagcagggcgtgctgagcgccaccatcctgtacgagatcctgctgggcaaggccaccctgtacgccgtgctggtgtctgccctggtgctgatggctatggtcaagcggaaggacagccggggaagggccaagcgatctggatctggagcaacaaacttctcactactcaaacaagcaggtgacgtggaggagaatcccgggcctactagtatggactggatttggcgcatccttttccttgtcggcgctgctaccggcgcgcattccttcgaagaagttcagctggttgaaagtggtggcggcctggttcaacctggcggatctctgagactgagctgtgccgccagcggcttcaatgtgtacgcctctggaatgcactgggtccgacaggcccctggcaaaggacttgagtgggtcgccaaaatctaccccgacagcgactacacctattacgccgacagcgtgaagggcagattcaccatcagcgccgacaccagcaagaacaccgcctacctccagatgaactccctgagagccgaggacaccgccgtgtactactgtagcagagacagcagcttctactacgtgtacgctatggactactggggccagggcacactggtcacagtctcttctacgcgtgacctgaagaacgtgttcccacctgaggtggccgtgttcgagcctagcgaggccgagatcagccacacccagaaagccaccctcgtgtgcctggctaccggcttctaccccgaccatgtggaactgtcttggtgggtcaacggcaaagaggtgcacagcggcgtgtgtaccgacccccagccactgaaagaacagcccgccctgaacgacagccggtactgcctgagcagcagactgagagtgtccgccaccttctggcagaacccccggaaccacttcagatgccaggtgcagttctacggcctgagcgagaacgacgagtggacccaggacagagccaagcccgtgacccagatcgtgtctgccgaagcctggggcagagccgattgcgacgtgaagctggtggaaaagagcttcgagacagacaccaacctgaacttccagaacctgagcgtgatcggcttcagaatcctgctgctgaaagtggccggctttaacctgctgatgaccctgcggctgtggtccagc

SEQ ID NO: 39270 - DNA, 2310 bp, synthetic construct
  source 1..2310: mol_type = other DNA
atggccttaccagtgaccgccttgctcctgccgctggccttgctgctccacgccgccaggccggaagtgcagctggttgaatctggcggaggactggttcagcctggcggatctctgagactgagctgtgaagccagcggcttcgccagcgacgattacatcatcggctggttcagacaggcccctggcaaagagagagagggcgtcagctgcatcagctctaagtacgccaacaccgtgtacaccgacagcgtgaagggcagattcagactgagcagaggcaccgccaagaataccgtgtacctccagatgagcgccctgaagcctgaggataccgccgtgtactactgcgctatggacagccgcagagtgacatgccctgagatcagcaccatgcaccggaacttcgattcttggggccagggcacactggtcacagtgtcatctggtaccggcggaggcggatctggcggcggaggtagcggtggcggaggatctgaattcgacatccagatgacacagagccctagcagcctgtctgccagcgtgggagacagagtgaccatcacctgtagagccagccaggacatcaacacagccgtggcttggtatcagcagaagcctggcaaggcccctaagctgctgatctacagcgcctacttcctgtacagcggcgtgcccagcagattcagcggaagcagaagcggcaccgacttcaccctgacaatatccagcctccagcctgaggacttcgccacctactactgccagcagtacagcagatacagccccgtgacctttggacagggcaccaaggtggaaatcaagagactcgagatccagaaccctgatcctgccgtgtaccagctgcgggatagcaagagcagcgacaagagcgtgtgtctgttcaccgacttcgacagccagaccaacgtgtcccagagcaaggactccgacgtgtacatcaccgataagtgcgtgctggacatgcggagcatggacttcaagagcaactccgccgtggcctggtccaacaagtccgatttcgcctgcgccaacgccttcaacaacagcattatccccgaggacacattcttcccaagccccgagagcagctgcggctttaccagcgagagctaccagcagggcgtgctgagcgccaccatcctgtacgagatcctgctgggcaaggccaccctgtacgccgtgctggtgtctgccctggtgctgatggctatggtcaagcggaaggacagccggggaagggccaagcgatctggatctggagcaacaaacttctcactactcaaacaagcaggtgacgtggaggagaatcccgggcctactagtatggactggatttggcgcatccttttccttgtcggcgctgctaccggcgcgcattccttcgaagaagttcagctggttgaaagtggtggcggcctggttcaacctggcggatctctgagactgagctgtgccgccagcggcttcaatgtgtacgcctctggaatgcactgggtccgacaggcccctggcaaaggacttgagtgggtcgccaaaatctaccccgacagcgactacacctattacgccgacagcgtgaagggcagattcaccatcagcgccgacaccagcaagaacaccgcctacctccagatgaactccctgagagccgaggacaccgccgtgtactactgtagcagagacagcagcttctactacgtgtacgctatggactactggggccagggcacactggtcacagtctcttctacgcgtgacctgaagaacgtgttcccacctgaggtggccgtgttcgagcctagcgaggccgagatcagccacacccagaaagccaccctcgtgtgcctggctaccggcttctaccccgaccatgtggaactgtcttggtgggtcaacggcaaagaggtgcacagcggcgtgtgtaccgacccccagccactgaaagaacagcccgccctgaacgacagccggtactgcctgagcagcagactgagagtgtccgccaccttctggcagaacccccggaaccacttcagatgccaggtgcagttctacggcctgagcgagaacgacgagtggacccaggacagagccaagcccgtgacccagatcgtgtctgccgaagcctggggcagagccgattgcgacgtgaagctggtggaaaagagcttcgagacagacaccaacctgaacttccagaacctgagcgtgatcggcttcagaatcctgctgctgaaagtggccggctttaacctgctgatgaccctgcggctgtggtccagc

SEQ ID NO: 39271 - DNA, 2283 bp, synthetic construct
  source 1..2283: mol_type = other DNA
atggccttaccagtgaccgccttgctcctgccgctggccttgctgctccacgccgccaggccgcaagtcaaactggaagaaagcggtggcggcctggtgcaacctggcgaatctctgagactgagctgtagcgccagcggctccatcttcaaggtgttcagagtgttcgccatgagctggtacaggcaaggccctggcaagcagagagagctggtcgcctctatcagcagcggcgagacaaccacatacgccgaatctgtgaaaggccggttcaccatcagccgggataatgccaagaataccgcctatctccagatggactccctgaagcctgaagatacagctgtgtactactgcaacgccgaccataccttcaccggcgatttttggggccagggaacccaagtgaccgtgtctagtggtaccggcggaggcggatctggcggcggaggtagcggtggcggaggatctgaattcgacatccagatgacacagagccctagcagcctgtctgccagcgtgggagacagagtgaccatcacctgtagagccagccaggacatcaacacagccgtggcttggtatcagcagaagcctggcaaggcccctaagctgctgatctacagcgcctacttcctgtacagcggcgtgcccagcagattcagcggaagcagaagcggcaccgacttcaccctgacaatatccagcctccagcctgaggacttcgccacctactactgccagcagtacagcagatacagccccgtgacctttggacagggcaccaaggtggaaatcaagagactcgagatccagaaccctgatcctgccgtgtaccagctgcgggatagcaagagcagcgacaagagcgtgtgtctgttcaccgacttcgacagccagaccaacgtgtcccagagcaaggactccgacgtgtacatcaccgataagtgcgtgctggacatgcggagcatggacttcaagagcaactccgccgtggcctggtccaacaagtccgatttcgcctgcgccaacgccttcaacaacagcattatccccgaggacacattcttcccaagccccgagagcagctgcggctttaccagcgagagctaccagcagggcgtgctgagcgccaccatcctgtacgagatcctgctgggcaaggccaccctgtacgccgtgctggtgtctgccctggtgctgatggctatggtcaagcggaaggacagccggggaagggccaagcgatctggatctggagcaacaaacttctcactactcaaacaagcaggtgacgtggaggagaatcccgggcctactagtatggactggatttggcgcatccttttccttgtcggcgctgctaccggcgcgcattccttcgaagaagttcagctggttgaaagtggtggcggcctggttcaacctggcggatctctgagactgagctgtgccgccagcggcttcaatgtgtacgcctctggaatgcactgggtccgacaggcccctggcaaaggacttgagtgggtcgccaaaatctaccccgacagcgactacacctattacgccgacagcgtgaagggcagattcaccatcagcgccgacaccagcaagaacaccgcctacctccagatgaactccctgagagccgaggacaccgccgtgtactactgtagcagagacagcagcttctactacgtgtacgctatggactactggggccagggcacactggtcacagtctcttctacgcgtgacctgaagaacgtgttcccacctgaggtggccgtgttcgagcctagcgaggccgagatcagccacacccagaaagccaccctcgtgtgcctggctaccggcttctaccccgaccatgtggaactgtcttggtgggtcaacggcaaagaggtgcacagcggcgtgtgtaccgacccccagccactgaaagaacagcccgccctgaacgacagccggtactgcctgagcagcagactgagagtgtccgccaccttctggcagaacccccggaaccacttcagatgccaggtgcagttctacggcctgagcgagaacgacgagtggacccaggacagagccaagcccgtgacccagatcgtgtctgccgaagcctggggcagagccgattgcgacgtgaagctggtggaaaagagcttcgagacagacaccaacctgaacttccagaacctgagcgtgatcggcttcagaatcctgctgctgaaagtggccggctttaacctgctgatgaccctgcggctgtggtccagc

SEQ ID NO: 39272 - DNA, 2289 bp, synthetic construct
  source 1..2289: mol_type = other DNA
atggccttaccagtgaccgccttgctcctgccgctggccttgctgctccacgccgccaggccggacatccagatgacacagagccctagcagcctgtctgccagcgtgggagacagagtgaccatcacctgtagagccagccaggacatcaacacagccgtggcttggtatcagcagaagcctggcaaggcccctaagctgctgatctacagcgcctacttcctgtacagcggcgtgcccagcagattcagcggaagcagaagcggcaccgacttcaccctgacaatatccagcctccagcctgaggacttcgccacctactactgccagcagtacagcagatacagccccgtgacctttggacagggcaccaaggtggaaatcaagagactcgaggacctgaagaacgtgttcccacctgaggtggccgtgttcgagcctagcgaggccgagatcagccacacccagaaagccaccctcgtgtgcctggctaccggcttctaccccgaccatgtggaactgtcttggtgggtcaacggcaaagaggtgcacagcggcgtgtgtaccgacccccagccactgaaagaacagcccgccctgaacgacagccggtactgcctgagcagcagactgagagtgtccgccaccttctggcagaacccccggaaccacttcagatgccaggtgcagttctacggcctgagcgagaacgacgagtggacccaggacagagccaagcccgtgacccagatcgtgtctgccgaagcctggggcagagccgattgcgacgtgaagctggtggaaaagagcttcgagacagacaccaacctgaacttccagaacctgagcgtgatcggcttcagaatcctgctgctgaaagtggccggctttaacctgctgatgaccctgcggctgtggtccagcagggccaagcgatctggatctggagcaacaaacttctcactactcaaacaagcaggtgacgtggaggagaatcccgggcctactagtgccaccatggactggatttggcgcatccttttccttgtcggcgctgctaccggcgcccattccgggcccgaagtgcagctggttgaatctggcggaggactggttcaggctggcggatctctgagactgtcttgtgccgccagcggcagaacctttagcatgggctggtttagacaggcccctggcaaagagagagagttcgtcgccgccatcacatactctggcggcagcccttactacgccgactctgtgaagggcagattcaccatcagccgggacaacgccaagaacaccgtgtacctccagatgaacagcctgaagcctgaggacaccgccgtgtactactgcgccgccaatccaacatacggcagcgactggaacgccgagaattggggccagggaacccaagtgacagtgtctagcggatccggcggcggaggatctggcggaggcggatctgggggcggaggctctttcgaagaagttcagctggttgaaagtggtggcggcctggttcaacctggcggatctctgagactgagctgtgccgccagcggcttcaatgtgtacgcctctggaatgcactgggtccgacaggcccctggcaaaggacttgagtgggtcgccaaaatctaccccgacagcgactacacctattacgccgacagcgtgaagggcagattcaccatcagcgccgacaccagcaagaacaccgcctacctccagatgaactccctgagagccgaggacaccgccgtgtactactgtagcagagacagcagcttctactacgtgtacgctatggactactggggccagggcacactggtcacagtctcttctacgcgtatccagaaccctgatcctgccgtgtaccagctgcgggatagcaagagcagcgacaagagcgtgtgtctgttcaccgacttcgacagccagaccaacgtgtcccagagcaaggactccgacgtgtacatcaccgataagtgcgtgctggacatgcggagcatggacttcaagagcaactccgccgtggcctggtccaacaagtccgatttcgcctgcgccaacgccttcaacaacagcattatccccgaggacacattcttcccaagccccgagagcagctgcggctttaccagcgagagctaccagcagggcgtgctgagcgccaccatcctgtacgagatcctgctgggcaaggccaccctgtacgccgtgctggtgtctgccctggtgctgatggctatggtcaagcggaaggacagccggggataa

SEQ ID NO: 39273 - DNA, 2292 bp, synthetic construct
  source 1..2292: mol_type = other DNA
atggccttaccagtgaccgccttgctcctgccgctggccttgctgctccacgccgccaggccggacatccagatgacacagagccctagcagcctgtctgccagcgtgggagacagagtgaccatcacctgtagagccagccaggacatcaacacagccgtggcttggtatcagcagaagcctggcaaggcccctaagctgctgatctacagcgcctacttcctgtacagcggcgtgcccagcagattcagcggaagcagaagcggcaccgacttcaccctgacaatatccagcctccagcctgaggacttcgccacctactactgccagcagtacagcagatacagccccgtgacctttggacagggcaccaaggtggaaatcaagagactcgaggacctgaagaacgtgttcccacctgaggtggccgtgttcgagcctagcgaggccgagatcagccacacccagaaagccaccctcgtgtgcctggctaccggcttctaccccgaccatgtggaactgtcttggtgggtcaacggcaaagaggtgcacagcggcgtgtgtaccgacccccagccactgaaagaacagcccgccctgaacgacagccggtactgcctgagcagcagactgagagtgtccgccaccttctggcagaacccccggaaccacttcagatgccaggtgcagttctacggcctgagcgagaacgacgagtggacccaggacagagccaagcccgtgacccagatcgtgtctgccgaagcctggggcagagccgattgcgacgtgaagctggtggaaaagagcttcgagacagacaccaacctgaacttccagaacctgagcgtgatcggcttcagaatcctgctgctgaaagtggccggctttaacctgctgatgaccctgcggctgtggtccagcagggccaagcgatctggatctggagcaacaaacttctcactactcaaacaagcaggtgacgtggaggagaatcccgggcctactagtgccaccatggactggatttggcgcatccttttccttgtcggcgctgctaccggcgcccattccgggcccgaagtgcaactggtggaatctgggggcggactggtgcagccaggcggaagtctgaggctgtcttgtgccgcctccggcagcatcttcggcttcaacgacatggcctggtatcggcaggctcccggaaaacagcgcgagctggtggctctgattagcagagtgggcgtgaccagcagcgccgactctgtgaagggcagattcacaatctccagagtgaacgccaaggatacagtgtacctccagatgaactctctgaaacctgaggatacagcagtgtactattgctacatggaccagcggctggacggcagcacactggcctactggggacagggaactcaagtgacagtgtctagcggatccggcggcggaggatctggcggaggcggatctgggggcggaggctctttcgaagaagttcagctggttgaaagtggtggcggcctggttcaacctggcggatctctgagactgagctgtgccgccagcggcttcaatgtgtacgcctctggaatgcactgggtccgacaggcccctggcaaaggacttgagtgggtcgccaaaatctaccccgacagcgactacacctattacgccgacagcgtgaagggcagattcaccatcagcgccgacaccagcaagaacaccgcctacctccagatgaactccctgagagccgaggacaccgccgtgtactactgtagcagagacagcagcttctactacgtgtacgctatggactactggggccagggcacactggtcacagtctcttctacgcgtatccagaaccctgatcctgccgtgtaccagctgcgggatagcaagagcagcgacaagagcgtgtgtctgttcaccgacttcgacagccagaccaacgtgtcccagagcaaggactccgacgtgtacatcaccgataagtgcgtgctggacatgcggagcatggacttcaagagcaactccgccgtggcctggtccaacaagtccgatttcgcctgcgccaacgccttcaacaacagcattatccccgaggacacattcttcccaagccccgagagcagctgcggctttaccagcgagagctaccagcagggcgtgctgagcgccaccatcctgtacgagatcctgctgggcaaggccaccctgtacgccgtgctggtgtctgccctggtgctgatggctatggtcaagcggaaggacagccggggataa

SEQ ID NO: 39274 - DNA, 2280 bp, synthetic construct
  source 1..2280: mol_type = other DNA
atggccttaccagtgaccgccttgctcctgccgctggccttgctgctccacgccgccaggccggacatccagatgacacagagccctagcagcctgtctgccagcgtgggagacagagtgaccatcacctgtagagccagccaggacatcaacacagccgtggcttggtatcagcagaagcctggcaaggcccctaagctgctgatctacagcgcctacttcctgtacagcggcgtgcccagcagattcagcggaagcagaagcggcaccgacttcaccctgacaatatccagcctccagcctgaggacttcgccacctactactgccagcagtacagcagatacagccccgtgacctttggacagggcaccaaggtggaaatcaagagactcgaggacctgaagaacgtgttcccacctgaggtggccgtgttcgagcctagcgaggccgagatcagccacacccagaaagccaccctcgtgtgcctggctaccggcttctaccccgaccatgtggaactgtcttggtgggtcaacggcaaagaggtgcacagcggcgtgtgtaccgacccccagccactgaaagaacagcccgccctgaacgacagccggtactgcctgagcagcagactgagagtgtccgccaccttctggcagaacccccggaaccacttcagatgccaggtgcagttctacggcctgagcgagaacgacgagtggacccaggacagagccaagcccgtgacccagatcgtgtctgccgaagcctggggcagagccgattgcgacgtgaagctggtggaaaagagcttcgagacagacaccaacctgaacttccagaacctgagcgtgatcggcttcagaatcctgctgctgaaagtggccggctttaacctgctgatgaccctgcggctgtggtccagcagggccaagcgatctggatctggagcaacaaacttctcactactcaaacaagcaggtgacgtggaggagaatcccgggcctactagtgccaccatggactggatttggcgcatccttttccttgtcggcgctgctaccggcgcccattccgggcccgaggtgcagctggttgaatctggcggaggactggttcaggctggcggatctctgagactgtcttgtgccgccagcggctctgtgttcagcggcaatgtgatgggctggtacagacaggcccctggcaaagaaagagagtgggttgccgccattgccagcggcggcagcatctactacagagactctgtgaagggcagattcaccatcagccgggacaacgccaagaacaccgtgtacctccagatgaacagcctgaagcctgaggacaccgccgtgtactactgcaactctcaccctcctacactgccctattggggcctgggaacccaagtgacagtgtcctctggatccggcggcggaggatctggcggaggcggatctgggggcggaggctctttcgaagaagttcagctggttgaaagtggtggcggcctggttcaacctggcggatctctgagactgagctgtgccgccagcggcttcaatgtgtacgcctctggaatgcactgggtccgacaggcccctggcaaaggacttgagtgggtcgccaaaatctaccccgacagcgactacacctattacgccgacagcgtgaagggcagattcaccatcagcgccgacaccagcaagaacaccgcctacctccagatgaactccctgagagccgaggacaccgccgtgtactactgtagcagagacagcagcttctactacgtgtacgctatggactactggggccagggcacactggtcacagtctcttctacgcgtatccagaaccctgatcctgccgtgtaccagctgcgggatagcaagagcagcgacaagagcgtgtgtctgttcaccgacttcgacagccagaccaacgtgtcccagagcaaggactccgacgtgtacatcaccgataagtgcgtgctggacatgcggagcatggacttcaagagcaactccgccgtggcctggtccaacaagtccgatttcgcctgcgccaacgccttcaacaacagcattatccccgaggacacattcttcccaagccccgagagcagctgcggctttaccagcgagagctaccagcagggcgtgctgagcgccaccatcctgtacgagatcctgctgggcaaggccaccctgtacgccgtgctggtgtctgccctggtgctgatggctatggtcaagcggaaggacagccggggataa

SEQ ID NO: 39275 - DNA, 2274 bp, synthetic construct
  source 1..2274: mol_type = other DNA
atggccttaccagtgaccgccttgctcctgccgctggccttgctgctccacgccgccaggccggacatccagatgacacagagccctagcagcctgtctgccagcgtgggagacagagtgaccatcacctgtagagccagccaggacatcaacacagccgtggcttggtatcagcagaagcctggcaaggcccctaagctgctgatctacagcgcctacttcctgtacagcggcgtgcccagcagattcagcggaagcagaagcggcaccgacttcaccctgacaatatccagcctccagcctgaggacttcgccacctactactgccagcagtacagcagatacagccccgtgacctttggacagggcaccaaggtggaaatcaagagactcgaggacctgaagaacgtgttcccacctgaggtggccgtgttcgagcctagcgaggccgagatcagccacacccagaaagccaccctcgtgtgcctggctaccggcttctaccccgaccatgtggaactgtcttggtgggtcaacggcaaagaggtgcacagcggcgtgtgtaccgacccccagccactgaaagaacagcccgccctgaacgacagccggtactgcctgagcagcagactgagagtgtccgccaccttctggcagaacccccggaaccacttcagatgccaggtgcagttctacggcctgagcgagaacgacgagtggacccaggacagagccaagcccgtgacccagatcgtgtctgccgaagcctggggcagagccgattgcgacgtgaagctggtggaaaagagcttcgagacagacaccaacctgaacttccagaacctgagcgtgatcggcttcagaatcctgctgctgaaagtggccggctttaacctgctgatgaccctgcggctgtggtccagcagggccaagcgatctggatctggagcaacaaacttctcactactcaaacaagcaggtgacgtggaggagaatcccgggcctactagtgccaccatggactggatttggcgcatccttttccttgtcggcgctgctaccggcgcccattccgggcccgaagttcagctgctggaatctggcggaggactcgttcaacctggcggctctctgagactgagctgtgccgcttctggcttcagcttctctagctacgccctgagctgggttcgacaagctcccggaaagggccttgaatgggtgtccagcatcggcgagaatgacggcaccacagactatgccgatgccgtgaaaggccggtttaccatcagcagagacaattccaagaacacgctctatctgcaaatgaactccctgcgcgtggaagatacagccgtgtattattgcgtgaaggacggcatccactggggacagggaaccctggttacagtgtctagcggatccggcggcggaggatctggcggaggcggatctgggggcggaggctctttcgaagaagttcagctggttgaaagtggtggcggcctggttcaacctggcggatctctgagactgagctgtgccgccagcggcttcaatgtgtacgcctctggaatgcactgggtccgacaggcccctggcaaaggacttgagtgggtcgccaaaatctaccccgacagcgactacacctattacgccgacagcgtgaagggcagattcaccatcagcgccgacaccagcaagaacaccgcctacctccagatgaactccctgagagccgaggacaccgccgtgtactactgtagcagagacagcagcttctactacgtgtacgctatggactactggggccagggcacactggtcacagtctcttctacgcgtatccagaaccctgatcctgccgtgtaccagctgcgggatagcaagagcagcgacaagagcgtgtgtctgttcaccgacttcgacagccagaccaacgtgtcccagagcaaggactccgacgtgtacatcaccgataagtgcgtgctggacatgcggagcatggacttcaagagcaactccgccgtggcctggtccaacaagtccgatttcgcctgcgccaacgccttcaacaacagcattatccccgaggacacattcttcccaagccccgagagcagctgcggctttaccagcgagagctaccagcagggcgtgctgagcgccaccatcctgtacgagatcctgctgggcaaggccaccctgtacgccgtgctggtgtctgccctggtgctgatggctatggtcaagcggaaggacagccggggataa

SEQ ID NO: 39276 - DNA, 3381 bp, synthetic construct
  source 1..3381: mol_type = other DNA
atgggacccagactgctgttttgggctctgctgtgtctgctcggcacaggacctgttgaagctggcgtgacacagagccccacacacctgattaagaccagaggccagcaggccacactgagatgcagccctatcagcggccacaccagcgtgtactggtatcagcaggctctcggactgggcctccagttcctgctttggtacgacgagggcgaagagagaaaccggggcaacttccctcctcggttttccggcagacagttccccaactacagcagcgagctgaacgtgaacgccctggaactggaagatagcgccctgtacctgtgtgcctcttctcttggtggacctcgcggactggctggactgagaggggatgagcagtttttcggccctggcaccagactgaccgtgctggaaggtaccggcggaggcggatctggcggcggagaattcgacatccagatgacacagagccctagcagcctgtctgccagcgtgggagacagagtgaccatcacctgtagagccagccaggacatcaacacagccgtggcttggtatcagcagaagcctggcaaggcccctaagctgctgatctacagcgcctacttcctgtacagcggcgtgcccagcagattcagcggaagcagaagcggcaccgacttcaccctgacaatatccagcctccagcctgaggacttcgccacctactactgccagcagtacagcagatacagccccgtgacctttggacagggcaccaaggtggaaatcaagagactcgaggacctgaagaacgtgttcccacctgaggtggccgtgttcgagcctagcgaggccgagatcagccacacccagaaagccaccctcgtgtgcctggctaccggcttctaccccgaccatgtggaactgtcttggtgggtcaacggcaaagaggtgcacagcggcgtgtgtaccgacccccagccactgaaagaacagcccgccctgaacgacagccggtactgcctgagcagcagactgagagtgtccgccaccttctggcagaacccccggaaccacttcagatgccaggtgcagttctacggcctgagcgagaacgacgagtggacccaggacagagccaagcccgtgacccagatcgtgtctgccgaagcctggggcagagccgattgcgacgtgaagctggtggaaaagagcttcgagacagacaccaacctgaacttccagaacctgagcgtgatcggcttcagaatcctgctgctgaaagtggccggctttaacctgctgatgaccctgcggctgtggtccagcagggccaagcgatctggatctggagcaacaaacttctcactactcaaacaagcaggtgacgtggaggagaatcccgggcctactagtgccaccatggactggatttggcgcatccttttccttgtcggcgctgctaccggcgcccattccgggcccgaagtgcagctggttgaatctggcggaggactggttcaggctggcggatctctgagactgtcttgtgccgccagcggcagaacctttagcatgggctggtttagacaggcccctggcaaagagagagagttcgtcgccgccatcacatactctggcggcagcccttactacgccgactctgtgaagggcagattcaccatcagccgggacaacgccaagaacaccgtgtacctccagatgaacagcctgaagcctgaggacaccgccgtgtactactgcgccgccaatccaacatacggcagcgactggaacgccgagaattggggccagggaacccaagtgacagtgtctagcggatccggcggcggaggatctggcggaggcggatctgggggcggaggctctttcgaagaagttcagctggttgaaagtggtggcggcctggttcaacctggcggatctctgagactgagctgtgccgccagcggcttcaatgtgtacgcctctggaatgcactgggtccgacaggcccctggcaaaggacttgagtgggtcgccaaaatctaccccgacagcgactacacctattacgccgacagcgtgaagggcagattcaccatcagcgccgacaccagcaagaacaccgcctacctccagatgaactccctgagagccgaggacaccgccgtgtactactgtagcagagacagcagcttctactacgtgtacgctatggactactggggccagggcacactggtcacagtctcttctacgcgtatccagaaccctgatcctgccgtgtaccagctgcgggatagcaagagcagcgacaagagcgtgtgtctgttcaccgacttcgacagccagaccaacgtgtcccagagcaaggactccgacgtgtacatcaccgataagtgcgtgctggacatgcggagcatggacttcaagagcaactccgccgtggcctggtccaacaagtccgatttcgcctgcgccaacgccttcaacaacagcattatccccgaggacacattcttcccaagccccgagagcagctgcggctttaccagcgagagctaccagcagggcgtgctgagcgccaccatcctgtacgagatcctgctgggcaaggccaccctgtacgccgtgctggtgtctgccctggtgctgatggctatggtcaagcggaaggacagccggggacgcgccaagagaagcggatctggcgtgaagcagaccctgaatttcgacctgctgaagctggctggcgacgtggaatccaacccaggcccttctagaggccatatgaccgagtacaagcccacggtgcgcctcgccacccgcgacgacgtccccagggccgtacgcaccctcgccgccgcgttcgccgactaccccgccacgcgccacaccgtcgatccggaccgccacatcgagcgggtcaccgagctgcaagaactcttcctcacgcgcgtcgggctcgacatcggcaaggtgtgggtcgcggacgacggcgccgcggtggcggtctggaccacgccggagagcgtcgaagcgggggcggtgttcgccgagatcggcccgcgcatggccgagttgagcggttcccggctggccgcgcagcaacagatggaaggcctcctggcgccgcaccggcccaaggagcccgcgtggttcctggccaccgtcggcgtctcgcccgaccaccagggcaagggtctgggcagcgccgtcgtgctccccggagtggaggcggccgagcgcgccggggtgcccgccttcctggagacctccgcgccccgcaacctccccttctacgagcggctcggcttcaccgtcaccgccgacgtcgaggtgcccgaaggaccgcgcacctggtgcatgacccgcaagcccggtgcctga

SEQ ID NO: 39277 - DNA, 3378 bp, synthetic construct
  source 1..3378: mol_type = other DNA
atgggacccagactgctgttttgggctctgctgtgtctgctcggcacaggacctgttgaagctggcgtgacacagagccccacacacctgattaagaccagaggccagcaggccacactgagatgcagccctatcagcggccacaccagcgtgtactggtatcagcaggctctcggactgggcctccagttcctgctttggtacgacgagggcgaagagagaaaccggggcaacttccctcctcggttttccggcagacagttccccaactacagcagcgagctgaacgtgaacgccctggaactggaagatagcgccctgtacctgtgtgccagctctctcggcggagatgaactgggagccgatggcaacgagcagttctttggccctggcaccagactgaccgtgctggaaggtaccggcggaggcggatctggcggcggaagcgaattcgacatccagatgacacagagccctagcagcctgtctgccagcgtgggagacagagtgaccatcacctgtagagccagccaggacatcaacacagccgtggcttggtatcagcagaagcctggcaaggcccctaagctgctgatctacagcgcctacttcctgtacagcggcgtgcccagcagattcagcggaagcagaagcggcaccgacttcaccctgacaatatccagcctccagcctgaggacttcgccacctactactgccagcagtacagcagatacagccccgtgacctttggacagggcaccaaggtggaaatcaagagactcgaggacctgaagaacgtgttcccacctgaggtggccgtgttcgagcctagcgaggccgagatcagccacacccagaaagccaccctcgtgtgcctggctaccggcttctaccccgaccatgtggaactgtcttggtgggtcaacggcaaagaggtgcacagcggcgtgtgtaccgacccccagccactgaaagaacagcccgccctgaacgacagccggtactgcctgagcagcagactgagagtgtccgccaccttctggcagaacccccggaaccacttcagatgccaggtgcagttctacggcctgagcgagaacgacgagtggacccaggacagagccaagcccgtgacccagatcgtgtctgccgaagcctggggcagagccgattgcgacgtgaagctggtggaaaagagcttcgagacagacaccaacctgaacttccagaacctgagcgtgatcggcttcagaatcctgctgctgaaagtggccggctttaacctgctgatgaccctgcggctgtggtccagcagggccaagcgatctggatctggagcaacaaacttctcactactcaaacaagcaggtgacgtggaggagaatcccgggcctactagtgccaccatggactggatttggcgcatccttttccttgtcggcgctgctaccggcgcccattccgggcccgaagtgcagctggttgaatctggcggaggactggttcaggctggcggatctctgagactgtcttgtgccgccagcggcagaacctttagcatgggctggtttagacaggcccctggcaaagagagagagttcgtcgccgccatcacatactctggcggcagcccttactacgccgactctgtgaagggcagattcaccatcagccgggacaacgccaagaacaccgtgtacctccagatgaacagcctgaagcctgaggacaccgccgtgtactactgcgccgccaatccaacatacggcagcgactggaacgccgagaattggggccagggaacccaagtgacagtgtctagcggatccggcggcggaggatctggcggaggcggatctgggggcggaggctctttcgaagaagttcagctggttgaaagtggtggcggcctggttcaacctggcggatctctgagactgagctgtgccgccagcggcttcaatgtgtacgcctctggaatgcactgggtccgacaggcccctggcaaaggacttgagtgggtcgccaaaatctaccccgacagcgactacacctattacgccgacagcgtgaagggcagattcaccatcagcgccgacaccagcaagaacaccgcctacctccagatgaactccctgagagccgaggacaccgccgtgtactactgtagcagagacagcagcttctactacgtgtacgctatggactactggggccagggcacactggtcacagtctcttctacgcgtatccagaaccctgatcctgccgtgtaccagctgcgggatagcaagagcagcgacaagagcgtgtgtctgttcaccgacttcgacagccagaccaacgtgtcccagagcaaggactccgacgtgtacatcaccgataagtgcgtgctggacatgcggagcatggacttcaagagcaactccgccgtggcctggtccaacaagtccgatttcgcctgcgccaacgccttcaacaacagcattatccccgaggacacattcttcccaagccccgagagcagctgcggctttaccagcgagagctaccagcagggcgtgctgagcgccaccatcctgtacgagatcctgctgggcaaggccaccctgtacgccgtgctggtgtctgccctggtgctgatggctatggtcaagcggaaggacagccggggacgcgccaagagaagcggatctggcgtgaagcagaccctgaatttcgacctgctgaagctggctggcgacgtggaatccaacccaggcccttctagaggccatatgaccgagtacaagcccacggtgcgcctcgccacccgcgacgacgtccccagggccgtacgcaccctcgccgccgcgttcgccgactaccccgccacgcgccacaccgtcgatccggaccgccacatcgagcgggtcaccgagctgcaagaactcttcctcacgcgcgtcgggctcgacatcggcaaggtgtgggtcgcggacgacggcgccgcggtggcggtctggaccacgccggagagcgtcgaagcgggggcggtgttcgccgagatcggcccgcgcatggccgagttgagcggttcccggctggccgcgcagcaacagatggaaggcctcctggcgccgcaccggcccaaggagcccgcgtggttcctggccaccgtcggcgtctcgcccgaccaccagggcaagggtctgggcagcgccgtcgtgctccccggagtggaggcggccgagcgcgccggggtgcccgccttcctggagacctccgcgccccgcaacctccccttctacgagcggctcggcttcaccgtcaccgccgacgtcgaggtgcccgaaggaccgcgcacctggtgcatgacccgcaagcccggtgcctga

SEQ ID NO: 39278 - DNA, 2853 bp, synthetic construct
  source 1..2853: mol_type = other DNA
atggccttaccagtgaccgccttgctcctgccgctggccttgctgctccacgccgccaggccggacatccagatgacacagagccctagcagcctgtctgccagcgtgggagacagagtgaccatcacctgtagagccagccaggacatcaacacagccgtggcttggtatcagcagaagcctggcaaggcccctaagctgctgatctacagcgcctacttcctgtacagcggcgtgcccagcagattcagcggaagcagaagcggcaccgacttcaccctgacaatatccagcctccagcctgaggacttcgccacctactactgccagcagtacagcagatacagccccgtgacctttggacagggcaccaaggtggaaatcaagagactcgaggacctgaagaacgtgttcccacctgaggtggccgtgttcgagcctagcgaggccgagatcagccacacccagaaagccaccctcgtgtgcctggctaccggcttctaccccgaccatgtggaactgtcttggtgggtcaacggcaaagaggtgcacagcggcgtgtgtaccgacccccagccactgaaagaacagcccgccctgaacgacagccggtactgcctgagcagcagactgagagtgtccgccaccttctggcagaacccccggaaccacttcagatgccaggtgcagttctacggcctgagcgagaacgacgagtggacccaggacagagccaagcccgtgacccagatcgtgtctgccgaagcctggggcagagccgattgcgacgtgaagctggtggaaaagagcttcgagacagacaccaacctgaacttccagaacctgagcgtgatcggcttcagaatcctgctgctgaaagtggccggctttaacctgctgatgaccctgcggctgtggtccagcagggccaagcgatctggatctggagcaacaaacttctcactactcaaacaagcaggtgacgtggaggagaatcccgggcctactagtgccaccatggactggatttggcgcatccttttccttgtcggcgctgctaccggcgcccattccgggcccatgggaagctggcttgagttctaccacagactcaacgccattgacagcaggctgtgggcacttggcggaagcgaagctgaactcgccgcttttgaaaaagaaattgccgctttcgagtccgagcttcaggcttacaaaggcaaagggaatcctgaggtcgagagcctgagagatcacgctgcccacattagagagtggttgcaggcataccggcacaatggatccggcggcggaggatctggcggaggcggatctgggggcggaggctctttcgaagaagttcagctggttgaaagtggtggcggcctggttcaacctggcggatctctgagactgagctgtgccgccagcggcttcaatgtgtacgcctctggaatgcactgggtccgacaggcccctggcaaaggacttgagtgggtcgccaaaatctaccccgacagcgactacacctattacgccgacagcgtgaagggcagattcaccatcagcgccgacaccagcaagaacaccgcctacctccagatgaactccctgagagccgaggacaccgccgtgtactactgtagcagagacagcagcttctactacgtgtacgctatggactactggggccagggcacactggtcacagtctcttctacgcgtatccagaaccctgatcctgccgtgtaccagctgcgggatagcaagagcagcgacaagagcgtgtgtctgttcaccgacttcgacagccagaccaacgtgtcccagagcaaggactccgacgtgtacatcaccgataagtgcgtgctggacatgcggagcatggacttcaagagcaactccgccgtggcctggtccaacaagtccgatttcgcctgcgccaacgccttcaacaacagcattatccccgaggacacattcttcccaagccccgagagcagctgcggctttaccagcgagagctaccagcagggcgtgctgagcgccaccatcctgtacgagatcctgctgggcaaggccaccctgtacgccgtgctggtgtctgccctggtgctgatggctatggtcaagcggaaggacagccggggacgcgccaagagaagcggatctggcgtgaagcagaccctgaatttcgacctgctgaagctggctggcgacgtggaatccaacccaggcccttctagaggccatatgaccgagtacaagcccacggtgcgcctcgccacccgcgacgacgtccccagggccgtacgcaccctcgccgccgcgttcgccgactaccccgccacgcgccacaccgtcgatccggaccgccacatcgagcgggtcaccgagctgcaagaactcttcctcacgcgcgtcgggctcgacatcggcaaggtgtgggtcgcggacgacggcgccgcggtggcggtctggaccacgccggagagcgtcgaagcgggggcggtgttcgccgagatcggcccgcgcatggccgagttgagcggttcccggctggccgcgcagcaacagatggaaggcctcctggcgccgcaccggcccaaggagcccgcgtggttcctggccaccgtcggcgtctcgcccgaccaccagggcaagggtctgggcagcgccgtcgtgctccccggagtggaggcggccgagcgcgccggggtgcccgccttcctggagacctccgcgccccgcaacctccccttctacgagcggctcggcttcaccgtcaccgccgacgtcgaggtgcccgaaggaccgcgcacctggtgcatgacccgcaagcccggtgcctga

SEQ ID NO: 39279 - DNA, 2853 bp, synthetic construct
  source 1..2853: mol_type = other DNA
atggccttaccagtgaccgccttgctcctgccgctggccttgctgctccacgccgccaggccggcatgcatgggcagttggttcgagttctacgaccggctgaatgccatcgacgccagactgtgggctctcggaggatctgaagctgagctggccgccttcgagaaagagatcgccgcctttgagagcgagctgcaagcctacaaaggcaagggcaaccccgaggtggaaaacctgagagtgcacgccgctgccatcagagaatggctccaggcttacagacacaacggtaccggcggaggcggatctggcggcggaggtagcggtggcggaggatctgaattcgacatccagatgacacagagccctagcagcctgtctgccagcgtgggagacagagtgaccatcacctgtagagccagccaggacatcaacacagccgtggcttggtatcagcagaagcctggcaaggcccctaagctgctgatctacagcgcctacttcctgtacagcggcgtgcccagcagattcagcggaagcagaagcggcaccgacttcaccctgacaatatccagcctccagcctgaggacttcgccacctactactgccagcagtacagcagatacagccccgtgacctttggacagggcaccaaggtggaaatcaagagactcgaggacctgaagaacgtgttcccacctgaggtggccgtgttcgagcctagcgaggccgagatcagccacacccagaaagccaccctcgtgtgcctggctaccggcttctaccccgaccatgtggaactgtcttggtgggtcaacggcaaagaggtgcacagcggcgtgtgtaccgacccccagccactgaaagaacagcccgccctgaacgacagccggtactgcctgagcagcagactgagagtgtccgccaccttctggcagaacccccggaaccacttcagatgccaggtgcagttctacggcctgagcgagaacgacgagtggacccaggacagagccaagcccgtgacccagatcgtgtctgccgaagcctggggcagagccgattgcgacgtgaagctggtggaaaagagcttcgagacagacaccaacctgaacttccagaacctgagcgtgatcggcttcagaatcctgctgctgaaagtggccggctttaacctgctgatgaccctgcggctgtggtccagcagggccaagcgatctggatctggagcaacaaacttctcactactcaaacaagcaggtgacgtggaggagaatcccgggcctactagtatggactggatttggcgcatccttttccttgtcggcgctgctaccggcgcgcattccttcgaagaagttcagctggttgaaagtggtggcggcctggttcaacctggcggatctctgagactgagctgtgccgccagcggcttcaatgtgtacgcctctggaatgcactgggtccgacaggcccctggcaaaggacttgagtgggtcgccaaaatctaccccgacagcgactacacctattacgccgacagcgtgaagggcagattcaccatcagcgccgacaccagcaagaacaccgcctacctccagatgaactccctgagagccgaggacaccgccgtgtactactgtagcagagacagcagcttctactacgtgtacgctatggactactggggccagggcacactggtcacagtctcttctacgcgtatccagaaccctgatcctgccgtgtaccagctgcgggatagcaagagcagcgacaagagcgtgtgtctgttcaccgacttcgacagccagaccaacgtgtcccagagcaaggactccgacgtgtacatcaccgataagtgcgtgctggacatgcggagcatggacttcaagagcaactccgccgtggcctggtccaacaagtccgatttcgcctgcgccaacgccttcaacaacagcattatccccgaggacacattcttcccaagccccgagagcagctgcggctttaccagcgagagctaccagcagggcgtgctgagcgccaccatcctgtacgagatcctgctgggcaaggccaccctgtacgccgtgctggtgtctgccctggtgctgatggctatggtcaagcggaaggacagccggggacgcgccaagagaagcggatctggcgtgaagcagaccctgaatttcgacctgctgaagctggctggcgacgtggaatccaacccaggcccttctagaggccatatgaccgagtacaagcccacggtgcgcctcgccacccgcgacgacgtccccagggccgtacgcaccctcgccgccgcgttcgccgactaccccgccacgcgccacaccgtcgatccggaccgccacatcgagcgggtcaccgagctgcaagaactcttcctcacgcgcgtcgggctcgacatcggcaaggtgtgggtcgcggacgacggcgccgcggtggcggtctggaccacgccggagagcgtcgaagcgggggcggtgttcgccgagatcggcccgcgcatggccgagttgagcggttcccggctggccgcgcagcaacagatggaaggcctcctggcgccgcaccggcccaaggagcccgcgtggttcctggccaccgtcggcgtctcgcccgaccaccagggcaagggtctgggcagcgccgtcgtgctccccggagtggaggcggccgagcgcgccggggtgcccgccttcctggagacctccgcgccccgcaacctccccttctacgagcggctcggcttcaccgtcaccgccgacgtcgaggtgcccgaaggaccgcgcacctggtgcatgacccgcaagcccggtgcctga

SEQ ID NO: 39280 - DNA, 3204 bp, synthetic construct
  source 1..3204: mol_type = other DNA
atggccttaccagtgaccgccttgctcctgccgctggccttgctgctccacgccgccaggccggcatgcatggaccccgacctggaaatcagagccgccttcctgcggcagagaaacacagccctgagaacagaggtggccgagctggaacaagaggtgcagcggctggaaaacgaggtgtcccagtacgagacaagatacggccctctcggaggcggaaaaggtaccggcggaggcggatctggcggcggaggtagcggtggcggaggatctgaattcgacatccagatgacacagagccctagcagcctgtctgccagcgtgggagacagagtgaccatcacctgtagagccagccaggacatcaacacagccgtggcttggtatcagcagaagcctggcaaggcccctaagctgctgatctacagcgcctacttcctgtacagcggcgtgcccagcagattcagcggaagcagaagcggcaccgacttcaccctgacaatatccagcctccagcctgaggacttcgccacctactactgccagcagtacagcagatacagccccgtgacctttggacagggcaccaaggtggaaatcaagagactcgaggacctgaagaacgtgttcccacctgaggtggccgtgttcgagcctagcgaggccgagatcagccacacccagaaagccaccctcgtgtgcctggctaccggcttctaccccgaccatgtggaactgtcttggtgggtcaacggcaaagaggtgcacagcggcgtgtgtaccgacccccagccactgaaagaacagcccgccctgaacgacagccggtactgcctgagcagcagactgagagtgtccgccaccttctggcagaacccccggaaccacttcagatgccaggtgcagttctacggcctgagcgagaacgacgagtggacccaggacagagccaagcccgtgacccagatcgtgtctgccgaagcctggggcagagccgattgcgacgtgaagctggtggaaaagagcttcgagacagacaccaacctgaacttccagaacctgagcgtgatcggcttcagaatcctgctgctgaaagtggccggctttaacctgctgatgaccctgcggctgtggtccagcagggccaagcgatctggatctggagcaacaaacttctcactactcaaacaagcaggtgacgtggaggagaatcccgggcctactagtgccaccatggactggatttggcgcatccttttccttgtcggcgctgctaccggcgcccattccgggcccgaagtgcagctggttgaatctggcggaggactggttcaggctggcggatctctgagactgtcttgtgccgccagcggcagaacctttagcatgggctggtttagacaggcccctggcaaagagagagagttcgtcgccgccatcacatactctggcggcagcccttactacgccgactctgtgaagggcagattcaccatcagccgggacaacgccaagaacaccgtgtacctccagatgaacagcctgaagcctgaggacaccgccgtgtactactgcgccgccaatccaacatacggcagcgactggaacgccgagaattggggccagggaacccaagtgacagtgtctagcggatccggcggcggaggatctggcggaggcggatctgggggcggaggctctttcgaagaagttcagctggttgaaagtggtggcggcctggttcaacctggcggatctctgagactgagctgtgccgccagcggcttcaatgtgtacgcctctggaatgcactgggtccgacaggcccctggcaaaggacttgagtgggtcgccaaaatctaccccgacagcgactacacctattacgccgacagcgtgaagggcagattcaccatcagcgccgacaccagcaagaacaccgcctacctccagatgaactccctgagagccgaggacaccgccgtgtactactgtagcagagacagcagcttctactacgtgtacgctatggactactggggccagggcacactggtcacagtctcttctacgcgtatccagaaccctgatcctgccgtgtaccagctgcgggatagcaagagcagcgacaagagcgtgtgtctgttcaccgacttcgacagccagaccaacgtgtcccagagcaaggactccgacgtgtacatcaccgataagtgcgtgctggacatgcggagcatggacttcaagagcaactccgccgtggcctggtccaacaagtccgatttcgcctgcgccaacgccttcaacaacagcattatccccgaggacacattcttcccaagccccgagagcagctgcggctttaccagcgagagctaccagcagggcgtgctgagcgccaccatcctgtacgagatcctgctgggcaaggccaccctgtacgccgtgctggtgtctgccctggtgctgatggctatggtcaagcggaaggacagccggggacgcgccaagagaagcggatctggcgtgaagcagaccctgaatttcgacctgctgaagctggctggcgacgtggaatccaacccaggcccttctagaggccatatgaccgagtacaagcccacggtgcgcctcgccacccgcgacgacgtccccagggccgtacgcaccctcgccgccgcgttcgccgactaccccgccacgcgccacaccgtcgatccggaccgccacatcgagcgggtcaccgagctgcaagaactcttcctcacgcgcgtcgggctcgacatcggcaaggtgtgggtcgcggacgacggcgccgcggtggcggtctggaccacgccggagagcgtcgaagcgggggcggtgttcgccgagatcggcccgcgcatggccgagttgagcggttcccggctggccgcgcagcaacagatggaaggcctcctggcgccgcaccggcccaaggagcccgcgtggttcctggccaccgtcggcgtctcgcccgaccaccagggcaagggtctgggcagcgccgtcgtgctccccggagtggaggcggccgagcgcgccggggtgcccgccttcctggagacctccgcgccccgcaacctccccttctacgagcggctcggcttcaccgtcaccgccgacgtcgaggtgcccgaaggaccgcgcacctggtgcatgacccgcaagcccggtgcctga

SEQ ID NO: 39281 - DNA, 2853 bp, synthetic construct
  source 1..2853: mol_type = other DNA
atggccttaccagtgaccgccttgctcctgccgctggccttgctgctccacgccgccaggccggacatccagatgacacagagccctagcagcctgtctgccagcgtgggagacagagtgaccatcacctgtagagccagccaggacatcaacacagccgtggcttggtatcagcagaagcctggcaaggcccctaagctgctgatctacagcgcctacttcctgtacagcggcgtgcccagcagattcagcggaagcagaagcggcaccgacttcaccctgacaatatccagcctccagcctgaggacttcgccacctactactgccagcagtacagcagatacagccccgtgacctttggacagggcaccaaggtggaaatcaagagactcgaggacctgaagaacgtgttcccacctgaggtggccgtgttcgagcctagcgaggccgagatcagccacacccagaaagccaccctcgtgtgcctggctaccggcttctaccccgaccatgtggaactgtcttggtgggtcaacggcaaagaggtgcacagcggcgtgtgtaccgacccccagccactgaaagaacagcccgccctgaacgacagccggtactgcctgagcagcagactgagagtgtccgccaccttctggcagaacccccggaaccacttcagatgccaggtgcagttctacggcctgagcgagaacgacgagtggacccaggacagagccaagcccgtgacccagatcgtgtctgccgaagcctggggcagagccgattgcgacgtgaagctggtggaaaagagcttcgagacagacaccaacctgaacttccagaacctgagcgtgatcggcttcagaatcctgctgctgaaagtggccggctttaacctgctgatgaccctgcggctgtggtccagcagggccaagcgatctggatctggagcaacaaacttctcactactcaaacaagcaggtgacgtggaggagaatcccgggcctactagtgccaccatggactggatttggcgcatccttttccttgtcggcgctgctaccggcgcccattccgggcccatgggatcttggagcgagttttacgatcggctgcacgccattcaccaccggctgtatgctctcggaggaagcgaagctgagctggccgcttttgaaaaagaaattgccgctttcgagtccgagcttcaggcttacaaaggcaaagggaatcctgaggtcgaggccctgagagataccgccgccttcatcagaacccggttgcaggcataccggcacaacggatccggcggcggaggatctggcggaggcggatctgggggcggaggctctttcgaagaagttcagctggttgaaagtggtggcggcctggttcaacctggcggatctctgagactgagctgtgccgccagcggcttcaatgtgtacgcctctggaatgcactgggtccgacaggcccctggcaaaggacttgagtgggtcgccaaaatctaccccgacagcgactacacctattacgccgacagcgtgaagggcagattcaccatcagcgccgacaccagcaagaacaccgcctacctccagatgaactccctgagagccgaggacaccgccgtgtactactgtagcagagacagcagcttctactacgtgtacgctatggactactggggccagggcacactggtcacagtctcttctacgcgtatccagaaccctgatcctgccgtgtaccagctgcgggatagcaagagcagcgacaagagcgtgtgtctgttcaccgacttcgacagccagaccaacgtgtcccagagcaaggactccgacgtgtacatcaccgataagtgcgtgctggacatgcggagcatggacttcaagagcaactccgccgtggcctggtccaacaagtccgatttcgcctgcgccaacgccttcaacaacagcattatccccgaggacacattcttcccaagccccgagagcagctgcggctttaccagcgagagctaccagcagggcgtgctgagcgccaccatcctgtacgagatcctgctgggcaaggccaccctgtacgccgtgctggtgtctgccctggtgctgatggctatggtcaagcggaaggacagccggggacgcgccaagagaagcggatctggcgtgaagcagaccctgaatttcgacctgctgaagctggctggcgacgtggaatccaacccaggcccttctagaggccatatgaccgagtacaagcccacggtgcgcctcgccacccgcgacgacgtccccagggccgtacgcaccctcgccgccgcgttcgccgactaccccgccacgcgccacaccgtcgatccggaccgccacatcgagcgggtcaccgagctgcaagaactcttcctcacgcgcgtcgggctcgacatcggcaaggtgtgggtcgcggacgacggcgccgcggtggcggtctggaccacgccggagagcgtcgaagcgggggcggtgttcgccgagatcggcccgcgcatggccgagttgagcggttcccggctggccgcgcagcaacagatggaaggcctcctggcgccgcaccggcccaaggagcccgcgtggttcctggccaccgtcggcgtctcgcccgaccaccagggcaagggtctgggcagcgccgtcgtgctccccggagtggaggcggccgagcgcgccggggtgcccgccttcctggagacctccgcgccccgcaacctccccttctacgagcggctcggcttcaccgtcaccgccgacgtcgaggtgcccgaaggaccgcgcacctggtgcatgacccgcaagcccggtgcctga

SEQ ID NO: 39282 - DNA, 3483 bp, synthetic construct
  source 1..3483: mol_type = other DNA
atggccttaccagtgaccgccttgctcctgccgctggccttgctgctccacgccgccaggccggacatccagatgacacagagccctagcagcctgtctgccagcgtgggagacagagtgaccatcacctgtagagccagccaggacatcaacacagccgtggcttggtatcagcagaagcctggcaaggcccctaagctgctgatctacagcgcctacttcctgtacagcggcgtgcccagcagattcagcggaagcagaagcggcaccgacttcaccctgacaatatccagcctccagcctgaggacttcgccacctactactgccagcagtacagcagatacagccccgtgacctttggacagggcaccaaggtggaaatcaagagactcgaggacctgaagaacgtgttcccacctgaggtggccgtgttcgagcctagcgaggccgagatcagccacacccagaaagccaccctcgtgtgcctggctaccggcttctaccccgaccatgtggaactgtcttggtgggtcaacggcaaagaggtgcacagcggcgtgtgtaccgacccccagccactgaaagaacagcccgccctgaacgacagccggtactgcctgagcagcagactgagagtgtccgccaccttctggcagaacccccggaaccacttcagatgccaggtgcagttctacggcctgagcgagaacgacgagtggacccaggacagagccaagcccgtgacccagatcgtgtctgccgaagcctggggcagagccgattgcgacgtgaagctggtggaaaagagcttcgagacagacaccaacctgaacttccagaacctgagcgtgatcggcttcagaatcctgctgctgaaagtggccggctttaacctgctgatgaccctgcggctgtggtccagcagggccaagcgatctggatctggagcaacaaacttctcactactcaaacaagcaggtgacgtggaggagaatcccgggcctactagtaccatggactggatttggcgcatccttttccttgtcggcgctgctaccggcgcccattccctgttcaatcaagaggtgcagatccctctgaccgagagctactgtggcccctgtcctaagaactggatctgctacaagaacaactgctaccagttcttcgacgagagcaagaattggtacgagagccaggccagctgcatgagccagaatgccagcctgctgaaggtgtacagcaaagaggaccaggacctgctgaaactggtcaagagcgcccactggatgggccttgtgcacatccccaccaatggctcttggcagtgggaggacggcagcattctgagccctaacctgctgaccatcatcgagatgcagaagggcgactgcgccctgtacgccagcagctttaagggctacatcgagaattgcagcaccccgaacacctacatctgtatgcagagaaccgtttctggcggaggcggctctggaggaggcggaagtggcggcggaggcgacctctttaatcaagaagtccagattccactcaccgaatcctactgcggaccttgtccaaaaaattggatttgttataagaacaactgttatcaattctttgatgagtctaaaaattggtatgagtcccaggcttcctgcatgtctcagaacgcttctctgctgaaagtctactctaaagaagatcaggatctcctgaagctcgtcaagtctgcccattggatggggctcgtccacattcctaccaacggaagctggcaatgggaagatggctccatcctgtctccaaatctgctcacgattattgaaatgcagaaaggggattgtgctctctacgccagctccttcaagggatatattgagaactgtagcacgcccaatacttatatctgtatgcaacggaccgtgggatccggcggcggaggatctggcggaggcggatctgggggcggaggctctttcgaagaagttcagctggttgaaagtggtggcggcctggttcaacctggcggatctctgagactgagctgtgccgccagcggcttcaatgtgtacgcctctggaatgcactgggtccgacaggcccctggcaaaggacttgagtgggtcgccaaaatctaccccgacagcgactacacctattacgccgacagcgtgaagggcagattcaccatcagcgccgacaccagcaagaacaccgcctacctccagatgaactccctgagagccgaggacaccgccgtgtactactgtagcagagacagcagcttctactacgtgtacgctatggactactggggccagggcacactggtcacagtctcttctacgcgtatccagaaccctgatcctgccgtgtaccagctgcgggatagcaagagcagcgacaagagcgtgtgtctgttcaccgacttcgacagccagaccaacgtgtcccagagcaaggactccgacgtgtacatcaccgataagtgcgtgctggacatgcggagcatggacttcaagagcaactccgccgtggcctggtccaacaagtccgatttcgcctgcgccaacgccttcaacaacagcattatccccgaggacacattcttcccaagccccgagagcagctgcggctttaccagcgagagctaccagcagggcgtgctgagcgccaccatcctgtacgagatcctgctgggcaaggccaccctgtacgccgtgctggtgtctgccctggtgctgatggctatggtcaagcggaaggacagccggggacgcgccaagagaagcggatctggcgtgaagcagaccctgaatttcgacctgctgaagctggctggcgacgtggaatccaacccaggcccttctagaggccatatgaccgagtacaagcccacggtgcgcctcgccacccgcgacgacgtccccagggccgtacgcaccctcgccgccgcgttcgccgactaccccgccacgcgccacaccgtcgatccggaccgccacatcgagcgggtcaccgagctgcaagaactcttcctcacgcgcgtcgggctcgacatcggcaaggtgtgggtcgcggacgacggcgccgcggtggcggtctggaccacgccggagagcgtcgaagcgggggcggtgttcgccgagatcggcccgcgcatggccgagttgagcggttcccggctggccgcgcagcaacagatggaaggcctcctggcgccgcaccggcccaaggagcccgcgtggttcctggccaccgtcggcgtctcgcccgaccaccagggcaagggtctgggcagcgccgtcgtgctccccggagtggaggcggccgagcgcgccggggtgcccgccttcctggagacctccgcgccccgcaacctccccttctacgagcggctcggcttcaccgtcaccgccgacgtcgaggtgcccgaaggaccgcgcacctggtgcatgacccgcaagcccggtgcctga

SEQ ID NO: 39283 - DNA, 1869 bp, synthetic construct
  source 1..1869: mol_type = other DNA
atggccttaccagtgaccgccttgctcctgccgctggccttgctgctccacgccgccaggccggacatccagatgacacagagccctagcagcctgtctgccagcgtgggagacagagtgaccatcacctgtagagccagccaggacatcaacacagccgtggcttggtatcagcagaagcctggcaaggcccctaagctgctgatctacagcgcctacttcctgtacagcggcgtgcccagcagattcagcggaagcagaagcggcaccgacttcaccctgacaatatccagcctccagcctgaggacttcgccacctactactgccagcagtacagcagatacagccccgtgacctttggacagggcaccaaggtggaaatcaagagactcgaggacctgaagaacgtgttcccacctgaggtggccgtgttcgagcctagcgaggccgagatcagccacacccagaaagccaccctcgtgtgcctggctaccggcttctaccccgaccatgtggaactgtcttggtgggtcaacggcaaagaggtgcacagcggcgtgtgtaccgacccccagccactgaaagaacagcccgccctgaacgacagccggtactgcctgagcagcagactgagagtgtccgccaccttctggcagaacccccggaaccacttcagatgccaggtgcagttctacggcctgagcgagaacgacgagtggacccaggacagagccaagcccgtgacccagatcgtgtctgccgaagcctggggcagagccgattgcggctttaccagcgagagctaccagcagggcgtgctgagcgccaccaacctgagcgtgatcggcttcagaatcctgctgctgaaagtggccggctttaacctgctgatgaccctgcggctgtggtccagcagggccaagcgatctggatctggagcaacaaacttctcactactcaaacaagcaggtgacgtggaggagaatcccgggcctactagtatggactggatttggcgcatccttttccttgtcggcgctgctaccggcgcgcattccttcgaagaagttcagctggttgaaagtggtggcggcctggttcaacctggcggatctctgagactgagctgtgccgccagcggcttcaatgtgtacgcctctggaatgcactgggtccgacaggcccctggcaaaggacttgagtgggtcgccaaaatctaccccgacagcgactacacctattacgccgacagcgtgaagggcagattcaccatcagcgccgacaccagcaagaacaccgcctacctccagatgaactccctgagagccgaggacaccgccgtgtactactgtagcagagacagcagcttctactacgtgtacgctatggactactggggccagggcacactggtcacagtctcttctacgcgtatccagaaccctgatcctgccgtgtaccagctgcgggatagcaagagcagcgacaagagcgtgtgtctgttcaccgacttcgacagccagaccaacgtgtcccagagcaaggactccgacgtgtacatcaccgataagtgcgtgctggacatgcggagcatggacttcaagagcaactccgccgtggcctggtccaacaagtccgatttcgcctgcgccaacgccttcaacaacagcattatccccgaggacacattcttcccaagccccgagagcagctgcgacgtgaagctggtggaaaagagcttcgagacagacaccaacctgaacttccagatcctgtacgagatcctgctgggcaaggccaccctgtacgccgtgctggtgtctgccctggtgctgatggctatggtcaagcggaaggacagccgggga

SEQ ID NO: 39284 - DNA, 1881 bp, synthetic construct
  source 1..1881: mol_type = other DNA
atggccttaccagtgaccgccttgctcctgccgctggccttgctgctccacgccgccaggccggacatccagatgacacagagccctagcagcctgtctgccagcgtgggagacagagtgaccatcacctgtagagccagccaggacatcaacacagccgtggcttggtatcagcagaagcctggcaaggcccctaagctgctgatctacagcgcctacttcctgtacagcggcgtgcccagcagattcagcggaagcagaagcggcaccgacttcaccctgacaatatccagcctccagcctgaggacttcgccacctactactgccagcagtacagcagatacagccccgtgacctttggacagggcaccaaggtggaaatcaagagactcgagatccagaaccctgatcctgccgtgtaccagctgcgggatagcaagagcagcgacaagagcgtgtgtctgttcaccgacttcgacagccagaccaacgtgtcccagagcaaggactccgacgtgtacatcaccgataagtgcgtgctggacatgcggagcatggacttcaagagcaactccgccgtggcctggtccaacaagtccgatttcgcctgcgccaacgccttcaacaacagcattatccccgaggacacattcttcccaagccccgagagcagctgcgacgtgaagctggtggaaaagagcttcgagacagacaccaacctgaacttccagatcctgtacgagatcctgctgggcaaggccaccctgtacgccgtgctggtgtctgccctggtgctgatggctatggtcaagcggaaggacagccggggacgcgccaagagaagcggatctggcgtgaagcagaccctgaatttcgacctgctgaagctggctggcgacgtggaatccaacccaggccctactagtatggactggatttggcgcatccttttccttgtcggcgctgctaccggcgcgcattccttcgaagaagttcagctggttgaaagtggtggcggcctggttcaacctggcggatctctgagactgagctgtgccgccagcggcttcaatgtgtacgcctctggaatgcactgggtccgacaggcccctggcaaaggacttgagtgggtcgccaaaatctaccccgacagcgactacacctattacgccgacagcgtgaagggcagattcaccatcagcgccgacaccagcaagaacaccgcctacctccagatgaactccctgagagccgaggacaccgccgtgtactactgtagcagagacagcagcttctactacgtgtacgctatggactactggggccagggcacactggtcacagtctcttctacgcgtgaggacctgaagaacgtgttcccacctgaggtggccgtgttcgagcctagcgaggccgagatcagccacacccagaaagccaccctcgtgtgcctggctaccggcttctaccccgaccatgtggaactgtcttggtgggtcaacggcaaagaggtgcacagcggcgtgtgtaccgacccccagccactgaaagaacagcccgccctgaacgacagccggtactgcctgagcagcagactgagagtgtccgccaccttctggcagaacccccggaaccacttcagatgccaggtgcagttctacggcctgagcgagaacgacgagtggacccaggacagagccaagcccgtgacccagatcgtgtctgccgaagcctggggcagagccgattgcggctttaccagcgagagctaccagcagggcgtgctgagcgccaccaacctgagcgtgatcggcttcagaatcctgctgctgaaagtggccggctttaacctgctgatgaccctgcggctgtggtccagc

SEQ ID NO: 39285 - DNA, 2274 bp, synthetic construct
  source 1..2274: mol_type = other DNA
atggccttaccagtgaccgccttgctcctgccgctggccttgctgctccacgccgccaggccggaagtgcagctggttgaatctggcggaggactggttcagcctggcggatctctgagactgtcttgtgccgccagcggcttcagcttcagcgacttttggatgagctgggtccgacaggcccctggcaaaggacttgaatgggtcgccacaatcagccaggccggcagcgagaaggactacgtggactctgtgaagggcagattcaccatcagccgggacaacgccaagaagtccctgtacctccagatgaacagcctgagagccgaggacaccgccgtgtactattgtgcctctggcgtgtacagcttcgactacagaggccagggcaccctggtcacagtctcttctggtaccggcggaggcggatctggcggcggaggtagcggtggcggaggatctgaattcgacatccagatgacacagagccctagcagcctgtctgccagcgtgggagacagagtgaccatcacctgtagagccagccaggacatcaacacagccgtggcttggtatcagcagaagcctggcaaggcccctaagctgctgatctacagcgcctacttcctgtacagcggcgtgcccagcagattcagcggaagcagaagcggcaccgacttcaccctgacaatatccagcctccagcctgaggacttcgccacctactactgccagcagtacagcagatacagccccgtgacctttggacagggcaccaaggtggaaatcaagagactcgaggacctgaagaacgtgttcccacctgaggtggccgtgttcgagcctagcgaggccgagatcagccacacccagaaagccaccctcgtgtgcctggctaccggcttctaccccgaccatgtggaactgtcttggtgggtcaacggcaaagaggtgcacagcggcgtgtgtaccgacccccagccactgaaagaacagcccgccctgaacgacagccggtactgcctgagcagcagactgagagtgtccgccaccttctggcagaacccccggaaccacttcagatgccaggtgcagttctacggcctgagcgagaacgacgagtggacccaggacagagccaagcccgtgacccagatcgtgtctgccgaagcctggggcagagccgattgcggctttaccagcgagagctaccagcagggcgtgctgagcgccaccaacctgagcgtgatcggcttcagaatcctgctgctgaaagtggccggctttaacctgctgatgaccctgcggctgtggtccagcagggccaagcgatctggatctggagcaacaaacttctcactactcaaacaagcaggtgacgtggaggagaatcccgggcctactagtatggactggatttggcgcatccttttccttgtcggcgctgctaccggcgcgcattccttcgaagaagttcagctggttgaaagtggtggcggcctggttcaacctggcggatctctgagactgagctgtgccgccagcggcttcaatgtgtacgcctctggaatgcactgggtccgacaggcccctggcaaaggacttgagtgggtcgccaaaatctaccccgacagcgactacacctattacgccgacagcgtgaagggcagattcaccatcagcgccgacaccagcaagaacaccgcctacctccagatgaactccctgagagccgaggacaccgccgtgtactactgtagcagagacagcagcttctactacgtgtacgctatggactactggggccagggcacactggtcacagtctcttctacgcgtatccagaaccctgatcctgccgtgtaccagctgcgggatagcaagagcagcgacaagagcgtgtgtctgttcaccgacttcgacagccagaccaacgtgtcccagagcaaggactccgacgtgtacatcaccgataagtgcgtgctggacatgcggagcatggacttcaagagcaactccgccgtggcctggtccaacaagtccgatttcgcctgcgccaacgccttcaacaacagcattatccccgaggacacattcttcccaagccccgagagcagctgcgacgtgaagctggtggaaaagagcttcgagacagacaccaacctgaacttccagatcctgtacgagatcctgctgggcaaggccaccctgtacgccgtgctggtgtctgccctggtgctgatggctatggtcaagcggaaggacagccgggga

SEQ ID NO: 39286 - DNA, 2286 bp, synthetic construct
  source 1..2286: mol_type = other DNA
atggccttaccagtgaccgccttgctcctgccgctggccttgctgctccacgccgccaggccggaagtgcagctggttgaatctggcggaggactggttcagcctggcggatctctgagactgtcttgtgccgccagcggcttcagcttcagcgacttttggatgagctgggtccgacaggcccctggcaaaggacttgaatgggtcgccacaatcagccaggccggcagcgagaaggactacgtggactctgtgaagggcagattcaccatcagccgggacaacgccaagaagtccctgtacctccagatgaacagcctgagagccgaggacaccgccgtgtactattgtgcctctggcgtgtacagcttcgactacagaggccagggcaccctggtcacagtctcttctggtaccggcggaggcggatctggcggcggaggtagcggtggcggaggatctgaattcgacatccagatgacacagagccctagcagcctgtctgccagcgtgggagacagagtgaccatcacctgtagagccagccaggacatcaacacagccgtggcttggtatcagcagaagcctggcaaggcccctaagctgctgatctacagcgcctacttcctgtacagcggcgtgcccagcagattcagcggaagcagaagcggcaccgacttcaccctgacaatatccagcctccagcctgaggacttcgccacctactactgccagcagtacagcagatacagccccgtgacctttggacagggcaccaaggtggaaatcaagagactcgagatccagaaccctgatcctgccgtgtaccagctgcgggatagcaagagcagcgacaagagcgtgtgtctgttcaccgacttcgacagccagaccaacgtgtcccagagcaaggactccgacgtgtacatcaccgataagtgcgtgctggacatgcggagcatggacttcaagagcaactccgccgtggcctggtccaacaagtccgatttcgcctgcgccaacgccttcaacaacagcattatccccgaggacacattcttcccaagccccgagagcagctgcgacgtgaagctggtggaaaagagcttcgagacagacaccaacctgaacttccagatcctgtacgagatcctgctgggcaaggccaccctgtacgccgtgctggtgtctgccctggtgctgatggctatggtcaagcggaaggacagccggggacgcgccaagagaagcggatctggcgtgaagcagaccctgaatttcgacctgctgaagctggctggcgacgtggaatccaacccaggccctactagtatggactggatttggcgcatccttttccttgtcggcgctgctaccggcgcgcattccttcgaagaagttcagctggttgaaagtggtggcggcctggttcaacctggcggatctctgagactgagctgtgccgccagcggcttcaatgtgtacgcctctggaatgcactgggtccgacaggcccctggcaaaggacttgagtgggtcgccaaaatctaccccgacagcgactacacctattacgccgacagcgtgaagggcagattcaccatcagcgccgacaccagcaagaacaccgcctacctccagatgaactccctgagagccgaggacaccgccgtgtactactgtagcagagacagcagcttctactacgtgtacgctatggactactggggccagggcacactggtcacagtctcttctacgcgtgaggacctgaagaacgtgttcccacctgaggtggccgtgttcgagcctagcgaggccgagatcagccacacccagaaagccaccctcgtgtgcctggctaccggcttctaccccgaccatgtggaactgtcttggtgggtcaacggcaaagaggtgcacagcggcgtgtgtaccgacccccagccactgaaagaacagcccgccctgaacgacagccggtactgcctgagcagcagactgagagtgtccgccaccttctggcagaacccccggaaccacttcagatgccaggtgcagttctacggcctgagcgagaacgacgagtggacccaggacagagccaagcccgtgacccagatcgtgtctgccgaagcctggggcagagccgattgcggctttaccagcgagagctaccagcagggcgtgctgagcgccaccaacctgagcgtgatcggcttcagaatcctgctgctgaaagtggccggctttaacctgctgatgaccctgcggctgtggtccagc

SEQ ID NO: 39287 - DNA, 2685 bp, synthetic construct
  source 1..2685: mol_type = other DNA
atggccttaccagtgaccgccttgctcctgccgctggccttgctgctccacgccgccaggccggaagtgcagctggttgaatctggcggaggactggttcagcctggcggatctctgagactgtcttgtgccgccagcggcttcagcttcagcgacttttggatgagctgggtccgacaggcccctggcaaaggacttgaatgggtcgccacaatcagccaggccggcagcgagaaggactacgtggactctgtgaagggcagattcaccatcagccgggacaacgccaagaagtccctgtacctccagatgaacagcctgagagccgaggacaccgccgtgtactattgtgcctctggcgtgtacagcttcgactacagaggccagggcaccctggtcacagtctcttctggtaccggcggaggcggatctggcggcggaggtagcggtggcggaggatctgaattcgacatccagatgacacagagccctagcagcctgtctgccagcgtgggagacagagtgaccatcacctgtagagccagccaggacatcaacacagccgtggcttggtatcagcagaagcctggcaaggcccctaagctgctgatctacagcgcctacttcctgtacagcggcgtgcccagcagattcagcggaagcagaagcggcaccgacttcaccctgacaatatccagcctccagcctgaggacttcgccacctactactgccagcagtacagcagatacagccccgtgacctttggacagggcaccaaggtggaaatcaagagactcgaggacctgaagaacgtgttcccacctgaggtggccgtgttcgagcctagcgaggccgagatcagccacacccagaaagccaccctcgtgtgcctggctaccggcttctaccccgaccatgtggaactgtcttggtgggtcaacggcaaagaggtgcacagcggcgtgtgtaccgacccccagccactgaaagaacagcccgccctgaacgacagccggtactgcctgagcagcagactgagagtgtccgccaccttctggcagaacccccggaaccacttcagatgccaggtgcagttctacggcctgagcgagaacgacgagtggacccaggacagagccaagcccgtgacccagatcgtgtctgccgaagcctggggcagagccgattgcggctttaccagcgagagctaccagcagggcgtgctgagcgccaccaacctgagcgtgatcggcttcagaatcctgctgctgaaagtggccggctttaacctgctgatgaccctgcggctgtggtccagcagggccaagcgatctggatctggagcaacaaacttctcactactcaaacaagcaggtgacgtggaggagaatcccgggcctactagtatggactggatttggcgcatccttttccttgtcggcgctgctaccggcgcgcattccgggccccagctccagctgcaagagtctggacctggcctggtcaagcctagcgagacactgagcctgacctgtaccgtgtccggcgatagcatcagcagcggcgattactactggggctggatcagacagcctcctggcaaaggactggaatggatcggccacatctactacagcggcgtgacctactacaaccccagcctgaagtccagagtgaccatcagcgtggacaccagccggaaccagttctccctgaagctgtctagcgtgacagccgccgataccgccgtgtactactgcaccagagaggacagcagcaactggcggagtagaggccagggaacactggtcacagttagctctggatccggcggaggcggaagtggaggcggaggatctggcggcggaggctctttcgaagaagttcagctggttgaaagtggtggcggcctggttcaacctggcggatctctgagactgagctgtgccgccagcggcttcaatgtgtacgcctctggaatgcactgggtccgacaggcccctggcaaaggacttgagtgggtcgccaaaatctaccccgacagcgactacacctattacgccgacagcgtgaagggcagattcaccatcagcgccgacaccagcaagaacaccgcctacctccagatgaactccctgagagccgaggacaccgccgtgtactactgtagcagagacagcagcttctactacgtgtacgctatggactactggggccagggcacactggtcacagtctcttctacgcgtatccagaaccctgatcctgccgtgtaccagctgcgggatagcaagagcagcgacaagagcgtgtgtctgttcaccgacttcgacagccagaccaacgtgtcccagagcaaggactccgacgtgtacatcaccgataagtgcgtgctggacatgcggagcatggacttcaagagcaactccgccgtggcctggtccaacaagtccgatttcgcctgcgccaacgccttcaacaacagcattatccccgaggacacattcttcccaagccccgagagcagctgcgacgtgaagctggtggaaaagagcttcgagacagacaccaacctgaacttccagatcctgtacgagatcctgctgggcaaggccaccctgtacgccgtgctggtgtctgccctggtgctgatggctatggtcaagcggaaggacagccgggga

SEQ ID NO: 39288 - DNA, 2697 bp, synthetic construct
  source 1..2697: mol_type = other DNA
atggccttaccagtgaccgccttgctcctgccgctggccttgctgctccacgccgccaggccggaagtgcagctggttgaatctggcggaggactggttcagcctggcggatctctgagactgtcttgtgccgccagcggcttcagcttcagcgacttttggatgagctgggtccgacaggcccctggcaaaggacttgaatgggtcgccacaatcagccaggccggcagcgagaaggactacgtggactctgtgaagggcagattcaccatcagccgggacaacgccaagaagtccctgtacctccagatgaacagcctgagagccgaggacaccgccgtgtactattgtgcctctggcgtgtacagcttcgactacagaggccagggcaccctggtcacagtctcttctggtaccggcggaggcggatctggcggcggaggtagcggtggcggaggatctgaattcgacatccagatgacacagagccctagcagcctgtctgccagcgtgggagacagagtgaccatcacctgtagagccagccaggacatcaacacagccgtggcttggtatcagcagaagcctggcaaggcccctaagctgctgatctacagcgcctacttcctgtacagcggcgtgcccagcagattcagcggaagcagaagcggcaccgacttcaccctgacaatatccagcctccagcctgaggacttcgccacctactactgccagcagtacagcagatacagccccgtgacctttggacagggcaccaaggtggaaatcaagagactcgagatccagaaccctgatcctgccgtgtaccagctgcgggatagcaagagcagcgacaagagcgtgtgtctgttcaccgacttcgacagccagaccaacgtgtcccagagcaaggactccgacgtgtacatcaccgataagtgcgtgctggacatgcggagcatggacttcaagagcaactccgccgtggcctggtccaacaagtccgatttcgcctgcgccaacgccttcaacaacagcattatccccgaggacacattcttcccaagccccgagagcagctgcgacgtgaagctggtggaaaagagcttcgagacagacaccaacctgaacttccagatcctgtacgagatcctgctgggcaaggccaccctgtacgccgtgctggtgtctgccctggtgctgatggctatggtcaagcggaaggacagccggggacgcgccaagagaagcggatctggcgtgaagcagaccctgaatttcgacctgctgaagctggctggcgacgtggaatccaacccaggccctactagtatggactggatttggcgcatccttttccttgtcggcgctgctaccggcgcgcattccgggccccagctccagctgcaagagtctggacctggcctggtcaagcctagcgagacactgagcctgacctgtaccgtgtccggcgatagcatcagcagcggcgattactactggggctggatcagacagcctcctggcaaaggactggaatggatcggccacatctactacagcggcgtgacctactacaaccccagcctgaagtccagagtgaccatcagcgtggacaccagccggaaccagttctccctgaagctgtctagcgtgacagccgccgataccgccgtgtactactgcaccagagaggacagcagcaactggcggagtagaggccagggaacactggtcacagttagctctggatccggcggaggcggaagtggaggcggaggatctggcggcggaggctctttcgaagaagttcagctggttgaaagtggtggcggcctggttcaacctggcggatctctgagactgagctgtgccgccagcggcttcaatgtgtacgcctctggaatgcactgggtccgacaggcccctggcaaaggacttgagtgggtcgccaaaatctaccccgacagcgactacacctattacgccgacagcgtgaagggcagattcaccatcagcgccgacaccagcaagaacaccgcctacctccagatgaactccctgagagccgaggacaccgccgtgtactactgtagcagagacagcagcttctactacgtgtacgctatggactactggggccagggcacactggtcacagtctcttctacgcgtgaggacctgaagaacgtgttcccacctgaggtggccgtgttcgagcctagcgaggccgagatcagccacacccagaaagccaccctcgtgtgcctggctaccggcttctaccccgaccatgtggaactgtcttggtgggtcaacggcaaagaggtgcacagcggcgtgtgtaccgacccccagccactgaaagaacagcccgccctgaacgacagccggtactgcctgagcagcagactgagagtgtccgccaccttctggcagaacccccggaaccacttcagatgccaggtgcagttctacggcctgagcgagaacgacgagtggacccaggacagagccaagcccgtgacccagatcgtgtctgccgaagcctggggcagagccgattgcggctttaccagcgagagctaccagcagggcgtgctgagcgccaccaacctgagcgtgatcggcttcagaatcctgctgctgaaagtggccggctttaacctgctgatgaccctgcggctgtggtccagc

SEQ ID NO: 39289 - DNA, 2181 bp, synthetic construct
  source 1..2181: mol_type = other DNA
atggccttaccagtgaccgccttgctcctgccgctggccttgctgctccacgccgccaggccggacatccagatgacacagagccctagcagcctgtctgccagcgtgggagacagagtgaccatcacctgtagagccagccaggacatcaacacagccgtggcttggtatcagcagaagcctggcaaggcccctaagctgctgatctacagcgcctacttcctgtacagcggcgtgcccagcagattcagcggaagcagaagcggcaccgacttcaccctgacaatatccagcctccagcctgaggacttcgccacctactactgccagcagtacagcagatacagccccgtgacctttggacagggcaccaaggtggaaatcaagagactcgaggacctgaagaacgtgttcccacctgaggtggccgtgttcgagcctagcgaggccgagatcagccacacccagaaagccaccctcgtgtgcctggctaccggcttctaccccgaccatgtggaactgtcttggtgggtcaacggcaaagaggtgcacagcggcgtgtgtaccgacccccagccactgaaagaacagcccgccctgaacgacagccggtactgcctgagcagcagactgagagtgtccgccaccttctggcagaacccccggaaccacttcagatgccaggtgcagttctacggcctgagcgagaacgacgagtggacccaggacagagccaagcccgtgacccagatcgtgtctgccgaagcctggggcagagccgatgatgtgattaagatccactggcaggaaaagaagtccaacaccatcctgggcagccaggaaggcaacaccatgaagaccaacgacacctacatgaagttcagctggctgaccgtgcccgagaagtccctggacaaagaacacagatgcatcgtgcggcacgaaaacaacaagaacggcgtggaccaggaaatcatcttcccacccatcaagaccgatgtgattacaatggaccccaaggacaactgctccaaggacgccaacgataccctgctgctccagctgaccaacaccagcgcctactacatgtacttgttgctgctgctgaagtccgtggtgtacttcgccatcatcacatgctgcctgctgatggctatggtcaagcggaaggacagccggggaagggccaagcgatctggatctggagcaacaaacttctcactactcaaacaagcaggtgacgtggaggagaatcccgggcctactagtatggactggatttggcgcatccttttccttgtcggcgctgctaccggcgcgcattccttcgaagaagttcagctggttgaaagtggtggcggcctggttcaacctggcggatctctgagactgagctgtgccgccagcggcttcaatgtgtacgcctctggaatgcactgggtccgacaggcccctggcaaaggacttgagtgggtcgccaaaatctaccccgacagcgactacacctattacgccgacagcgtgaagggcagattcaccatcagcgccgacaccagcaagaacaccgcctacctccagatgaactccctgagagccgaggacaccgccgtgtactactgtagcagagacagcagcttctactacgtgtacgctatggactactggggccagggcacactggtcacagtctcttctacgcgtatccagaaccctgatcctgccgtgtaccagctgcgggatagcaagagcagcgacaagagcgtgtgtctgttcaccgacttcgacagccagaccaacgtgtcccagagcaaggactccgacgtgtacatcaccgataagtgcgtgctggacatgcggagcatggacttcaagagcaactccgccgtggcctggtccaacaagtccgatttcgcctgcgccaacgccttcaacaacagcattatccccgaggacacattcttcccaagccccgagagcagcgactccaccgaccacgtgaagcccaaagagacagagaacaccaagcagcccagcaagagctgccacaagcccaaggccatcgtgcacaccgagaaagtgaacatgatgagcctgaccgtgctgggcctgcggatgctgttcgccaaaaccgtggccgtgaacttcctgctgaccgccaagctgttcttcctcctcaccgcc

SEQ ID NO: 39290 - DNA, 2193 bp, synthetic construct
  source 1..2193: mol_type = other DNA
atggccttaccagtgaccgccttgctcctgccgctggccttgctgctccacgccgccaggccggacatccagatgacacagagccctagcagcctgtctgccagcgtgggagacagagtgaccatcacctgtagagccagccaggacatcaacacagccgtggcttggtatcagcagaagcctggcaaggcccctaagctgctgatctacagcgcctacttcctgtacagcggcgtgcccagcagattcagcggaagcagaagcggcaccgacttcaccctgacaatatccagcctccagcctgaggacttcgccacctactactgccagcagtacagcagatacagccccgtgacctttggacagggcaccaaggtggaaatcaagagactcgagatccagaaccctgatcctgccgtgtaccagctgcgggatagcaagagcagcgacaagagcgtgtgtctgttcaccgacttcgacagccagaccaacgtgtcccagagcaaggactccgacgtgtacatcaccgataagtgcgtgctggacatgcggagcatggacttcaagagcaactccgccgtggcctggtccaacaagtccgatttcgcctgcgccaacgccttcaacaacagcattatccccgaggacacattcttcccaagccccgagagcagcgactccaccgaccacgtgaagcccaaagagacagagaacaccaagcagcccagcaagagctgccacaagcccaaggccatcgtgcacaccgagaaagtgaacatgatgagcctgaccgtgctgggcctgcggatgctgttcgccaaaaccgtggccgtgaacttcctgctgaccgccaagctgttcttcctcctcaccgcccgcgccaagagaagcggatctggcgtgaagcagaccctgaatttcgacctgctgaagctggctggcgacgtggaatccaacccaggccctactagtatggactggatttggcgcatccttttccttgtcggcgctgctaccggcgcgcattccttcgaagaagttcagctggttgaaagtggtggcggcctggttcaacctggcggatctctgagactgagctgtgccgccagcggcttcaatgtgtacgcctctggaatgcactgggtccgacaggcccctggcaaaggacttgagtgggtcgccaaaatctaccccgacagcgactacacctattacgccgacagcgtgaagggcagattcaccatcagcgccgacaccagcaagaacaccgcctacctccagatgaactccctgagagccgaggacaccgccgtgtactactgtagcagagacagcagcttctactacgtgtacgctatggactactggggccagggcacactggtcacagtctcttctacgcgtgaggacctgaagaacgtgttcccacctgaggtggccgtgttcgagcctagcgaggccgagatcagccacacccagaaagccaccctcgtgtgcctggctaccggcttctaccccgaccatgtggaactgtcttggtgggtcaacggcaaagaggtgcacagcggcgtgtgtaccgacccccagccactgaaagaacagcccgccctgaacgacagccggtactgcctgagcagcagactgagagtgtccgccaccttctggcagaacccccggaaccacttcagatgccaggtgcagttctacggcctgagcgagaacgacgagtggacccaggacagagccaagcccgtgacccagatcgtgtctgccgaagcctggggcagagccgatgatgtgattaagatccactggcaggaaaagaagtccaacaccatcctgggcagccaggaaggcaacaccatgaagaccaacgacacctacatgaagttcagctggctgaccgtgcccgagaagtccctggacaaagaacacagatgcatcgtgcggcacgaaaacaacaagaacggcgtggaccaggaaatcatcttcccacccatcaagaccgatgtgattacaatggaccccaaggacaactgctccaaggacgccaacgataccctgctgctccagctgaccaacaccagcgcctactacatgtacttgttgctgctgctgaagtccgtggtgtacttcgccatcatcacatgctgcctgctgatggctatggtcaagcggaaggacagccgggga

SEQ ID NO: 39291 - DNA, 2586 bp, synthetic construct
  source 1..2586: mol_type = other DNA
atggccttaccagtgaccgccttgctcctgccgctggccttgctgctccacgccgccaggccggaagtgcagctggttgaatctggcggaggactggttcagcctggcggatctctgagactgtcttgtgccgccagcggcttcagcttcagcgacttttggatgagctgggtccgacaggcccctggcaaaggacttgaatgggtcgccacaatcagccaggccggcagcgagaaggactacgtggactctgtgaagggcagattcaccatcagccgggacaacgccaagaagtccctgtacctccagatgaacagcctgagagccgaggacaccgccgtgtactattgtgcctctggcgtgtacagcttcgactacagaggccagggcaccctggtcacagtctcttctggtaccggcggaggcggatctggcggcggaggtagcggtggcggaggatctgaattcgacatccagatgacacagagccctagcagcctgtctgccagcgtgggagacagagtgaccatcacctgtagagccagccaggacatcaacacagccgtggcttggtatcagcagaagcctggcaaggcccctaagctgctgatctacagcgcctacttcctgtacagcggcgtgcccagcagattcagcggaagcagaagcggcaccgacttcaccctgacaatatccagcctccagcctgaggacttcgccacctactactgccagcagtacagcagatacagccccgtgacctttggacagggcaccaaggtggaaatcaagagactcgaggacctgaagaacgtgttcccacctgaggtggccgtgttcgagcctagcgaggccgagatcagccacacccagaaagccaccctcgtgtgcctggctaccggcttctaccccgaccatgtggaactgtcttggtgggtcaacggcaaagaggtgcacagcggcgtgtgtaccgacccccagccactgaaagaacagcccgccctgaacgacagccggtactgcctgagcagcagactgagagtgtccgccaccttctggcagaacccccggaaccacttcagatgccaggtgcagttctacggcctgagcgagaacgacgagtggacccaggacagagccaagcccgtgacccagatcgtgtctgccgaagcctggggcagagccgatgatgtgattaagatccactggcaggaaaagaagtccaacaccatcctgggcagccaggaaggcaacaccatgaagaccaacgacacctacatgaagttcagctggctgaccgtgcccgagaagtccctggacaaagaacacagatgcatcgtgcggcacgaaaacaacaagaacggcgtggaccaggaaatcatcttcccacccatcaagaccgatgtgattacaatggaccccaaggacaactgctccaaggacgccaacgataccctgctgctccagctgaccaacaccagcgcctactacatgtacttgttgctgctgctgaagtccgtggtgtacttcgccatcatcacatgctgcctgctgatggctatggtcaagcggaaggacagccggggaagggccaagcgatctggatctggagcaacaaacttctcactactcaaacaagcaggtgacgtggaggagaatcccgggcctactagtatggactggatttggcgcatccttttccttgtcggcgctgctaccggcgcgcattccttcgaagaagttcagctggttgaaagtggtggcggcctggttcaacctggcggatctctgagactgagctgtgccgccagcggcttcaatgtgtacgcctctggaatgcactgggtccgacaggcccctggcaaaggacttgagtgggtcgccaaaatctaccccgacagcgactacacctattacgccgacagcgtgaagggcagattcaccatcagcgccgacaccagcaagaacaccgcctacctccagatgaactccctgagagccgaggacaccgccgtgtactactgtagcagagacagcagcttctactacgtgtacgctatggactactggggccagggcacactggtcacagtctcttctacgcgtatccagaaccctgatcctgccgtgtaccagctgcgggatagcaagagcagcgacaagagcgtgtgtctgttcaccgacttcgacagccagaccaacgtgtcccagagcaaggactccgacgtgtacatcaccgataagtgcgtgctggacatgcggagcatggacttcaagagcaactccgccgtggcctggtccaacaagtccgatttcgcctgcgccaacgccttcaacaacagcattatccccgaggacacattcttcccaagccccgagagcagcgactccaccgaccacgtgaagcccaaagagacagagaacaccaagcagcccagcaagagctgccacaagcccaaggccatcgtgcacaccgagaaagtgaacatgatgagcctgaccgtgctgggcctgcggatgctgttcgccaaaaccgtggccgtgaacttcctgctgaccgccaagctgttcttcctcctcaccgcc

SEQ ID NO: 39292 - DNA, 2598 bp, synthetic construct
  source 1..2598: mol_type = other DNA
atggccttaccagtgaccgccttgctcctgccgctggccttgctgctccacgccgccaggccggaagtgcagctggttgaatctggcggaggactggttcagcctggcggatctctgagactgtcttgtgccgccagcggcttcagcttcagcgacttttggatgagctgggtccgacaggcccctggcaaaggacttgaatgggtcgccacaatcagccaggccggcagcgagaaggactacgtggactctgtgaagggcagattcaccatcagccgggacaacgccaagaagtccctgtacctccagatgaacagcctgagagccgaggacaccgccgtgtactattgtgcctctggcgtgtacagcttcgactacagaggccagggcaccctggtcacagtctcttctggtaccggcggaggcggatctggcggcggaggtagcggtggcggaggatctgaattcgacatccagatgacacagagccctagcagcctgtctgccagcgtgggagacagagtgaccatcacctgtagagccagccaggacatcaacacagccgtggcttggtatcagcagaagcctggcaaggcccctaagctgctgatctacagcgcctacttcctgtacagcggcgtgcccagcagattcagcggaagcagaagcggcaccgacttcaccctgacaatatccagcctccagcctgaggacttcgccacctactactgccagcagtacagcagatacagccccgtgacctttggacagggcaccaaggtggaaatcaagagactcgagatccagaaccctgatcctgccgtgtaccagctgcgggatagcaagagcagcgacaagagcgtgtgtctgttcaccgacttcgacagccagaccaacgtgtcccagagcaaggactccgacgtgtacatcaccgataagtgcgtgctggacatgcggagcatggacttcaagagcaactccgccgtggcctggtccaacaagtccgatttcgcctgcgccaacgccttcaacaacagcattatccccgaggacacattcttcccaagccccgagagcagcgactccaccgaccacgtgaagcccaaagagacagagaacaccaagcagcccagcaagagctgccacaagcccaaggccatcgtgcacaccgagaaagtgaacatgatgagcctgaccgtgctgggcctgcggatgctgttcgccaaaaccgtggccgtgaacttcctgctgaccgccaagctgttcttcctcctcaccgcccgcgccaagagaagcggatctggcgtgaagcagaccctgaatttcgacctgctgaagctggctggcgacgtggaatccaacccaggccctactagtatggactggatttggcgcatccttttccttgtcggcgctgctaccggcgcgcattccttcgaagaagttcagctggttgaaagtggtggcggcctggttcaacctggcggatctctgagactgagctgtgccgccagcggcttcaatgtgtacgcctctggaatgcactgggtccgacaggcccctggcaaaggacttgagtgggtcgccaaaatctaccccgacagcgactacacctattacgccgacagcgtgaagggcagattcaccatcagcgccgacaccagcaagaacaccgcctacctccagatgaactccctgagagccgaggacaccgccgtgtactactgtagcagagacagcagcttctactacgtgtacgctatggactactggggccagggcacactggtcacagtctcttctacgcgtgaggacctgaagaacgtgttcccacctgaggtggccgtgttcgagcctagcgaggccgagatcagccacacccagaaagccaccctcgtgtgcctggctaccggcttctaccccgaccatgtggaactgtcttggtgggtcaacggcaaagaggtgcacagcggcgtgtgtaccgacccccagccactgaaagaacagcccgccctgaacgacagccggtactgcctgagcagcagactgagagtgtccgccaccttctggcagaacccccggaaccacttcagatgccaggtgcagttctacggcctgagcgagaacgacgagtggacccaggacagagccaagcccgtgacccagatcgtgtctgccgaagcctggggcagagccgatgatgtgattaagatccactggcaggaaaagaagtccaacaccatcctgggcagccaggaaggcaacaccatgaagaccaacgacacctacatgaagttcagctggctgaccgtgcccgagaagtccctggacaaagaacacagatgcatcgtgcggcacgaaaacaacaagaacggcgtggaccaggaaatcatcttcccacccatcaagaccgatgtgattacaatggaccccaaggacaactgctccaaggacgccaacgataccctgctgctccagctgaccaacaccagcgcctactacatgtacttgttgctgctgctgaagtccgtggtgtacttcgccatcatcacatgctgcctgctgatggctatggtcaagcggaaggacagccgggga

SEQ ID NO: 39293 - DNA, 2997 bp, synthetic construct
  source 1..2997: mol_type = other DNA
atggccttaccagtgaccgccttgctcctgccgctggccttgctgctccacgccgccaggccggaagtgcagctggttgaatctggcggaggactggttcagcctggcggatctctgagactgtcttgtgccgccagcggcttcagcttcagcgacttttggatgagctgggtccgacaggcccctggcaaaggacttgaatgggtcgccacaatcagccaggccggcagcgagaaggactacgtggactctgtgaagggcagattcaccatcagccgggacaacgccaagaagtccctgtacctccagatgaacagcctgagagccgaggacaccgccgtgtactattgtgcctctggcgtgtacagcttcgactacagaggccagggcaccctggtcacagtctcttctggtaccggcggaggcggatctggcggcggaggtagcggtggcggaggatctgaattcgacatccagatgacacagagccctagcagcctgtctgccagcgtgggagacagagtgaccatcacctgtagagccagccaggacatcaacacagccgtggcttggtatcagcagaagcctggcaaggcccctaagctgctgatctacagcgcctacttcctgtacagcggcgtgcccagcagattcagcggaagcagaagcggcaccgacttcaccctgacaatatccagcctccagcctgaggacttcgccacctactactgccagcagtacagcagatacagccccgtgacctttggacagggcaccaaggtggaaatcaagagactcgaggacctgaagaacgtgttcccacctgaggtggccgtgttcgagcctagcgaggccgagatcagccacacccagaaagccaccctcgtgtgcctggctaccggcttctaccccgaccatgtggaactgtcttggtgggtcaacggcaaagaggtgcacagcggcgtgtgtaccgacccccagccactgaaagaacagcccgccctgaacgacagccggtactgcctgagcagcagactgagagtgtccgccaccttctggcagaacccccggaaccacttcagatgccaggtgcagttctacggcctgagcgagaacgacgagtggacccaggacagagccaagcccgtgacccagatcgtgtctgccgaagcctggggcagagccgatgatgtgattaagatccactggcaggaaaagaagtccaacaccatcctgggcagccaggaaggcaacaccatgaagaccaacgacacctacatgaagttcagctggctgaccgtgcccgagaagtccctggacaaagaacacagatgcatcgtgcggcacgaaaacaacaagaacggcgtggaccaggaaatcatcttcccacccatcaagaccgatgtgattacaatggaccccaaggacaactgctccaaggacgccaacgataccctgctgctccagctgaccaacaccagcgcctactacatgtacttgttgctgctgctgaagtccgtggtgtacttcgccatcatcacatgctgcctgctgatggctatggtcaagcggaaggacagccggggaagggccaagcgatctggatctggagcaacaaacttctcactactcaaacaagcaggtgacgtggaggagaatcccgggcctactagtatggactggatttggcgcatccttttccttgtcggcgctgctaccggcgcgcattccgggccccagctccagctgcaagagtctggacctggcctggtcaagcctagcgagacactgagcctgacctgtaccgtgtccggcgatagcatcagcagcggcgattactactggggctggatcagacagcctcctggcaaaggactggaatggatcggccacatctactacagcggcgtgacctactacaaccccagcctgaagtccagagtgaccatcagcgtggacaccagccggaaccagttctccctgaagctgtctagcgtgacagccgccgataccgccgtgtactactgcaccagagaggacagcagcaactggcggagtagaggccagggaacactggtcacagttagctctggatccggcggaggcggaagtggaggcggaggatctggcggcggaggctctttcgaagaagttcagctggttgaaagtggtggcggcctggttcaacctggcggatctctgagactgagctgtgccgccagcggcttcaatgtgtacgcctctggaatgcactgggtccgacaggcccctggcaaaggacttgagtgggtcgccaaaatctaccccgacagcgactacacctattacgccgacagcgtgaagggcagattcaccatcagcgccgacaccagcaagaacaccgcctacctccagatgaactccctgagagccgaggacaccgccgtgtactactgtagcagagacagcagcttctactacgtgtacgctatggactactggggccagggcacactggtcacagtctcttctacgcgtatccagaaccctgatcctgccgtgtaccagctgcgggatagcaagagcagcgacaagagcgtgtgtctgttcaccgacttcgacagccagaccaacgtgtcccagagcaaggactccgacgtgtacatcaccgataagtgcgtgctggacatgcggagcatggacttcaagagcaactccgccgtggcctggtccaacaagtccgatttcgcctgcgccaacgccttcaacaacagcattatccccgaggacacattcttcccaagccccgagagcagcgactccaccgaccacgtgaagcccaaagagacagagaacaccaagcagcccagcaagagctgccacaagcccaaggccatcgtgcacaccgagaaagtgaacatgatgagcctgaccgtgctgggcctgcggatgctgttcgccaaaaccgtggccgtgaacttcctgctgaccgccaagctgttcttcctcctcaccgcc

SEQ ID NO: 39294 - DNA, 3009 bp, synthetic construct
  source 1..3009: mol_type = other DNA
atggccttaccagtgaccgccttgctcctgccgctggccttgctgctccacgccgccaggccggaagtgcagctggttgaatctggcggaggactggttcagcctggcggatctctgagactgtcttgtgccgccagcggcttcagcttcagcgacttttggatgagctgggtccgacaggcccctggcaaaggacttgaatgggtcgccacaatcagccaggccggcagcgagaaggactacgtggactctgtgaagggcagattcaccatcagccgggacaacgccaagaagtccctgtacctccagatgaacagcctgagagccgaggacaccgccgtgtactattgtgcctctggcgtgtacagcttcgactacagaggccagggcaccctggtcacagtctcttctggtaccggcggaggcggatctggcggcggaggtagcggtggcggaggatctgaattcgacatccagatgacacagagccctagcagcctgtctgccagcgtgggagacagagtgaccatcacctgtagagccagccaggacatcaacacagccgtggcttggtatcagcagaagcctggcaaggcccctaagctgctgatctacagcgcctacttcctgtacagcggcgtgcccagcagattcagcggaagcagaagcggcaccgacttcaccctgacaatatccagcctccagcctgaggacttcgccacctactactgccagcagtacagcagatacagccccgtgacctttggacagggcaccaaggtggaaatcaagagactcgagatccagaaccctgatcctgccgtgtaccagctgcgggatagcaagagcagcgacaagagcgtgtgtctgttcaccgacttcgacagccagaccaacgtgtcccagagcaaggactccgacgtgtacatcaccgataagtgcgtgctggacatgcggagcatggacttcaagagcaactccgccgtggcctggtccaacaagtccgatttcgcctgcgccaacgccttcaacaacagcattatccccgaggacacattcttcccaagccccgagagcagcgactccaccgaccacgtgaagcccaaagagacagagaacaccaagcagcccagcaagagctgccacaagcccaaggccatcgtgcacaccgagaaagtgaacatgatgagcctgaccgtgctgggcctgcggatgctgttcgccaaaaccgtggccgtgaacttcctgctgaccgccaagctgttcttcctcctcaccgcccgcgccaagagaagcggatctggcgtgaagcagaccctgaatttcgacctgctgaagctggctggcgacgtggaatccaacccaggccctactagtatggactggatttggcgcatccttttccttgtcggcgctgctaccggcgcgcattccgggccccagctccagctgcaagagtctggacctggcctggtcaagcctagcgagacactgagcctgacctgtaccgtgtccggcgatagcatcagcagcggcgattactactggggctggatcagacagcctcctggcaaaggactggaatggatcggccacatctactacagcggcgtgacctactacaaccccagcctgaagtccagagtgaccatcagcgtggacaccagccggaaccagttctccctgaagctgtctagcgtgacagccgccgataccgccgtgtactactgcaccagagaggacagcagcaactggcggagtagaggccagggaacactggtcacagttagctctggatccggcggaggcggaagtggaggcggaggatctggcggcggaggctctttcgaagaagttcagctggttgaaagtggtggcggcctggttcaacctggcggatctctgagactgagctgtgccgccagcggcttcaatgtgtacgcctctggaatgcactgggtccgacaggcccctggcaaaggacttgagtgggtcgccaaaatctaccccgacagcgactacacctattacgccgacagcgtgaagggcagattcaccatcagcgccgacaccagcaagaacaccgcctacctccagatgaactccctgagagccgaggacaccgccgtgtactactgtagcagagacagcagcttctactacgtgtacgctatggactactggggccagggcacactggtcacagtctcttctacgcgtgaggacctgaagaacgtgttcccacctgaggtggccgtgttcgagcctagcgaggccgagatcagccacacccagaaagccaccctcgtgtgcctggctaccggcttctaccccgaccatgtggaactgtcttggtgggtcaacggcaaagaggtgcacagcggcgtgtgtaccgacccccagccactgaaagaacagcccgccctgaacgacagccggtactgcctgagcagcagactgagagtgtccgccaccttctggcagaacccccggaaccacttcagatgccaggtgcagttctacggcctgagcgagaacgacgagtggacccaggacagagccaagcccgtgacccagatcgtgtctgccgaagcctggggcagagccgatgatgtgattaagatccactggcaggaaaagaagtccaacaccatcctgggcagccaggaaggcaacaccatgaagaccaacgacacctacatgaagttcagctggctgaccgtgcccgagaagtccctggacaaagaacacagatgcatcgtgcggcacgaaaacaacaagaacggcgtggaccaggaaatcatcttcccacccatcaagaccgatgtgattacaatggaccccaaggacaactgctccaaggacgccaacgataccctgctgctccagctgaccaacaccagcgcctactacatgtacttgttgctgctgctgaagtccgtggtgtacttcgccatcatcacatgctgcctgctgatggctatggtcaagcggaaggacagccgggga

SEQ ID NO: 39295 - DNA, 2175 bp, synthetic construct
  source 1..2175: mol_type = other DNA
atggccttaccagtgaccgccttgctcctgccgctggccttgctgctccacgccgccaggccggacatccagatgacacagagccctagcagcctgtctgccagcgtgggagacagagtgaccatcacctgtagagccagccaggacatcaacacagccgtggcttggtatcagcagaagcctggcaaggcccctaagctgctgatctacagcgcctacttcctgtacagcggcgtgcccagcagattcagcggaagcagaagcggcaccgacttcaccctgacaatatccagcctccagcctgaggacttcgccacctactactgccagcagtacagcagatacagccccgtgacctttggacagggcaccaaggtggaaatcaagagactcgaggacctgaagaacgtgttcccacctgaggtggccgtgttcgagcctagcgaggccgagatcagccacacccagaaagccaccctcgtgtgcctggctaccggcttctaccccgaccatgtggaactgtcttggtgggtcaacggcaaagaggtgcacagcggcgtgtgtaccgacccccagccactgaaagaacagcccgccctgaacgacagccggtactgcctgagcagcagactgagagtgtccgccaccttctggcagaacccccggaaccacttcagatgccaggtgcagttctacggcctgagcgagaacgacgagtggacccaggacagagccaagcccgtgacccagatcgtgtctgccgaagcctggggcagagccgatgatgtgattaagatccactggcaggaaaagaagtccaacaccatcctgggcagccaggaaggcaacaccatgaagaccaacgacacctacatgaagttcagctggctgaccgtgcccgagaagtccctggacaaagaacacagatgcatcgtgcggcacgaaaacaacaagaacggcgtggaccaggaaatcatcttcccacccatcaagaccgatgtgattacaatggaccccaaggacaactgctccaaggacgccaacgataccctgctgctccagctgaccaacaccagcgcctactacatgtacttgttgctgctgctgaagtccgtggtgtacttcgccatcatcacatgctgcctgctgcggagaaccgccttctgctgcaacggcgagaagtctagggccaagcgatctggatctggagcaacaaacttctcactactcaaacaagcaggtgacgtggaggagaatcccgggcctactagtatggactggatttggcgcatccttttccttgtcggcgctgctaccggcgcgcattccttcgaagaagttcagctggttgaaagtggtggcggcctggttcaacctggcggatctctgagactgagctgtgccgccagcggcttcaatgtgtacgcctctggaatgcactgggtccgacaggcccctggcaaaggacttgagtgggtcgccaaaatctaccccgacagcgactacacctattacgccgacagcgtgaagggcagattcaccatcagcgccgacaccagcaagaacaccgcctacctccagatgaactccctgagagccgaggacaccgccgtgtactactgtagcagagacagcagcttctactacgtgtacgctatggactactggggccagggcacactggtcacagtctcttctacgcgtatccagaaccctgatcctgccgtgtaccagctgcgggatagcaagagcagcgacaagagcgtgtgtctgttcaccgacttcgacagccagaccaacgtgtcccagagcaaggactccgacgtgtacatcaccgataagtgcgtgctggacatgcggagcatggacttcaagagcaactccgccgtggcctggtccaacaagtccgatttcgcctgcgccaacgccttcaacaacagcattatccccgaggacacattcttcccaagccccgagagcagcgactccaccgaccacgtgaagcccaaagagacagagaacaccaagcagcccagcaagagctgccacaagcccaaggccatcgtgcacaccgagaaagtgaacatgatgagcctgaccgtgctgggcctgcggatgctgttcgccaaaaccgtggccgtgaacttcctgctgaccgccaagctgttcttcctc

SEQ ID NO: 39296 - DNA, 2187 bp, synthetic construct
  source 1..2187: mol_type = other DNA
atggccttaccagtgaccgccttgctcctgccgctggccttgctgctccacgccgccaggccggacatccagatgacacagagccctagcagcctgtctgccagcgtgggagacagagtgaccatcacctgtagagccagccaggacatcaacacagccgtggcttggtatcagcagaagcctggcaaggcccctaagctgctgatctacagcgcctacttcctgtacagcggcgtgcccagcagattcagcggaagcagaagcggcaccgacttcaccctgacaatatccagcctccagcctgaggacttcgccacctactactgccagcagtacagcagatacagccccgtgacctttggacagggcaccaaggtggaaatcaagagactcgagatccagaaccctgatcctgccgtgtaccagctgcgggatagcaagagcagcgacaagagcgtgtgtctgttcaccgacttcgacagccagaccaacgtgtcccagagcaaggactccgacgtgtacatcaccgataagtgcgtgctggacatgcggagcatggacttcaagagcaactccgccgtggcctggtccaacaagtccgatttcgcctgcgccaacgccttcaacaacagcattatccccgaggacacattcttcccaagccccgagagcagcgactccaccgaccacgtgaagcccaaagagacagagaacaccaagcagcccagcaagagctgccacaagcccaaggccatcgtgcacaccgagaaagtgaacatgatgagcctgaccgtgctgggcctgcggatgctgttcgccaaaaccgtggccgtgaacttcctgctgaccgccaagctgttcttcctccgcgccaagagaagcggatctggcgtgaagcagaccctgaatttcgacctgctgaagctggctggcgacgtggaatccaacccaggccctactagtatggactggatttggcgcatccttttccttgtcggcgctgctaccggcgcgcattccttcgaagaagttcagctggttgaaagtggtggcggcctggttcaacctggcggatctctgagactgagctgtgccgccagcggcttcaatgtgtacgcctctggaatgcactgggtccgacaggcccctggcaaaggacttgagtgggtcgccaaaatctaccccgacagcgactacacctattacgccgacagcgtgaagggcagattcaccatcagcgccgacaccagcaagaacaccgcctacctccagatgaactccctgagagccgaggacaccgccgtgtactactgtagcagagacagcagcttctactacgtgtacgctatggactactggggccagggcacactggtcacagtctcttctacgcgtgaggacctgaagaacgtgttcccacctgaggtggccgtgttcgagcctagcgaggccgagatcagccacacccagaaagccaccctcgtgtgcctggctaccggcttctaccccgaccatgtggaactgtcttggtgggtcaacggcaaagaggtgcacagcggcgtgtgtaccgacccccagccactgaaagaacagcccgccctgaacgacagccggtactgcctgagcagcagactgagagtgtccgccaccttctggcagaacccccggaaccacttcagatgccaggtgcagttctacggcctgagcgagaacgacgagtggacccaggacagagccaagcccgtgacccagatcgtgtctgccgaagcctggggcagagccgatgatgtgattaagatccactggcaggaaaagaagtccaacaccatcctgggcagccaggaaggcaacaccatgaagaccaacgacacctacatgaagttcagctggctgaccgtgcccgagaagtccctggacaaagaacacagatgcatcgtgcggcacgaaaacaacaagaacggcgtggaccaggaaatcatcttcccacccatcaagaccgatgtgattacaatggaccccaaggacaactgctccaaggacgccaacgataccctgctgctccagctgaccaacaccagcgcctactacatgtacttgttgctgctgctgaagtccgtggtgtacttcgccatcatcacatgctgcctgctgcggagaaccgccttctgctgcaacggcgagaagtct

SEQ ID NO: 39297 - DNA, 2580 bp, synthetic construct
  source 1..2580: mol_type = other DNA
atggccttaccagtgaccgccttgctcctgccgctggccttgctgctccacgccgccaggccggaagtgcagctggttgaatctggcggaggactggttcagcctggcggatctctgagactgtcttgtgccgccagcggcttcagcttcagcgacttttggatgagctgggtccgacaggcccctggcaaaggacttgaatgggtcgccacaatcagccaggccggcagcgagaaggactacgtggactctgtgaagggcagattcaccatcagccgggacaacgccaagaagtccctgtacctccagatgaacagcctgagagccgaggacaccgccgtgtactattgtgcctctggcgtgtacagcttcgactacagaggccagggcaccctggtcacagtctcttctggtaccggcggaggcggatctggcggcggaggtagcggtggcggaggatctgaattcgacatccagatgacacagagccctagcagcctgtctgccagcgtgggagacagagtgaccatcacctgtagagccagccaggacatcaacacagccgtggcttggtatcagcagaagcctggcaaggcccctaagctgctgatctacagcgcctacttcctgtacagcggcgtgcccagcagattcagcggaagcagaagcggcaccgacttcaccctgacaatatccagcctccagcctgaggacttcgccacctactactgccagcagtacagcagatacagccccgtgacctttggacagggcaccaaggtggaaatcaagagactcgaggacctgaagaacgtgttcccacctgaggtggccgtgttcgagcctagcgaggccgagatcagccacacccagaaagccaccctcgtgtgcctggctaccggcttctaccccgaccatgtggaactgtcttggtgggtcaacggcaaagaggtgcacagcggcgtgtgtaccgacccccagccactgaaagaacagcccgccctgaacgacagccggtactgcctgagcagcagactgagagtgtccgccaccttctggcagaacccccggaaccacttcagatgccaggtgcagttctacggcctgagcgagaacgacgagtggacccaggacagagccaagcccgtgacccagatcgtgtctgccgaagcctggggcagagccgatgatgtgattaagatccactggcaggaaaagaagtccaacaccatcctgggcagccaggaaggcaacaccatgaagaccaacgacacctacatgaagttcagctggctgaccgtgcccgagaagtccctggacaaagaacacagatgcatcgtgcggcacgaaaacaacaagaacggcgtggaccaggaaatcatcttcccacccatcaagaccgatgtgattacaatggaccccaaggacaactgctccaaggacgccaacgataccctgctgctccagctgaccaacaccagcgcctactacatgtacttgttgctgctgctgaagtccgtggtgtacttcgccatcatcacatgctgcctgctgcggagaaccgccttctgctgcaacggcgagaagtctagggccaagcgatctggatctggagcaacaaacttctcactactcaaacaagcaggtgacgtggaggagaatcccgggcctactagtatggactggatttggcgcatccttttccttgtcggcgctgctaccggcgcgcattccttcgaagaagttcagctggttgaaagtggtggcggcctggttcaacctggcggatctctgagactgagctgtgccgccagcggcttcaatgtgtacgcctctggaatgcactgggtccgacaggcccctggcaaaggacttgagtgggtcgccaaaatctaccccgacagcgactacacctattacgccgacagcgtgaagggcagattcaccatcagcgccgacaccagcaagaacaccgcctacctccagatgaactccctgagagccgaggacaccgccgtgtactactgtagcagagacagcagcttctactacgtgtacgctatggactactggggccagggcacactggtcacagtctcttctacgcgtatccagaaccctgatcctgccgtgtaccagctgcgggatagcaagagcagcgacaagagcgtgtgtctgttcaccgacttcgacagccagaccaacgtgtcccagagcaaggactccgacgtgtacatcaccgataagtgcgtgctggacatgcggagcatggacttcaagagcaactccgccgtggcctggtccaacaagtccgatttcgcctgcgccaacgccttcaacaacagcattatccccgaggacacattcttcccaagccccgagagcagcgactccaccgaccacgtgaagcccaaagagacagagaacaccaagcagcccagcaagagctgccacaagcccaaggccatcgtgcacaccgagaaagtgaacatgatgagcctgaccgtgctgggcctgcggatgctgttcgccaaaaccgtggccgtgaacttcctgctgaccgccaagctgttcttcctc

SEQ ID NO: 39298 - DNA, 2991 bp, synthetic construct
  source 1..2991: mol_type = other DNA
atggccttaccagtgaccgccttgctcctgccgctggccttgctgctccacgccgccaggccggaagtgcagctggttgaatctggcggaggactggttcagcctggcggatctctgagactgtcttgtgccgccagcggcttcagcttcagcgacttttggatgagctgggtccgacaggcccctggcaaaggacttgaatgggtcgccacaatcagccaggccggcagcgagaaggactacgtggactctgtgaagggcagattcaccatcagccgggacaacgccaagaagtccctgtacctccagatgaacagcctgagagccgaggacaccgccgtgtactattgtgcctctggcgtgtacagcttcgactacagaggccagggcaccctggtcacagtctcttctggtaccggcggaggcggatctggcggcggaggtagcggtggcggaggatctgaattcgacatccagatgacacagagccctagcagcctgtctgccagcgtgggagacagagtgaccatcacctgtagagccagccaggacatcaacacagccgtggcttggtatcagcagaagcctggcaaggcccctaagctgctgatctacagcgcctacttcctgtacagcggcgtgcccagcagattcagcggaagcagaagcggcaccgacttcaccctgacaatatccagcctccagcctgaggacttcgccacctactactgccagcagtacagcagatacagccccgtgacctttggacagggcaccaaggtggaaatcaagagactcgaggacctgaagaacgtgttcccacctgaggtggccgtgttcgagcctagcgaggccgagatcagccacacccagaaagccaccctcgtgtgcctggctaccggcttctaccccgaccatgtggaactgtcttggtgggtcaacggcaaagaggtgcacagcggcgtgtgtaccgacccccagccactgaaagaacagcccgccctgaacgacagccggtactgcctgagcagcagactgagagtgtccgccaccttctggcagaacccccggaaccacttcagatgccaggtgcagttctacggcctgagcgagaacgacgagtggacccaggacagagccaagcccgtgacccagatcgtgtctgccgaagcctggggcagagccgatgatgtgattaagatccactggcaggaaaagaagtccaacaccatcctgggcagccaggaaggcaacaccatgaagaccaacgacacctacatgaagttcagctggctgaccgtgcccgagaagtccctggacaaagaacacagatgcatcgtgcggcacgaaaacaacaagaacggcgtggaccaggaaatcatcttcccacccatcaagaccgatgtgattacaatggaccccaaggacaactgctccaaggacgccaacgataccctgctgctccagctgaccaacaccagcgcctactacatgtacttgttgctgctgctgaagtccgtggtgtacttcgccatcatcacatgctgcctgctgcggagaaccgccttctgctgcaacggcgagaagtctagggccaagcgatctggatctggagcaacaaacttctcactactcaaacaagcaggtgacgtggaggagaatcccgggcctactagtatggactggatttggcgcatccttttccttgtcggcgctgctaccggcgcgcattccgggccccagctccagctgcaagagtctggacctggcctggtcaagcctagcgagacactgagcctgacctgtaccgtgtccggcgatagcatcagcagcggcgattactactggggctggatcagacagcctcctggcaaaggactggaatggatcggccacatctactacagcggcgtgacctactacaaccccagcctgaagtccagagtgaccatcagcgtggacaccagccggaaccagttctccctgaagctgtctagcgtgacagccgccgataccgccgtgtactactgcaccagagaggacagcagcaactggcggagtagaggccagggaacactggtcacagttagctctggatccggcggaggcggaagtggaggcggaggatctggcggcggaggctctttcgaagaagttcagctggttgaaagtggtggcggcctggttcaacctggcggatctctgagactgagctgtgccgccagcggcttcaatgtgtacgcctctggaatgcactgggtccgacaggcccctggcaaaggacttgagtgggtcgccaaaatctaccccgacagcgactacacctattacgccgacagcgtgaagggcagattcaccatcagcgccgacaccagcaagaacaccgcctacctccagatgaactccctgagagccgaggacaccgccgtgtactactgtagcagagacagcagcttctactacgtgtacgctatggactactggggccagggcacactggtcacagtctcttctacgcgtatccagaaccctgatcctgccgtgtaccagctgcgggatagcaagagcagcgacaagagcgtgtgtctgttcaccgacttcgacagccagaccaacgtgtcccagagcaaggactccgacgtgtacatcaccgataagtgcgtgctggacatgcggagcatggacttcaagagcaactccgccgtggcctggtccaacaagtccgatttcgcctgcgccaacgccttcaacaacagcattatccccgaggacacattcttcccaagccccgagagcagcgactccaccgaccacgtgaagcccaaagagacagagaacaccaagcagcccagcaagagctgccacaagcccaaggccatcgtgcacaccgagaaagtgaacatgatgagcctgaccgtgctgggcctgcggatgctgttcgccaaaaccgtggccgtgaacttcctgctgaccgccaagctgttcttcctc

SEQ ID NO: 39299 - DNA, 1869 bp, synthetic construct
  source 1..1869: mol_type = other DNA
atggccttaccagtgaccgccttgctcctgccgctggccttgctgctccacgccgccaggccggacatccagatgacacagagccctagcagcctgtctgccagcgtgggagacagagtgaccatcacctgtagagccagccaggacatcaacacagccgtggcttggtatcagcagaagcctggcaaggcccctaagctgctgatctacagcgcctacttcctgtacagcggcgtgcccagcagattcagcggaagcagaagcggcaccgacttcaccctgacaatatccagcctccagcctgaggacttcgccacctactactgccagcagtacagcagatacagccccgtgacctttggacagggcaccaaggtggaaatcaagagactcgaggacctgaagaacgtgttcccacctgaggtggccgtgttcgagcctagcgaggccgagatcagccacacccagaaagccaccctcgtgtgcctggctaccggcttctaccccgaccatgtggaactgtcttggtgggtcaacggcaaagaggtgcacagcggcgtgtctaccgacccccagccactgaaagaacagcccgccctgaacgacagccggtactgcctgagcagcagactgagagtgtccgccaccttctggcagaacccccggaaccacttcagatgccaggtgcagttctacggcctgagcgagaacgacgagtggacccaggacagagccaagcccgtgacccagatcgtgtctgccgaagcctggggcagagccgattgcgacgtgaagctggtggaaaagagcttcgagacagacaccaacctgaacttccagaacctgagcgtgatcggcttcagaatcctgctgctgaaagtggccggctttaacctgctgatgaccctgcggctgtggtccagcagggccaagcgatctggatctggagcaacaaacttctcactactcaaacaagcaggtgacgtggaggagaatcccgggcctactagtatggactggatttggcgcatccttttccttgtcggcgctgctaccggcgcgcattccttcgaagaagttcagctggttgaaagtggtggcggcctggttcaacctggcggatctctgagactgagctgtgccgccagcggcttcaatgtgtacgcctctggaatgcactgggtccgacaggcccctggcaaaggacttgagtgggtcgccaaaatctaccccgacagcgactacacctattacgccgacagcgtgaagggcagattcaccatcagcgccgacaccagcaagaacaccgcctacctccagatgaactccctgagagccgaggacaccgccgtgtactactgtagcagagacagcagcttctactacgtgtacgctatggactactggggccagggcacactggtcacagtctcttctacgcgtatccagaaccctgatcctgccgtgtaccagctgcgggatagcaagagcagcgacaagagcgtgtgtctgttcaccgacttcgacagccagaccaacgtgtcccagagcaaggactccgacgtgtacatcaccgataagaccgtgctggacatgcggagcatggacttcaagagcaactccgccgtggcctggtccaacaagtccgatttcgcctgcgccaacgccttcaacaacagcattatccccgaggacacattcttcccaagccccgagagcagctgcggctttaccagcgagagctaccagcagggcgtgctgagcgccaccatcctgtacgagatcctgctgggcaaggccaccctgtacgccgtgctggtgtctgccctggtgctgatggctatggtcaagcggaaggacagccgggga

SEQ ID NO: 39300 - DNA, 1869 bp, synthetic construct
  source 1..1869: mol_type = other DNA
atggccttaccagtgaccgccttgctcctgccgctggccttgctgctccacgccgccaggccggacatccagatgacacagagccctagcagcctgtctgccagcgtgggagacagagtgaccatcacctgtagagccagccaggacatcaacacagccgtggcttggtatcagcagaagcctggcaaggcccctaagctgctgatctacagcgcctacttcctgtacagcggcgtgcccagcagattcagcggaagcagaagcggcaccgacttcaccctgacaatatccagcctccagcctgaggacttcgccacctactactgccagcagtacagcagatacagccccgtgacctttggacagggcaccaaggtggaaatcaagagactcgaggacctgaagaacgtgttcccacctgaggtggccgtgttcgagcctagcgaggccgagatcagccacacccagaaagccaccctcgtgtgcctggctaccggcttctaccccgaccatgtggaactgtcttggtgggtcaacggcaaagaggtgcacagcggcgtgtctaccgacccccagccactgaaagaacagcccgccctgaacgacagccggtactgcctgagcagcagactgagagtgtccgccaccttctggcagaacccccggaaccacttcagatgccaggtgcagttctacggcctgagcgagaacgacgagtggacccaggacagagccaagcccgtgacccagatcgtgtctgccgaagcctggggcagagccgattgcggctttaccagcgagagctaccagcagggcgtgctgagcgccaccaacctgagcgtgatcggcttcagaatcctgctgctgaaagtggccggctttaacctgctgatgaccctgcggctgtggtccagcagggccaagcgatctggatctggagcaacaaacttctcactactcaaacaagcaggtgacgtggaggagaatcccgggcctactagtatggactggatttggcgcatccttttccttgtcggcgctgctaccggcgcgcattccttcgaagaagttcagctggttgaaagtggtggcggcctggttcaacctggcggatctctgagactgagctgtgccgccagcggcttcaatgtgtacgcctctggaatgcactgggtccgacaggcccctggcaaaggacttgagtgggtcgccaaaatctaccccgacagcgactacacctattacgccgacagcgtgaagggcagattcaccatcagcgccgacaccagcaagaacaccgcctacctccagatgaactccctgagagccgaggacaccgccgtgtactactgtagcagagacagcagcttctactacgtgtacgctatggactactggggccagggcacactggtcacagtctcttctacgcgtatccagaaccctgatcctgccgtgtaccagctgcgggatagcaagagcagcgacaagagcgtgtgtctgttcaccgacttcgacagccagaccaacgtgtcccagagcaaggactccgacgtgtacatcaccgataagaccgtgctggacatgcggagcatggacttcaagagcaactccgccgtggcctggtccaacaagtccgatttcgcctgcgccaacgccttcaacaacagcattatccccgaggacacattcttcccaagccccgagagcagctgcgacgtgaagctggtggaaaagagcttcgagacagacaccaacctgaacttccagatcctgtacgagatcctgctgggcaaggccaccctgtacgccgtgctggtgtctgccctggtgctgatggctatggtcaagcggaaggacagccgggga

SEQ ID NO: 39301 - DNA, 2181 bp, synthetic construct
  source 1..2181: mol_type = other DNA
atggccttaccagtgaccgccttgctcctgccgctggccttgctgctccacgccgccaggccggacatccagatgacacagagccctagcagcctgtctgccagcgtgggagacagagtgaccatcacctgtagagccagccaggacatcaacacagccgtggcttggtatcagcagaagcctggcaaggcccctaagctgctgatctacagcgcctacttcctgtacagcggcgtgcccagcagattcagcggaagcagaagcggcaccgacttcaccctgacaatatccagcctccagcctgaggacttcgccacctactactgccagcagtacagcagatacagccccgtgacctttggacagggcaccaaggtggaaatcaagagactcgaggacctgaagaacgtgttcccacctgaggtggccgtgttcgagcctagcgaggccgagatcagccacacccagaaagccaccctcgtgtgcctggctaccggcttctaccccgaccatgtggaactgtcttggtgggtcaacggcaaagaggtgcacagcggcgtgtctaccgacccccagccactgaaagaacagcccgccctgaacgacagccggtactgcctgagcagcagactgagagtgtccgccaccttctggcagaacccccggaaccacttcagatgccaggtgcagttctacggcctgagcgagaacgacgagtggacccaggacagagccaagcccgtgacccagatcgtgtctgccgaagcctggggcagagccgatgatgtgattaagatccactggcaggaaaagaagtccaacaccatcctgggcagccaggaaggcaacaccatgaagaccaacgacacctacatgaagttcagctggctgaccgtgcccgagaagtccctggacaaagaacacagatgcatcgtgcggcacgaaaacaacaagaacggcgtggaccaggaaatcatcttcccacccatcaagaccgatgtgattacaatggaccccaaggacaactgctccaaggacgccaacgataccctgctgctccagctgaccaacaccagcgcctactacatgtacttgttgctgctgctgaagtccgtggtgtacttcgccatcatcacatgctgcctgctgatggctatggtcaagcggaaggacagccggggaagggccaagcgatctggatctggagcaacaaacttctcactactcaaacaagcaggtgacgtggaggagaatcccgggcctactagtatggactggatttggcgcatccttttccttgtcggcgctgctaccggcgcgcattccttcgaagaagttcagctggttgaaagtggtggcggcctggttcaacctggcggatctctgagactgagctgtgccgccagcggcttcaatgtgtacgcctctggaatgcactgggtccgacaggcccctggcaaaggacttgagtgggtcgccaaaatctaccccgacagcgactacacctattacgccgacagcgtgaagggcagattcaccatcagcgccgacaccagcaagaacaccgcctacctccagatgaactccctgagagccgaggacaccgccgtgtactactgtagcagagacagcagcttctactacgtgtacgctatggactactggggccagggcacactggtcacagtctcttctacgcgtatccagaaccctgatcctgccgtgtaccagctgcgggatagcaagagcagcgacaagagcgtgtgtctgttcaccgacttcgacagccagaccaacgtgtcccagagcaaggactccgacgtgtacatcaccgataagaccgtgctggacatgcggagcatggacttcaagagcaactccgccgtggcctggtccaacaagtccgatttcgcctgcgccaacgccttcaacaacagcattatccccgaggacacattcttcccaagccccgagagcagcgactccaccgaccacgtgaagcccaaagagacagagaacaccaagcagcccagcaagagctgccacaagcccaaggccatcgtgcacaccgagaaagtgaacatgatgagcctgaccgtgctgggcctgcggatgctgttcgccaaaaccgtggccgtgaacttcctgctgaccgccaagctgttcttcctcctcaccgcc

SEQ ID NO: 39302 - DNA, 2175 bp, synthetic construct
  source 1..2175: mol_type = other DNA
atggccttaccagtgaccgccttgctcctgccgctggccttgctgctccacgccgccaggccggacatccagatgacacagagccctagcagcctgtctgccagcgtgggagacagagtgaccatcacctgtagagccagccaggacatcaacacagccgtggcttggtatcagcagaagcctggcaaggcccctaagctgctgatctacagcgcctacttcctgtacagcggcgtgcccagcagattcagcggaagcagaagcggcaccgacttcaccctgacaatatccagcctccagcctgaggacttcgccacctactactgccagcagtacagcagatacagccccgtgacctttggacagggcaccaaggtggaaatcaagagactcgaggacctgaagaacgtgttcccacctgaggtggccgtgttcgagcctagcgaggccgagatcagccacacccagaaagccaccctcgtgtgcctggctaccggcttctaccccgaccatgtggaactgtcttggtgggtcaacggcaaagaggtgcacagcggcgtgtctaccgacccccagccactgaaagaacagcccgccctgaacgacagccggtactgcctgagcagcagactgagagtgtccgccaccttctggcagaacccccggaaccacttcagatgccaggtgcagttctacggcctgagcgagaacgacgagtggacccaggacagagccaagcccgtgacccagatcgtgtctgccgaagcctggggcagagccgatgatgtgattaagatccactggcaggaaaagaagtccaacaccatcctgggcagccaggaaggcaacaccatgaagaccaacgacacctacatgaagttcagctggctgaccgtgcccgagaagtccctggacaaagaacacagatgcatcgtgcggcacgaaaacaacaagaacggcgtggaccaggaaatcatcttcccacccatcaagaccgatgtgattacaatggaccccaaggacaactgctccaaggacgccaacgataccctgctgctccagctgaccaacaccagcgcctactacatgtacttgttgctgctgctgaagtccgtggtgtacttcgccatcatcacatgctgcctgctgcggagaaccgccttctgctgcaacggcgagaagtctagggccaagcgatctggatctggagcaacaaacttctcactactcaaacaagcaggtgacgtggaggagaatcccgggcctactagtatggactggatttggcgcatccttttccttgtcggcgctgctaccggcgcgcattccttcgaagaagttcagctggttgaaagtggtggcggcctggttcaacctggcggatctctgagactgagctgtgccgccagcggcttcaatgtgtacgcctctggaatgcactgggtccgacaggcccctggcaaaggacttgagtgggtcgccaaaatctaccccgacagcgactacacctattacgccgacagcgtgaagggcagattcaccatcagcgccgacaccagcaagaacaccgcctacctccagatgaactccctgagagccgaggacaccgccgtgtactactgtagcagagacagcagcttctactacgtgtacgctatggactactggggccagggcacactggtcacagtctcttctacgcgtatccagaaccctgatcctgccgtgtaccagctgcgggatagcaagagcagcgacaagagcgtgtgtctgttcaccgacttcgacagccagaccaacgtgtcccagagcaaggactccgacgtgtacatcaccgataagaccgtgctggacatgcggagcatggacttcaagagcaactccgccgtggcctggtccaacaagtccgatttcgcctgcgccaacgccttcaacaacagcattatccccgaggacacattcttcccaagccccgagagcagcgactccaccgaccacgtgaagcccaaagagacagagaacaccaagcagcccagcaagagctgccacaagcccaaggccatcgtgcacaccgagaaagtgaacatgatgagcctgaccgtgctgggcctgcggatgctgttcgccaaaaccgtggccgtgaacttcctgctgaccgccaagctgttcttcctc

SEQ ID NO: 39303 - DNA, 2607 bp, synthetic construct
  source 1..2607: mol_type = other DNA
atggccttaccagtgaccgccttgctcctgccgctggccttgctgctccacgccgccaggccgctcgaggaggacctgaagaacgtgttcccacctgaggtggccgtgttcgagcctagcgaggccgagatcagccacacccagaaagccaccctcgtgtgcctggctaccggcttctaccccgaccatgtggaactgtcttggtgggtcaacggcaaagaggtgcacagcggcgtgtgtaccgacccccagccactgaaagaacagcccgccctgaacgacagccggtactgcctgagcagcagactgagagtgtccgccaccttctggcagaacccccggaaccacttcagatgccaggtgcagttctacggcctgagcgagaacgacgagtggacccaggacagagccaagcccgtgacccagatcgtgtctgccgaagcctggggcagagccgattgcggctttaccagcgagagctaccagcagggcgtgctgagcgccaccaacctgagcgtgatcggcttcagaatcctgctgctgaaagtggccggctttaacctgctgatgaccctgcggctgtggtccagcagggccaagcgatctggatctggagcaacaaacttctcactactcaaacaagcaggtgacgtggaggagaatcccgggcctactagcatggccttaccagtgaccgccttgctcctgccgctggccttgctgctccacgccgccaggccggacatccagatgacacagagccctagcagcctgtctgccagcgtgggagacagagtgaccatcacctgtagagccagccaggacatcaacacagccgtggcttggtatcagcagaagcctggcaaggcccctaagctgctgatctacagcgcctacttcctgtacagcggcgtgcccagcagattcagcggaagcagaagcggcaccgacttcaccctgacaatatccagcctccagcctgaggacttcgccacctactactgccagcagtacagcagatacagccccgtgacctttggacagggcaccaaggtggaaatcaagagaggcggaggcggaagtggaggcggaggatctggcggcggaggctctgaagttcagctggttgaaagtggtggcggcctggttcaacctggcggatctctgagactgagctgtgccgccagcggcttcaatgtgtacgcctctggaatgcactgggtccgacaggcccctggcaaaggacttgagtgggtcgccaaaatctaccccgacagcgactacacctattacgccgacagcgtgaagggcagattcaccatcagcgccgacaccagcaagaacaccgcctacctccagatgaactccctgagagccgaggacaccgccgtgtactactgtagcagagacagcagcttctactacgtgtacgctatggactactggggccagggcacactggtcacagtctcttctacgcgtatccagaaccctgatcctgccgtgtaccagctgcgggatagcaagagcagcgacaagagcgtgtgtctgttcaccgacttcgacagccagaccaacgtgtcccagagcaaggactccgacgtgtacatcaccgataagtgcgtgctggacatgcggagcatggacttcaagagcaactccgccgtggcctggtccaacaagtccgatttcgcctgcgccaacgccttcaacaacagcattatccccgaggacacattcttcccaagccccgagagcagctgcgacgtgaagctggtggaaaagagcttcgagacagacaccaacctgaacttccagatcctgtacgaggtgatcggcttcagaatcctgctgctgaaagtggccggctttaacctgctgatgaccctgcggctgtggtccagccgcgccaagagaagcggatctggcgtgaagcagaccctgaatttcgacctgctgaagctggctggcgacgtggaatccaacccaggcccttctagaggccatatgaccgagtacaagcccacggtgcgcctcgccacccgcgacgacgtccccagggccgtacgcaccctcgccgccgcgttcgccgactaccccgccacgcgccacaccgtcgatccggaccgccacatcgagcgggtcaccgagctgcaagaactcttcctcacgcgcgtcgggctcgacatcggcaaggtgtgggtcgcggacgacggcgccgcggtggcggtctggaccacgccggagagcgtcgaagcgggggcggtgttcgccgagatcggcccgcgcatggccgagttgagcggttcccggctggccgcgcagcaacagatggaaggcctcctggcgccgcaccggcccaaggagcccgcgtggttcctggccaccgtcggcgtctcgcccgaccaccagggcaagggtctgggcagcgccgtcgtgctccccggagtggaggcggccgagcgcgccggggtgcccgccttcctggagacctccgcgccccgcaacctccccttctacgagcggctcggcttcaccgtcaccgccgacgtcgaggtgcccgaaggaccgcgcacctggtgcatgacccgcaagcccggtgcctga

SEQ ID NO: 39304 - DNA, 2607 bp, synthetic construct
  source 1..2607: mol_type = other DNA
atggccttaccagtgaccgccttgctcctgccgctggccttgctgctccacgccgccaggccgctcgagatccagaaccctgatcctgccgtgtaccagctgcgggatagcaagagcagcgacaagagcgtgtgtctgttcaccgacttcgacagccagaccaacgtgtcccagagcaaggactccgacgtgtacatcaccgataagtgcgtgctggacatgcggagcatggacttcaagagcaactccgccgtggcctggtccaacaagtccgatttcgcctgcgccaacgccttcaacaacagcattatccccgaggacacattcttcccaagccccgagagcagctgcgacgtgaagctggtggaaaagagcttcgagacagacaccaacctgaacttccagatcctgtacgaggtgatcggcttcagaatcctgctgctgaaagtggccggctttaacctgctgatgaccctgcggctgtggtccagcagggccaagcgatctggatctggagcaacaaacttctcactactcaaacaagcaggtgacgtggaggagaatcccgggcctactagcatggccttaccagtgaccgccttgctcctgccgctggccttgctgctccacgccgccaggccggacatccagatgacacagagccctagcagcctgtctgccagcgtgggagacagagtgaccatcacctgtagagccagccaggacatcaacacagccgtggcttggtatcagcagaagcctggcaaggcccctaagctgctgatctacagcgcctacttcctgtacagcggcgtgcccagcagattcagcggaagcagaagcggcaccgacttcaccctgacaatatccagcctccagcctgaggacttcgccacctactactgccagcagtacagcagatacagccccgtgacctttggacagggcaccaaggtggaaatcaagagaggcggaggcggaagtggaggcggaggatctggcggcggaggctctgaagttcagctggttgaaagtggtggcggcctggttcaacctggcggatctctgagactgagctgtgccgccagcggcttcaatgtgtacgcctctggaatgcactgggtccgacaggcccctggcaaaggacttgagtgggtcgccaaaatctaccccgacagcgactacacctattacgccgacagcgtgaagggcagattcaccatcagcgccgacaccagcaagaacaccgcctacctccagatgaactccctgagagccgaggacaccgccgtgtactactgtagcagagacagcagcttctactacgtgtacgctatggactactggggccagggcacactggtcacagtctcttctacgcgtgaggacctgaagaacgtgttcccacctgaggtggccgtgttcgagcctagcgaggccgagatcagccacacccagaaagccaccctcgtgtgcctggctaccggcttctaccccgaccatgtggaactgtcttggtgggtcaacggcaaagaggtgcacagcggcgtgtgtaccgacccccagccactgaaagaacagcccgccctgaacgacagccggtactgcctgagcagcagactgagagtgtccgccaccttctggcagaacccccggaaccacttcagatgccaggtgcagttctacggcctgagcgagaacgacgagtggacccaggacagagccaagcccgtgacccagatcgtgtctgccgaagcctggggcagagccgattgcggctttaccagcgagagctaccagcagggcgtgctgagcgccaccaacctgagcgtgatcggcttcagaatcctgctgctgaaagtggccggctttaacctgctgatgaccctgcggctgtggtccagccgcgccaagagaagcggatctggcgtgaagcagaccctgaatttcgacctgctgaagctggctggcgacgtggaatccaacccaggcccttctagaggccatatgaccgagtacaagcccacggtgcgcctcgccacccgcgacgacgtccccagggccgtacgcaccctcgccgccgcgttcgccgactaccccgccacgcgccacaccgtcgatccggaccgccacatcgagcgggtcaccgagctgcaagaactcttcctcacgcgcgtcgggctcgacatcggcaaggtgtgggtcgcggacgacggcgccgcggtggcggtctggaccacgccggagagcgtcgaagcgggggcggtgttcgccgagatcggcccgcgcatggccgagttgagcggttcccggctggccgcgcagcaacagatggaaggcctcctggcgccgcaccggcccaaggagcccgcgtggttcctggccaccgtcggcgtctcgcccgaccaccagggcaagggtctgggcagcgccgtcgtgctccccggagtggaggcggccgagcgcgccggggtgcccgccttcctggagacctccgcgccccgcaacctccccttctacgagcggctcggcttcaccgtcaccgccgacgtcgaggtgcccgaaggaccgcgcacctggtgcatgacccgcaagcccggtgcctga

SEQ ID NO: 39305 - DNA, 2607 bp, synthetic construct; identical to SEQ ID NO: 39303
  source 1..2607: mol_type = other DNA

SEQ ID NO: 39306 - DNA, 2931 bp, synthetic construct
  source 1..2931: mol_type = other DNA
atggccttaccagtgaccgccttgctcctgccgctggccttgctgctccacgccgccaggccgctcgaggaggacctgaagaacgtgttcccacctgaggtggccgtgttcgagcctagcgaggccgagatcagccacacccagaaagccaccctcgtgtgcctggctaccggcttctaccccgaccatgtggaactgtcttggtgggtcaacggcaaagaggtgcacagcggcgtgtctaccgacccccagccactgaaagaacagcccgccctgaacgacagccggtactgcctgagcagcagactgagagtgtccgccaccttctggcagaacccccggaaccacttcagatgccaggtgcagttctacggcctgagcgagaacgacgagtggacccaggacagagccaagcccgtgacccagatcgtgtctgccgaagcctggggcagagccgatgatgtgattaagatccactggcaggaaaagaagtccaacaccatcctgggcagccaggaaggcaacaccatgaagaccaacgacacctacatgaagttcagctggctgaccgtgcccgagaagtccctggacaaagaacacagatgcatcgtgcggcacgaaaacaacaagaacggcgtggaccaggaaatcatcttcccacccatcaagaccgatgtgattacaatggaccccaaggacaactgctccaaggacgccaacgataccctgctgctccagctgaccaacaccagcgcctactacatgtacttgttgctgctgctgaagtccgtggtgtacttcgccatcatcacatgctgcctgctgatggctatggtcaagcggaaggacagccggggaagggccaagcgatctggatctggagcaacaaacttctcactactcaaacaagcaggtgacgtggaggagaatcccgggcctactagcatggccttaccagtgaccgccttgctcctgccgctggccttgctgctccacgccgccaggccggacatccagatgacacagagccctagcagcctgtctgccagcgtgggagacagagtgaccatcacctgtagagccagccaggacatcaacacagccgtggcttggtatcagcagaagcctggcaaggcccctaagctgctgatctacagcgcctacttcctgtacagcggcgtgcccagcagattcagcggaagcagaagcggcaccgacttcaccctgacaatatccagcctccagcctgaggacttcgccacctactactgccagcagtacagcagatacagccccgtgacctttggacagggcaccaaggtggaaatcaagagaggcggaggcggaagtggaggcggaggatctggcggcggaggctctgaagttcagctggttgaaagtggtggcggcctggttcaacctggcggatctctgagactgagctgtgccgccagcggcttcaatgtgtacgcctctggaatgcactgggtccgacaggcccctggcaaaggacttgagtgggtcgccaaaatctaccccgacagcgactacacctattacgccgacagcgtgaagggcagattcaccatcagcgccgacaccagcaagaacaccgcctacctccagatgaactccctgagagccgaggacaccgccgtgtactactgtagcagagacagcagcttctactacgtgtacgctatggactactggggccagggcacactggtcacagtctcttctacgcgtatccagaaccctgatcctgccgtgtaccagctgcgggatagcaagagcagcgacaagagcgtgtgtctgttcaccgacttcgacagccagaccaacgtgtcccagagcaaggactccgacgtgtacatcaccgataagaccgtgctggacatgcggagcatggacttcaagagcaactccgccgtggcctggtccaacaagtccgatttcgcctgcgccaacgccttcaacaacagcattatccccgaggacacattcttcccaagccccgagagcagcgactccaccgaccacgtgaagcccaaagagacagagaacaccaagcagcccagcaagagctgccacaagcccaaggccatcgtgcacaccgagaaagtgaacatgatgagcctgaccgtgctgggcctgcggatgctgttcgccaaaaccgtggccgtgaacttcctgctgaccgccaagctgttcttcctcctcaccgcccgcgccaagagaagcggatctggcgtgaagcagaccctgaatttcgacctgctgaagctggctggcgacgtggaatccaacccaggcccttctagaggccatatgaccgagtacaagcccacggtgcgcctcgccacccgcgacgacgtccccagggccgtacgcaccctcgccgccgcgttcgccgactaccccgccacgcgccacaccgtcgatccggaccgccacatcgagcgggtcaccgagctgcaagaactcttcctcacgcgcgtcgggctcgacatcggcaaggtgtgggtcgcggacgacggcgccgcggtggcggtctggaccacgccggagagcgtcgaagcgggggcggtgttcgccgagatcggcccgcgcatggccgagttgagcggttcccggctggccgcgcagcaacagatggaaggcctcctggcgccgcaccggcccaaggagcccgcgtggttcctggccaccgtcggcgtctcgcccgaccaccagggcaagggtctgggcagcgccgtcgtgctccccggagtggaggcggccgagcgcgccggggtgcccgccttcctggagacctccgcgccccgcaacctccccttctacgagcggctcggcttcaccgtcaccgccgacgtcgaggtgcccgaaggaccgcgcacctggtgcatgacccgcaagcccggtgcctga

SEQ ID NO: 39307 - DNA, 2931 bp, synthetic construct
  source 1..2931: mol_type = other DNA
atggccttaccagtgaccgccttgctcctgccgctggccttgctgctccacgccgccaggccgctcgagatccagaaccctgatcctgccgtgtaccagctgcgggatagcaagagcagcgacaagagcgtgtgtctgttcaccgacttcgacagccagaccaacgtgtcccagagcaaggactccgacgtgtacatcaccgataagaccgtgctggacatgcggagcatggacttcaagagcaactccgccgtggcctggtccaacaagtccgatttcgcctgcgccaacgccttcaacaacagcattatccccgaggacacattcttcccaagccccgagagcagcgactccaccgaccacgtgaagcccaaagagacagagaacaccaagcagcccagcaagagctgccacaagcccaaggccatcgtgcacaccgagaaagtgaacatgatgagcctgaccgtgctgggcctgcggatgctgttcgccaaaaccgtggccgtgaacttcctgctgaccgccaagctgttcttcctcctcaccgccagggccaagcgatctggatctggagcaacaaacttctcactactcaaacaagcaggtgacgtggaggagaatcccgggcctactagcatggccttaccagtgaccgccttgctcctgccgctggccttgctgctccacgccgccaggccggacatccagatgacacagagccctagcagcctgtctgccagcgtgggagacagagtgaccatcacctgtagagccagccaggacatcaacacagccgtggcttggtatcagcagaagcctggcaaggcccctaagctgctgatctacagcgcctacttcctgtacagcggcgtgcccagcagattcagcggaagcagaagcggcaccgacttcaccctgacaatatccagcctccagcctgaggacttcgccacctactactgccagcagtacagcagatacagccccgtgacctttggacagggcaccaaggtggaaatcaagagaggcggaggcggaagtggaggcggaggatctggcggcggaggctctgaagttcagctggttgaaagtggtggcggcctggttcaacctggcggatctctgagactgagctgtgccgccagcggcttcaatgtgtacgcctctggaatgcactgggtccgacaggcccctggcaaaggacttgagtgggtcgccaaaatctaccccgacagcgactacacctattacgccgacagcgtgaagggcagattcaccatcagcgccgacaccagcaagaacaccgcctacctccagatgaactccctgagagccgaggacaccgccgtgtactactgtagcagagacagcagcttctactacgtgtacgctatggactactggggccagggcacactggtcacagtctcttctacgcgtgaggacctgaagaacgtgttcccacctgaggtggccgtgttcgagcctagcgaggccgagatcagccacacccagaaagccaccctcgtgtgcctggctaccggcttctaccccgaccatgtggaactgtcttggtgggtcaacggcaaagaggtgcacagcggcgtgtctaccgacccccagccactgaaagaacagcccgccctgaacgacagccggtactgcctgagcagcagactgagagtgtccgccaccttctggcagaacccccggaaccacttcagatgccaggtgcagttctacggcctgagcgagaacgacgagtggacccaggacagagccaagcccgtgacccagatcgtgtctgccgaagcctggggcagagccgatgatgtgattaagatccactggcaggaaaagaagtccaacaccatcctgggcagccaggaaggcaacaccatgaagaccaacgacacctacatgaagttcagctggctgaccgtgcccgagaagtccctggacaaagaacacagatgcatcgtgcggcacgaaaacaacaagaacggcgtggaccaggaaatcatcttcccacccatcaagaccgatgtgattacaatggaccccaaggacaactgctccaaggacgccaacgataccctgctgctccagctgaccaacaccagcgcctactacatgtacttgttgctgctgctgaagtccgtggtgtacttcgccatcatcacatgctgcctgctgatggctatggtcaagcggaaggacagccggggacgcgccaagagaagcggatctggcgtgaagcagaccctgaatttcgacctgctgaagctggctggcgacgtggaatccaacccaggcccttctagaggccatatgaccgagtacaagcccacggtgcgcctcgccacccgcgacgacgtccccagggccgtacgcaccctcgccgccgcgttcgccgactaccccgccacgcgccacaccgtcgatccggaccgccacatcgagcgggtcaccgagctgcaagaactcttcctcacgcgcgtcgggctcgacatcggcaaggtgtgggtcgcggacgacggcgccgcggtggcggtctggaccacgccggagagcgtcgaagcgggggcggtgttcgccgagatcggcccgcgcatggccgagttgagcggttcccggctggccgcgcagcaacagatggaaggcctcctggcgccgcaccggcccaaggagcccgcgtggttcctggccaccgtcggcgtctcgcccgaccaccagggcaagggtctgggcagcgccgtcgtgctccccggagtggaggcggccgagcgcgccggggtgcccgccttcctggagacctccgcgccccgcaacctccccttctacgagcggctcggcttcaccgtcaccgccgacgtcgaggtgcccgaaggaccgcgcacctggtgcatgacccgcaagcccggtgcctga

SEQ ID NO: 39308 - DNA, 2925 bp, synthetic construct
  source 1..2925: mol_type = other DNA
atggccttaccagtgaccgccttgctcctgccgctggccttgctgctccacgccgccaggccgctcgaggaggacctgaagaacgtgttcccacctgaggtggccgtgttcgagcctagcgaggccgagatcagccacacccagaaagccaccctcgtgtgcctggctaccggcttctaccccgaccatgtggaactgtcttggtgggtcaacggcaaagaggtgcacagcggcgtgtgtaccgacccccagccactgaaagaacagcccgccctgaacgacagccggtactgcctgagcagcagactgagagtgtccgccaccttctggcagaacccccggaaccacttcagatgccaggtgcagttctacggcctgagcgagaacgacgagtggacccaggacagagccaagcccgtgacccagatcgtgtctgccgaagcctggggcagagccgatgatgtgattaagatccactggcaggaaaagaagtccaacaccatcctgggcagccaggaaggcaacaccatgaagaccaacgacacctacatgaagttcagctggctgaccgtgcccgagaagtccctggacaaagaacacagatgcatcgtgcggcacgaaaacaacaagaacggcgtggaccaggaaatcatcttcccacccatcaagaccgatgtgattacaatggaccccaaggacaactgctccaaggacgccaacgataccctgctgctccagctgaccaacaccagcgcctactacatgtacttgttgctgctgctgaagtccgtggtgtacttcgccatcatcacatgctgcctgctgcggagaaccgccttctgctgcaacggcgagaagtctagggccaagcgatctggatctggagcaacaaacttctcactactcaaacaagcaggtgacgtggaggagaatcccgggcctactagcatggccttaccagtgaccgccttgctcctgccgctggccttgctgctccacgccgccaggccggacatccagatgacacagagccctagcagcctgtctgccagcgtgggagacagagtgaccatcacctgtagagccagccaggacatcaacacagccgtggcttggtatcagcagaagcctggcaaggcccctaagctgctgatctacagcgcctacttcctgtacagcggcgtgcccagcagattcagcggaagcagaagcggcaccgacttcaccctgacaatatccagcctccagcctgaggacttcgccacctactactgccagcagtacagcagatacagccccgtgacctttggacagggcaccaaggtggaaatcaagagaggcggaggcggaagtggaggcggaggatctggcggcggaggctctgaagttcagctggttgaaagtggtggcggcctggttcaacctggcggatctctgagactgagctgtgccgccagcggcttcaatgtgtacgcctctggaatgcactgggtccgacaggcccctggcaaaggacttgagtgggtcgccaaaatctaccccgacagcgactacacctattacgccgacagcgtgaagggcagattcaccatcagcgccgacaccagcaagaacaccgcctacctccagatgaactccctgagagccgaggacaccgccgtgtactactgtagcagagacagcagcttctactacgtgtacgctatggactactggggccagggcacactggtcacagtctcttctacgcgtatccagaaccctgatcctgccgtgtaccagctgcgggatagcaagagcagcgacaagagcgtgtgtctgttcaccgacttcgacagccagaccaacgtgtcccagagcaaggactccgacgtgtacatcaccgataagtgcgtgctggacatgcggagcatggacttcaagagcaactccgccgtggcctggtccaacaagtccgatttcgcctgcgccaacgccttcaacaacagcattatccccgaggacacattcttcccaagccccgagagcagcgactccaccgaccacgtgaagcccaaagagacagagaacaccaagcagcccagcaagagctgccacaagcccaaggccatcgtgcacaccgagaaagtgaacatgatgagcctgaccgtgctgggcctgcggatgctgttcgccaaaaccgtggccgtgaacttcctgctgaccgccaagctgttcttcctccgcgccaagagaagcggatctggcgtgaagcagaccctgaatttcgacctgctgaagctggctggcgacgtggaatccaacccaggcccttctagaggccatatgaccgagtacaagcccacggtgcgcctcgccacccgcgacgacgtccccagggccgtacgcaccctcgccgccgcgttcgccgactaccccgccacgcgccacaccgtcgatccggaccgccacatcgagcgggtcaccgagctgcaagaactcttcctcacgcgcgtcgggctcgacatcggcaaggtgtgggtcgcggacgacggcgccgcggtggcggtctggaccacgccggagagcgtcgaagcgggggcggtgttcgccgagatcggcccgcgcatggccgagttgagcggttcccggctggccgcgcagcaacagatggaaggcctcctggcgccgcaccggcccaaggagcccgcgtggttcctggccaccgtcggcgtctcgcccgaccaccagggcaagggtctgggcagcgccgtcgtgctccccggagtggaggcggccgagcgcgccggggtgcccgccttcctggagacctccgcgccccgcaacctccccttctacgagcggctcggcttcaccgtcaccgccgacgtcgaggtgcccgaaggaccgcgcacctggtgcatgacccgcaagcccggtgcctga

SEQ ID NO: 39309 - DNA, 2925 bp, synthetic construct
  source 1..2925: mol_type = other DNA
atggccttaccagtgaccgccttgctcctgccgctggccttgctgctccacgccgccaggccgctcgagatccagaaccctgatcctgccgtgtaccagctgcgggatagcaagagcagcgacaagagcgtgtgtctgttcaccgacttcgacagccagaccaacgtgtcccagagcaaggactccgacgtgtacatcaccgataagtgcgtgctggacatgcggagcatggacttcaagagcaactccgccgtggcctggtccaacaagtccgatttcgcctgcgccaacgccttcaacaacagcattatccccgaggacacattcttcccaagccccgagagcagcgactccaccgaccacgtgaagcccaaagagacagagaacaccaagcagcccagcaagagctgccacaagcccaaggccatcgtgcacaccgagaaagtgaacatgatgagcctgaccgtgctgggcctgcggatgctgttcgccaaaaccgtggccgtgaacttcctgctgaccgccaagctgttcttcctcagggccaagcgatctggatctggagcaacaaacttctcactactcaaacaagcaggtgacgtggaggagaatcccgggcctactagcatggccttaccagtgaccgccttgctcctgccgctggccttgctgctccacgccgccaggccggacatccagatgacacagagccctagcagcctgtctgccagcgtgggagacagagtgaccatcacctgtagagccagccaggacatcaacacagccgtggcttggtatcagcagaagcctggcaaggcccctaagctgctgatctacagcgcctacttcctgtacagcggcgtgcccagcagattcagcggaagcagaagcggcaccgacttcaccctgacaatatccagcctccagcctgaggacttcgccacctactactgccagcagtacagcagatacagccccgtgacctttggacagggcaccaaggtggaaatcaagagaggcggaggcggaagtggaggcggaggatctggcggcggaggctctgaagttcagctggttgaaagtggtggcggcctggttcaacctggcggatctctgagactgagctgtgccgccagcggcttcaatgtgtacgcctctggaatgcactgggtccgacaggcccctggcaaaggacttgagtgggtcgccaaaatctaccccgacagcgactacacctattacgccgacagcgtgaagggcagattcaccatcagcgccgacaccagcaagaacaccgcctacctccagatgaactccctgagagccgaggacaccgccgtgtactactgtagcagagacagcagcttctactacgtgtacgctatggactactggggccagggcacactggtcacagtctcttctacgcgtgaggacctgaagaacgtgttcccacctgaggtggccgtgttcgagcctagcgaggccgagatcagccacacccagaaagccaccctcgtgtgcctggctaccggcttctaccccgaccatgtggaactgtcttggtgggtcaacggcaaagaggtgcacagcggcgtgtgtaccgacccccagccactgaaagaacagcccgccctgaacgacagccggtactgcctgagcagcagactgagagtgtccgccaccttctggcagaacccccggaaccacttcagatgccaggtgcagttctacggcctgagcgagaacgacgagtggacccaggacagagccaagcccgtgacccagatcgtgtctgccgaagcctggggcagagccgatgatgtgattaagatccactggcaggaaaagaagtccaacaccatcctgggcagccaggaaggcaacaccatgaagaccaacgacacctacatgaagttcagctggctgaccgtgcccgagaagtccctggacaaagaacacagatgcatcgtgcggcacgaaaacaacaagaacggcgtggaccaggaaatcatcttcccacccatcaagaccgatgtgattacaatggaccccaaggacaactgctccaaggacgccaacgataccctgctgctccagctgaccaacaccagcgcctactacatgtacttgttgctgctgctgaagtccgtggtgtacttcgccatcatcacatgctgcctgctgcggagaaccgccttctgctgcaacggcgagaagtctcgcgccaagagaagcggatctggcgtgaagcagaccctgaatttcgacctgctgaagctggctggcgacgtggaatccaacccaggcccttctagaggccatatgaccgagtacaagcccacggtgcgcctcgccacccgcgacgacgtccccagggccgtacgcaccctcgccgccgcgttcgccgactaccccgccacgcgccacaccgtcgatccggaccgccacatcgagcgggtcaccgagctgcaagaactcttcctcacgcgcgtcgggctcgacatcggcaaggtgtgggtcgcggacgacggcgccgcggtggcggtctggaccacgccggagagcgtcgaagcgggggcggtgttcgccgagatcggcccgcgcatggccgagttgagcggttcccggctggccgcgcagcaacagatggaaggcctcctggcgccgcaccggcccaaggagcccgcgtggttcctggccaccgtcggcgtctcgcccgaccaccagggcaagggtctgggcagcgccgtcgtgctccccggagtggaggcggccgagcgcgccggggtgcccgccttcctggagacctccgcgccccgcaacctccccttctacgagcggctcggcttcaccgtcaccgccgacgtcgaggtgcccgaaggaccgcgcacctggtgcatgacccgcaagcccggtgcctga

SEQ ID NO: 39310 - DNA, 2925 bp, synthetic construct
  source 1..2925: mol_type = other DNA
atggccttaccagtgaccgccttgctcctgccgctggccttgctgctccacgccgccaggccgctcgaggaggacctgaagaacgtgttcccacctgaggtggccgtgttcgagcctagcgaggccgagatcagccacacccagaaagccaccctcgtgtgcctggctaccggcttctaccccgaccatgtggaactgtcttggtgggtcaacggcaaagaggtgcacagcggcgtgtctaccgacccccagccactgaaagaacagcccgccctgaacgacagccggtactgcctgagcagcagactgagagtgtccgccaccttctggcagaacccccggaaccacttcagatgccaggtgcagttctacggcctgagcgagaacgacgagtggacccaggacagagccaagcccgtgacccagatcgtgtctgccgaagcctggggcagagccgatgatgtgattaagatccactggcaggaaaagaagtccaacaccatcctgggcagccaggaaggcaacaccatgaagaccaacgacacctacatgaagttcagctggctgaccgtgcccgagaagtccctggacaaagaacacagatgcatcgtgcggcacgaaaacaacaagaacggcgtggaccaggaaatcatcttcccacccatcaagaccgatgtgattacaatggaccccaaggacaactgctccaaggacgccaacgataccctgctgctccagctgaccaacaccagcgcctactacatgtacttgttgctgctgctgaagtccgtggtgtacttcgccatcatcacatgctgcctgctgcggagaaccgccttctgctgcaacggcgagaagtctagggccaagcgatctggatctggagcaacaaacttctcactactcaaacaagcaggtgacgtggaggagaatcccgggcctactagcatggccttaccagtgaccgccttgctcctgccgctggccttgctgctccacgccgccaggccggacatccagatgacacagagccctagcagcctgtctgccagcgtgggagacagagtgaccatcacctgtagagccagccaggacatcaacacagccgtggcttggtatcagcagaagcctggcaaggcccctaagctgctgatctacagcgcctacttcctgtacagcggcgtgcccagcagattcagcggaagcagaagcggcaccgacttcaccctgacaatatccagcctccagcctgaggacttcgccacctactactgccagcagtacagcagatacagccccgtgacctttggacagggcaccaaggtggaaatcaagagaggcggaggcggaagtggaggcggaggatctggcggcggaggctctgaagttcagctggttgaaagtggtggcggcctggttcaacctggcggatctctgagactgagctgtgccgccagcggcttcaatgtgtacgcctctggaatgcactgggtccgacaggcccctggcaaaggacttgagtgggtcgccaaaatctaccccgacagcgactacacctattacgccgacagcgtgaagggcagattcaccatcagcgccgacaccagcaagaacaccgcctacctccagatgaactccctgagagccgaggacaccgccgtgtactactgtagcagagacagcagcttctactacgtgtacgctatggactactggggccagggcacactggtcacagtctcttctacgcgtatccagaaccctgatcctgccgtgtaccagctgcgggatagcaagagcagcgacaagagcgtgtgtctgttcaccgacttcgacagccagaccaacgtgtcccagagcaaggactccgacgtgtacatcaccgataagaccgtgctggacatgcggagcatggacttcaagagcaactccgccgtggcctggtccaacaagtccgatttcgcctgcgccaacgccttcaacaacagcattatccccgaggacacattcttcccaagccccgagagcagcgactccaccgaccacgtgaagcccaaagagacagagaacaccaagcagcccagcaagagctgccacaagcccaaggccatcgtgcacaccgagaaagtgaacatgatgagcctgaccgtgctgggcctgcggatgctgttcgccaaaaccgtggccgtgaacttcctgctgaccgccaagctgttcttcctccgcgccaagagaagcggatctggcgtgaagcagaccctgaatttcgacctgctgaagctggctggcgacgtggaatccaacccaggcccttctagaggccatatgaccgagtacaagcccacggtgcgcctcgccacccgcgacgacgtccccagggccgtacgcaccctcgccgccgcgttcgccgactaccccgccacgcgccacaccgtcgatccggaccgccacatcgagcgggtcaccgagctgcaagaactcttcctcacgcgcgtcgggctcgacatcggcaaggtgtgggtcgcggacgacggcgccgcggtggcggtctggaccacgccggagagcgtcgaagcgggggcggtgttcgccgagatcggcccgcgcatggccgagttgagcggttcccggctggccgcgcagcaacagatggaaggcctcctggcgccgcaccggcccaaggagcccgcgtggttcctggccaccgtcggcgtctcgcccgaccaccagggcaagggtctgggcagcgccgtcgtgctccccggagtggaggcggccgagcgcgccggggtgcccgccttcctggagacctccgcgccccgcaacctccccttctacgagcggctcggcttcaccgtcaccgccgacgtcgaggtgcccgaaggaccgcgcacctggtgcatgacccgcaagcccggtgcctga

SEQ ID NO: 39311 - DNA, 2925 bp, synthetic construct
  source 1..2925: mol_type = other DNA
atggccttaccagtgaccgccttgctcctgccgctggccttgctgctccacgccgccaggccgctcgagatccagaaccctgatcctgccgtgtaccagctgcgggatagcaagagcagcgacaagagcgtgtgtctgttcaccgacttcgacagccagaccaacgtgtcccagagcaaggactccgacgtgtacatcaccgataagaccgtgctggacatgcggagcatggacttcaagagcaactccgccgtggcctggtccaacaagtccgatttcgcctgcgccaacgccttcaacaacagcattatccccgaggacacattcttcccaagccccgagagcagcgactccaccgaccacgtgaagcccaaagagacagagaacaccaagcagcccagcaagagctgccacaagcccaaggccatcgtgcacaccgagaaagtgaacatgatgagcctgaccgtgctgggcctgcggatgctgttcgccaaaaccgtggccgtgaacttcctgctgaccgccaagctgttcttcctcagggccaagcgatctggatctggagcaacaaacttctcactactcaaacaagcaggtgacgtggaggagaatcccgggcctactagcatggccttaccagtgaccgccttgctcctgccgctggccttgctgctccacgccgccaggccggacatccagatgacacagagccctagcagcctgtctgccagcgtgggagacagagtgaccatcacctgtagagccagccaggacatcaacacagccgtggcttggtatcagcagaagcctggcaaggcccctaagctgctgatctacagcgcctacttcctgtacagcggcgtgcccagcagattcagcggaagcagaagcggcaccgacttcaccctgacaatatccagcctccagcctgaggacttcgccacctactactgccagcagtacagcagatacagccccgtgacctttggacagggcaccaaggtggaaatcaagagaggcggaggcggaagtggaggcggaggatctggcggcggaggctctgaagttcagctggttgaaagtggtggcggcctggttcaacctggcggatctctgagactgagctgtgccgccagcggcttcaatgtgtacgcctctggaatgcactgggtccgacaggcccctggcaaaggacttgagtgggtcgccaaaatctaccccgacagcgactacacctattacgccgacagcgtgaagggcagattcaccatcagcgccgacaccagcaagaacaccgcctacctccagatgaactccctgagagccgaggacaccgccgtgtactactgtagcagagacagcagcttctactacgtgtacgctatggactactggggccagggcacactggtcacagtctcttctacgcgtgaggacctgaagaacgtgttcccacctgaggtggccgtgttcgagcctagcgaggccgagatcagccacacccagaaagccaccctcgtgtgcctggctaccggcttctaccccgaccatgtggaactgtcttggtgggtcaacggcaaagaggtgcacagcggcgtgtctaccgacccccagccactgaaagaacagcccgccctgaacgacagccggtactgcctgagcagcagactgagagtgtccgccaccttctggcagaacccccggaaccacttcagatgccaggtgcagttctacggcctgagcgagaacgacgagtggacccaggacagagccaagcccgtgacccagatcgtgtctgccgaagcctggggcagagccgatgatgtgattaagatccactggcaggaaaagaagtccaacaccatcctgggcagccaggaaggcaacaccatgaagaccaacgacacctacatgaagttcagctggctgaccgtgcccgagaagtccctggacaaagaacacagatgcatcgtgcggcacgaaaacaacaagaacggcgtggaccaggaaatcatcttcccacccatcaagaccgatgtgattacaatggaccccaaggacaactgctccaaggacgccaacgataccctgctgctccagctgaccaacaccagcgcctactacatgtacttgttgctgctgctgaagtccgtggtgtacttcgccatcatcacatgctgcctgctgcggagaaccgccttctgctgcaacggcgagaagtctcgcgccaagagaagcggatctggcgtgaagcagaccctgaatttcgacctgctgaagctggctggcgacgtggaatccaacccaggcccttctagaggccatatgaccgagtacaagcccacggtgcgcctcgccacccgcgacgacgtccccagggccgtacgcaccctcgccgccgcgttcgccgactaccccgccacgcgccacaccgtcgatccggaccgccacatcgagcgggtcaccgagctgcaagaactcttcctcacgcgcgtcgggctcgacatcggcaaggtgtgggtcgcggacgacggcgccgcggtggcggtctggaccacgccggagagcgtcgaagcgggggcggtgttcgccgagatcggcccgcgcatggccgagttgagcggttcccggctggccgcgcagcaacagatggaaggcctcctggcgccgcaccggcccaaggagcccgcgtggttcctggccaccgtcggcgtctcgcccgaccaccagggcaagggtctgggcagcgccgtcgtgctccccggagtggaggcggccgagcgcgccggggtgcccgccttcctggagacctccgcgccccgcaacctccccttctacgagcggctcggcttcaccgtcaccgccgacgtcgaggtgcccgaaggaccgcgcacctggtgcatgacccgcaagcccggtgcctga

SEQ ID NO: 39312 - DNA, 2619 bp, synthetic construct
  source 1..2619: mol_type = other DNA
atggccttaccagtgaccgccttgctcctgccgctggccttgctgctccacgccgccaggccgctcgaggaggacctgaagaacgtgttcccacctgaggtggccgtgttcgagcctagcaaggccgagatcgcccacacccagaaagccaccctcgtgtgcctggctaccggcttctaccccgaccatgtggaactgtcttggtgggtcaacggcaaagaggtgcacagcggcgtgtgtaccgacccccagccactgaaagaacagcccgccctgaacgacagccggtactgcctgagcagcagactgagagtgtccgccaccttctggcagaacccccggaaccacttcagatgccaggtgcagttctacggcctgagcgagaacgacgagtggacccaggacagagccaagcccgtgacccagatcgtgtctgccgaagcctggggcagagccgattgcggcatcaccagcgccagctaccaccagggcgtgctgagcgccaccatcctgtacgagatcctgctgggcaaggccaccctgtacgccgtgctggtgtctgccctggtgctgatggctatggtcaagcggaaggacagccggggaagggccaagcgatctggatctggagcaacaaacttctcactactcaaacaagcaggtgacgtggaggagaatcccgggcctactagcatggccttaccagtgaccgccttgctcctgccgctggccttgctgctccacgccgccaggccggacatccagatgacacagagccctagcagcctgtctgccagcgtgggagacagagtgaccatcacctgtagagccagccaggacatcaacacagccgtggcttggtatcagcagaagcctggcaaggcccctaagctgctgatctacagcgcctacttcctgtacagcggcgtgcccagcagattcagcggaagcagaagcggcaccgacttcaccctgacaatatccagcctccagcctgaggacttcgccacctactactgccagcagtacagcagatacagccccgtgacctttggacagggcaccaaggtggaaatcaagagaggcggaggcggaagtggaggcggaggatctggcggcggaggctctgaagttcagctggttgaaagtggtggcggcctggttcaacctggcggatctctgagactgagctgtgccgccagcggcttcaatgtgtacgcctctggaatgcactgggtccgacaggcccctggcaaaggacttgagtgggtcgccaaaatctaccccgacagcgactacacctattacgccgacagcgtgaagggcagattcaccatcagcgccgacaccagcaagaacaccgcctacctccagatgaactccctgagagccgaggacaccgccgtgtactactgtagcagagacagcagcttctactacgtgtacgctatggactactggggccagggcacactggtcacagtctcttctacgcgtatccagaaccctgatcctgccgtgtaccagctgcgggatagcaagagcagcgacaagagcgtgtgtctgttcaccgacttcgacagccagaccaacgtgtcccagagcaaggactccgacgtgtacatcaccgataagtgcgtgctggacatgcggagcatggacttcaagagcaactccgccgtggcctggtccaacaagtccgatttcgcctgcgccaacgccttcaacaacagcattatccccgaggacacattcttcccaagcagcgacgtgccctgcgacgtgaagctggtggaaaagagcttcgagacagacaccaacctgaacttccagaacctgagcgtgatcggcttcagaatcctgctgctgaaagtggccggctttaacctgctgatgaccctgcggctgtggtccagccgcgccaagagaagcggatctggcgtgaagcagaccctgaatttcgacctgctgaagctggctggcgacgtggaatccaacccaggcccttctagaggccatatgaccgagtacaagcccacggtgcgcctcgccacccgcgacgacgtccccagggccgtacgcaccctcgccgccgcgttcgccgactaccccgccacgcgccacaccgtcgatccggaccgccacatcgagcgggtcaccgagctgcaagaactcttcctcacgcgcgtcgggctcgacatcggcaaggtgtgggtcgcggacgacggcgccgcggtggcggtctggaccacgccggagagcgtcgaagcgggggcggtgttcgccgagatcggcccgcgcatggccgagttgagcggttcccggctggccgcgcagcaacagatggaaggcctcctggcgccgcaccggcccaaggagcccgcgtggttcctggccaccgtcggcgtctcgcccgaccaccagggcaagggtctgggcagcgccgtcgtgctccccggagtggaggcggccgagcgcgccggggtgcccgccttcctggagacctccgcgccccgcaacctccccttctacgagcggctcggcttcaccgtcaccgccgacgtcgaggtgcccgaaggaccgcgcacctggtgcatgacccgcaagcccggtgcctga

SEQ ID NO: 39313 - DNA, 2619 bp, synthetic construct
  source 1..2619: mol_type = other DNA
atggccttaccagtgaccgccttgctcctgccgctggccttgctgctccacgccgccaggccgctcgagatccagaaccctgatcctgccgtgtaccagctgcgggatagcaagagcagcgacaagagcgtgtgtctgttcaccgacttcgacagccagaccaacgtgtcccagagcaaggactccgacgtgtacatcaccgataagtgcgtgctggacatgcggagcatggacttcaagagcaactccgccgtggcctggtccaacaagtccgatttcgcctgcgccaacgccttcaacaacagcattatccccgaggacacattcttcccaagcagcgacgtgccctgcgacgtgaagctggtggaaaagagcttcgagacagacaccaacctgaacttccagaacctgagcgtgatcggcttcagaatcctgctgctgaaagtggccggctttaacctgctgatgaccctgcggctgtggtccagcagggccaagcgatctggatctggagcaacaaacttctcactactcaaacaagcaggtgacgtggaggagaatcccgggcctactagcatggccttaccagtgaccgccttgctcctgccgctggccttgctgctccacgccgccaggccggacatccagatgacacagagccctagcagcctgtctgccagcgtgggagacagagtgaccatcacctgtagagccagccaggacatcaacacagccgtggcttggtatcagcagaagcctggcaaggcccctaagctgctgatctacagcgcctacttcctgtacagcggcgtgcccagcagattcagcggaagcagaagcggcaccgacttcaccctgacaatatccagcctccagcctgaggacttcgccacctactactgccagcagtacagcagatacagccccgtgacctttggacagggcaccaaggtggaaatcaagagaggcggaggcggaagtggaggcggaggatctggcggcggaggctctgaagttcagctggttgaaagtggtggcggcctggttcaacctggcggatctctgagactgagctgtgccgccagcggcttcaatgtgtacgcctctggaatgcactgggtccgacaggcccctggcaaaggacttgagtgggtcgccaaaatctaccccgacagcgactacacctattacgccgacagcgtgaagggcagattcaccatcagcgccgacaccagcaagaacaccgcctacctccagatgaactccctgagagccgaggacaccgccgtgtactactgtagcagagacagcagcttctactacgtgtacgctatggactactggggccagggcacactggtcacagtctcttctacgcgtgaggacctgaagaacgtgttcccacctgaggtggccgtgttcgagcctagcaaggccgagatcgcccacacccagaaagccaccctcgtgtgcctggctaccggcttctaccccgaccatgtggaactgtcttggtgggtcaacggcaaagaggtgcacagcggcgtgtgtaccgacccccagccactgaaagaacagcccgccctgaacgacagccggtactgcctgagcagcagactgagagtgtccgccaccttctggcagaacccccggaaccacttcagatgccaggtgcagttctacggcctgagcgagaacgacgagtggacccaggacagagccaagcccgtgacccagatcgtgtctgccgaagcctggggcagagccgattgcggcatcaccagcgccagctaccaccagggcgtgctgagcgccaccatcctgtacgagatcctgctgggcaaggccaccctgtacgccgtgctggtgtctgccctggtgctgatggctatggtcaagcggaaggacagccggggacgcgccaagagaagcggatctggcgtgaagcagaccctgaatttcgacctgctgaagctggctggcgacgtggaatccaacccaggcccttctagaggccatatgaccgagtacaagcccacggtgcgcctcgccacccgcgacgacgtccccagggccgtacgcaccctcgccgccgcgttcgccgactaccccgccacgcgccacaccgtcgatccggaccgccacatcgagcgggtcaccgagctgcaagaactcttcctcacgcgcgtcgggctcgacatcggcaaggtgtgggtcgcggacgacggcgccgcggtggcggtctggaccacgccggagagcgtcgaagcgggggcggtgttcgccgagatcggcccgcgcatggccgagttgagcggttcccggctggccgcgcagcaacagatggaaggcctcctggcgccgcaccggcccaaggagcccgcgtggttcctggccaccgtcggcgtctcgcccgaccaccagggcaagggtctgggcagcgccgtcgtgctccccggagtggaggcggccgagcgcgccggggtgcccgccttcctggagacctccgcgccccgcaacctccccttctacgagcggctcggcttcaccgtcaccgccgacgtcgaggtgcccgaaggaccgcgcacctggtgcatgacccgcaagcccggtgcctga

SEQ ID NO: 39314 - DNA, 2298 bp, synthetic construct
  source 1..2298: mol_type = other DNA
atggccttaccagtgaccgccttgctcctgccgctggccttgctgctccacgccgccaggccgctcgagcagagttttgggttgttggaccctaaattgtgctatctgttggacggaatcctgttcatttacggagtgatcctgaccgcattgttcctgcgggttaagttttccagatccgcagacgcacccgcttaccaacaagggcagaaccaactctacaatgaacttaatttggggcggagggaagagtacgacgttctggacaaaaggaggggacgagatcccgagatgggcggaaagcctcagcgaaggaagaatccgcaagaggggctttataacgaactccagaaagataaaatggcagaagcctatagtgagattgggatgaagggagaaaggaggaggggtaaaggtcacgatgggttgtaccaaggattgagcacagccactaaagatacctatgatgcgctccacatgcaggccctgccgccaagaagggccaagcgatctggatctggagcaacaaacttctcactactcaaacaagcaggtgacgtggaggagaatcccgggcctactagcatggccttaccagtgaccgccttgctcctgccgctggccttgctgctccacgccgccaggccggacatccagatgacacagagccctagcagcctgtctgccagcgtgggagacagagtgaccatcacctgtagagccagccaggacatcaacacagccgtggcttggtatcagcagaagcctggcaaggcccctaagctgctgatctacagcgcctacttcctgtacagcggcgtgcccagcagattcagcggaagcagaagcggcaccgacttcaccctgacaatatccagcctccagcctgaggacttcgccacctactactgccagcagtacagcagatacagccccgtgacctttggacagggcaccaaggtggaaatcaagagaggcggaggcggaagtggaggcggaggatctggcggcggaggctctgaagttcagctggttgaaagtggtggcggcctggttcaacctggcggatctctgagactgagctgtgccgccagcggcttcaatgtgtacgcctctggaatgcactgggtccgacaggcccctggcaaaggacttgagtgggtcgccaaaatctaccccgacagcgactacacctattacgccgacagcgtgaagggcagattcaccatcagcgccgacaccagcaagaacaccgcctacctccagatgaactccctgagagccgaggacaccgccgtgtactactgtagcagagacagcagcttctactacgtgtacgctatggactactggggccagggcacactggtcacagtctcttctacgcgtgagctgggagagcctcagctgtgctatatcctggacgccatcctgtttctgtacggcatcgtgctgaccctgctgtactgccggctgaagatccaagtgcggaaggccgccatcaccagctacgagaaatccgacggcgtgtacaccggcctgagcaccagaaatcaagagacatacgagacactgaagcacgaaaagcctccacaacgcgccaagagaagcggatctggcgtgaagcagaccctgaatttcgacctgctgaagctggctggcgacgtggaatccaacccaggcccttctagaggccatatgaccgagtacaagcccacggtgcgcctcgccacccgcgacgacgtccccagggccgtacgcaccctcgccgccgcgttcgccgactaccccgccacgcgccacaccgtcgatccggaccgccacatcgagcgggtcaccgagctgcaagaactcttcctcacgcgcgtcgggctcgacatcggcaaggtgtgggtcgcggacgacggcgccgcggtggcggtctggaccacgccggagagcgtcgaagcgggggcggtgttcgccgagatcggcccgcgcatggccgagttgagcggttcccggctggccgcgcagcaacagatggaaggcctcctggcgccgcaccggcccaaggagcccgcgtggttcctggccaccgtcggcgtctcgcccgaccaccagggcaagggtctgggcagcgccgtcgtgctccccggagtggaggcggccgagcgcgccggggtgcccgccttcctggagacctccgcgccccgcaacctccccttctacgagcggctcggcttcaccgtcaccgccgacgtcgaggtgcccgaaggaccgcgcacctggtgcatgacccgcaagcccggtgcctga

SEQ ID NO: 39315 - DNA, 2931 bp, synthetic construct; identical to SEQ ID NO: 39306
  source 1..2931: mol_type = other DNA

SEQ ID NO: 39316 - DNA, 2931 bp, synthetic construct; identical to SEQ ID NO: 39307
  source 1..2931: mol_type = other DNA

SEQ ID NO: 39317 - DNA, 2928 bp, synthetic construct
  source 1..2928: mol_type = other DNA
atggccttaccagtgaccgccttgctcctgccgctggccttgctgctccacgccgccaggccgctcgaggaggaggacctgaagaacgtgttcccacctgaggtggccgtgttcgagcctagcgaggccgagatcagccacacccagaaagccaccctcgtgtgcctggctaccggcttctaccccgaccatgtggaactgtcttggtgggtcaacggcaaagaggtgcacagcggcgtgtgtaccgacccccagccactgaaagaacagcccgccctgaacgacagccggtactgcctgagcagcagactgagagtgtccgccaccttctggcagaacccccggaaccacttcagatgccaggtgcagttctacggcctgagcgagaacgacgagtggacccaggacagagccaagcccgtgacccagatcgtgtctgccgaagcctggggcagagccgatgatgtgattaagatccactggcaggaaaagaagtccaacaccatcctgggcagccaggaaggcaacaccatgaagaccaacgacacctacatgaagttcagctggctgaccgtgcccgagaagtccctggacaaagaacacagatgcatcgtgcggcacgaaaacaacaagaacggcgtggaccaggaaatcatcttcccacccatcaagaccgatgtgattacaatggaccccaaggacaactgctccaaggacgccaacgataccctgctgctccagctgaccaacaccagcgcctactacatgtacttgttgctgctgctgaagtccgtggtgtacttcgccatcatcacatgctgcctgctgcggagaaccgccttctgctgcaacggcgagaagtctagggccaagcgatctggatctggagcaacaaacttctcactactcaaacaagcaggtgacgtggaggagaatcccgggcctactagcatggccttaccagtgaccgccttgctcctgccgctggccttgctgctccacgccgccaggccggacatccagatgacacagagccctagcagcctgtctgccagcgtgggagacagagtgaccatcacctgtagagccagccaggacatcaacacagccgtggcttggtatcagcagaagcctggcaaggcccctaagctgctgatctacagcgcctacttcctgtacagcggcgtgcccagcagattcagcggaagcagaagcggcaccgacttcaccctgacaatatccagcctccagcctgaggacttcgccacctactactgccagcagtacagcagatacagccccgtgacctttggacagggcaccaaggtggaaatcaagagaggcggaggcggaagtggaggcggaggatctggcggcggaggctctgaagttcagctggttgaaagtggtggcggcctggttcaacctggcggatctctgagactgagctgtgccgccagcggcttcaatgtgtacgcctctggaatgcactgggtccgacaggcccctggcaaaggacttgagtgggtcgccaaaatctaccccgacagcgactacacctattacgccgacagcgtgaagggcagattcaccatcagcgccgacaccagcaagaacaccgcctacctccagatgaactccctgagagccgaggacaccgccgtgtactactgtagcagagacagcagcttctactacgtgtacgctatggactactggggccagggcacactggtcacagtctcttctacgcgtatccagaaccctgatcctgccgtgtaccagctgcgggatagcaagagcagcgacaagagcgtgtgtctgttcaccgacttcgacagccagaccaacgtgtcccagagcaaggactccgacgtgtacatcaccgataagtgcgtgctggacatgcggagcatggacttcaagagcaactccgccgtggcctggtccaacaagtccgatttcgcctgcgccaacgccttcaacaacagcattatccccgaggacacattcttcccaagccccgagagcagcgactccaccgaccacgtgaagcccaaagagacagagaacaccaagcagcccagcaagagctgccacaagcccaaggccatcgtgcacaccgagaaagtgaacatgatgagcctgaccgtgctgggcctgcggatgctgttcgccaaaaccgtggccgtgaacttcctgctgaccgccaagctgttcttcctccgcgccaagagaagcggatctggcgtgaagcagaccctgaatttcgacctgctgaagctggctggcgacgtggaatccaacccaggcccttctagaggccatatgaccgagtacaagcccacggtgcgcctcgccacccgcgacgacgtccccagggccgtacgcaccctcgccgccgcgttcgccgactaccccgccacgcgccacaccgtcgatccggaccgccacatcgagcgggtcaccgagctgcaagaactcttcctcacgcgcgtcgggctcgacatcggcaaggtgtgggtcgcggacgacggcgccgcggtggcggtctggaccacgccggagagcgtcgaagcgggggcggtgttcgccgagatcggcccgcgcatggccgagttgagcggttcccggctggccgcgcagcaacagatggaaggcctcctggcgccgcaccggcccaaggagcccgcgtggttcctggccaccgtcggcgtctcgcccgaccaccagggcaagggtctgggcagcgccgtcgtgctccccggagtggaggcggccgagcgcgccggggtgcccgccttcctggagacctccgcgccccgcaacctccccttctacgagcggctcggcttcaccgtcaccgccgacgtcgaggtgcccgaaggaccgcgcacctggtgcatgacccgcaagcccggtgcctga

SEQ ID NO: 39318 - DNA, 2928 bp, synthetic construct
  source 1..2928: mol_type = other DNA
atggccttaccagtgaccgccttgctcctgccgctggccttgctgctccacgccgccaggccgctcgagatccagaaccctgatcctgccgtgtaccagctgcgggatagcaagagcagcgacaagagcgtgtgtctgttcaccgacttcgacagccagaccaacgtgtcccagagcaaggactccgacgtgtacatcaccgataagtgcgtgctggacatgcggagcatggacttcaagagcaactccgccgtggcctggtccaacaagtccgatttcgcctgcgccaacgccttcaacaacagcattatccccgaggacacattcttcccaagccccgagagcagcgactccaccgaccacgtgaagcccaaagagacagagaacaccaagcagcccagcaagagctgccacaagcccaaggccatcgtgcacaccgagaaagtgaacatgatgagcctgaccgtgctgggcctgcggatgctgttcgccaaaaccgtggccgtgaacttcctgctgaccgccaagctgttcttcctcagggccaagcgatctggatctggagcaacaaacttctcactactcaaacaagcaggtgacgtggaggagaatcccgggcctactagcatggccttaccagtgaccgccttgctcctgccgctggccttgctgctccacgccgccaggccggacatccagatgacacagagccctagcagcctgtctgccagcgtgggagacagagtgaccatcacctgtagagccagccaggacatcaacacagccgtggcttggtatcagcagaagcctggcaaggcccctaagctgctgatctacagcgcctacttcctgtacagcggcgtgcccagcagattcagcggaagcagaagcggcaccgacttcaccctgacaatatccagcctccagcctgaggacttcgccacctactactgccagcagtacagcagatacagccccgtgacctttggacagggcaccaaggtggaaatcaagagaggcggaggcggaagtggaggcggaggatctggcggcggaggctctgaagttcagctggttgaaagtggtggcggcctggttcaacctggcggatctctgagactgagctgtgccgccagcggcttcaatgtgtacgcctctggaatgcactgggtccgacaggcccctggcaaaggacttgagtgggtcgccaaaatctaccccgacagcgactacacctattacgccgacagcgtgaagggcagattcaccatcagcgccgacaccagcaagaacaccgcctacctccagatgaactccctgagagccgaggacaccgccgtgtactactgtagcagagacagcagcttctactacgtgtacgctatggactactggggccagggcacactggtcacagtctcttctacgcgtgaggaggacctgaagaacgtgttcccacctgaggtggccgtgttcgagcctagcgaggccgagatcagccacacccagaaagccaccctcgtgtgcctggctaccggcttctaccccgaccatgtggaactgtcttggtgggtcaacggcaaagaggtgcacagcggcgtgtgtaccgacccccagccactgaaagaacagcccgccctgaacgacagccggtactgcctgagcagcagactgagagtgtccgccaccttctggcagaacccccggaaccacttcagatgccaggtgcagttctacggcctgagcgagaacgacgagtggacccaggacagagccaagcccgtgacccagatcgtgtctgccgaagcctggggcagagccgatgatgtgattaagatccactggcaggaaaagaagtccaacaccatcctgggcagccaggaaggcaacaccatgaagaccaacgacacctacatgaagttcagctggctgaccgtgcccgagaagtccctggacaaagaacacagatgcatcgtgcggcacgaaaacaacaagaacggcgtggaccaggaaatcatcttcccacccatcaagaccgatgtgattacaatggaccccaaggacaactgctccaaggacgccaacgataccctgctgctccagctgaccaacaccagcgcctactacatgtacttgttgctgctgctgaagtccgtggtgtacttcgccatcatcacatgctgcctgctgcggagaaccgccttctgctgcaacggcgagaagtctcgcgccaagagaagcggatctggcgtgaagcagaccctgaatttcgacctgctgaagctggctggcgacgtggaatccaacccaggcccttctagaggccatatgaccgagtacaagcccacggtgcgcctcgccacccgcgacgacgtccccagggccgtacgcaccctcgccgccgcgttcgccgactaccccgccacgcgccacaccgtcgatccggaccgccacatcgagcgggtcaccgagctgcaagaactcttcctcacgcgcgtcgggctcgacatcggcaaggtgtgggtcgcggacgacggcgccgcggtggcggtctggaccacgccggagagcgtcgaagcgggggcggtgttcgccgagatcggcccgcgcatggccgagttgagcggttcccggctggccgcgcagcaacagatggaaggcctcctggcgccgcaccggcccaaggagcccgcgtggttcctggccaccgtcggcgtctcgcccgaccaccagggcaagggtctgggcagcgccgtcgtgctccccggagtggaggcggccgagcgcgccggggtgcccgccttcctggagacctccgcgccccgcaacctccccttctacgagcggctcggcttcaccgtcaccgccgacgtcgaggtgcccgaaggaccgcgcacctggtgcatgacccgcaagcccggtgcctga

SEQ ID NO: 39319 - DNA, 2619 bp, synthetic construct
  source 1..2619: mol_type = other DNA
atggccttaccagtgaccgccttgctcctgccgctggccttgctgctccacgccgccaggccgctcgaggaggacctgaagaacgtgttcccacctgaggtggccgtgttcgagcctagcgaggccgagatcagccacacccagaaagccaccctcgtgtgcctggctaccggcttctaccccgaccatgtggaactgtcttggtgggtcaacggcaaagaggtgcacagcggcgtgtctaccgacccccagccactgaaagaacagcccgccctgaacgacagccggtactgcctgagcagcagactgagagtgtccgccaccttctggcagaacccccggaaccacttcagatgccaggtgcagttctacggcctgagcgagaacgacgagtggacccaggacagagccaagcccgtgacccagatcgtgtctgccgaagcctggggcagagccgattgcggctttaccagcgagagctaccagcagggcgtgctgagcgccaccaacctgagcgtgatcggcttcagaatcctgctgctgaaagtggccggctttaacctgctgatgaccctgcggctgtggtccagcagggccaagcgatctggatctggagcaacaaacttctcactactcaaacaagcaggtgacgtggaggagaatcccgggcctactagcatggccttaccagtgaccgccttgctcctgccgctggccttgctgctccacgccgccaggccggacatccagatgacacagagccctagcagcctgtctgccagcgtgggagacagagtgaccatcacctgtagagccagccaggacatcaacacagccgtggcttggtatcagcagaagcctggcaaggcccctaagctgctgatctacagcgcctacttcctgtacagcggcgtgcccagcagattcagcggaagcagaagcggcaccgacttcaccctgacaatatccagcctccagcctgaggacttcgccacctactactgccagcagtacagcagatacagccccgtgacctttggacagggcaccaaggtggaaatcaagagaggcggaggcggaagtggaggcggaggatctggcggcggaggctctgaagttcagctggttgaaagtggtggcggcctggttcaacctggcggatctctgagactgagctgtgccgccagcggcttcaatgtgtacgcctctggaatgcactgggtccgacaggcccctggcaaaggacttgagtgggtcgccaaaatctaccccgacagcgactacacctattacgccgacagcgtgaagggcagattcaccatcagcgccgacaccagcaagaacaccgcctacctccagatgaactccctgagagccgaggacaccgccgtgtactactgtagcagagacagcagcttctactacgtgtacgctatggactactggggccagggcacactggtcacagtctcttctacgcgtatccagaaccctgatcctgccgtgtaccagctgcgggatagcaagagcagcgacaagagcgtgtgtctgttcaccgacttcgacagccagaccaacgtgtcccagagcaaggactccgacgtgtacatcaccgataagaccgtgctggacatgcggagcatggacttcaagagcaactccgccgtggcctggtccaacaagtccgatttcgcctgcgccaacgccttcaacaacagcattatccccgaggacacattcttcccaagccccgagagcagctgcgacgtgaagctggtggaaaagagcttcgagacagacaccaacctgaacttccagatcctgtacgagatcctgctgggcaaggccaccctgtacgccgtgctggtgtctgccctggtgctgatggctatggtcaagcggaaggacagccggggacgcgccaagagaagcggatctggcgtgaagcagaccctgaatttcgacctgctgaagctggctggcgacgtggaatccaacccaggcccttctagaggccatatgaccgagtacaagcccacggtgcgcctcgccacccgcgacgacgtccccagggccgtacgcaccctcgccgccgcgttcgccgactaccccgccacgcgccacaccgtcgatccggaccgccacatcgagcgggtcaccgagctgcaagaactcttcctcacgcgcgtcgggctcgacatcggcaaggtgtgggtcgcggacgacggcgccgcggtggcggtctggaccacgccggagagcgtcgaagcgggggcggtgttcgccgagatcggcccgcgcatggccgagttgagcggttcccggctggccgcgcagcaacagatggaaggcctcctggcgccgcaccggcccaaggagcccgcgtggttcctggccaccgtcggcgtctcgcccgaccaccagggcaagggtctgggcagcgccgtcgtgctccccggagtggaggcggccgagcgcgccggggtgcccgccttcctggagacctccgcgccccgcaacctccccttctacgagcggctcggcttcaccgtcaccgccgacgtcgaggtgcccgaaggaccgcgcacctggtgcatgacccgcaagcccggtgcctga

SEQ ID NO: 39320 - DNA, 2619 bp, synthetic construct
  source 1..2619: mol_type = other DNA
atggccttaccagtgaccgccttgctcctgccgctggccttgctgctccacgccgccaggccgctcgagatccagaaccctgatcctgccgtgtaccagctgcgggatagcaagagcagcgacaagagcgtgtgtctgttcaccgacttcgacagccagaccaacgtgtcccagagcaaggactccgacgtgtacatcaccgataagaccgtgctggacatgcggagcatggacttcaagagcaactccgccgtggcctggtccaacaagtccgatttcgcctgcgccaacgccttcaacaacagcattatccccgaggacacattcttcccaagccccgagagcagctgcgacgtgaagctggtggaaaagagcttcgagacagacaccaacctgaacttccagatcctgtacgagatcctgctgggcaaggccaccctgtacgccgtgctggtgtctgccctggtgctgatggctatggtcaagcggaaggacagccggggaagggccaagcgatctggatctggagcaacaaacttctcactactcaaacaagcaggtgacgtggaggagaatcccgggcctactagcatggccttaccagtgaccgccttgctcctgccgctggccttgctgctccacgccgccaggccggacatccagatgacacagagccctagcagcctgtctgccagcgtgggagacagagtgaccatcacctgtagagccagccaggacatcaacacagccgtggcttggtatcagcagaagcctggcaaggcccctaagctgctgatctacagcgcctacttcctgtacagcggcgtgcccagcagattcagcggaagcagaagcggcaccgacttcaccctgacaatatccagcctccagcctgaggacttcgccacctactactgccagcagtacagcagatacagccccgtgacctttggacagggcaccaaggtggaaatcaagagaggcggaggcggaagtggaggcggaggatctggcggcggaggctctgaagttcagctggttgaaagtggtggcggcctggttcaacctggcggatctctgagactgagctgtgccgccagcggcttcaatgtgtacgcctctggaatgcactgggtccgacaggcccctggcaaaggacttgagtgggtcgccaaaatctaccccgacagcgactacacctattacgccgacagcgtgaagggcagattcaccatcagcgccgacaccagcaagaacaccgcctacctccagatgaactccctgagagccgaggacaccgccgtgtactactgtagcagagacagcagcttctactacgtgtacgctatggactactggggccagggcacactggtcacagtctcttctacgcgtgaggacctgaagaacgtgttcccacctgaggtggccgtgttcgagcctagcgaggccgagatcagccacacccagaaagccaccctcgtgtgcctggctaccggcttctaccccgaccatgtggaactgtcttggtgggtcaacggcaaagaggtgcacagcggcgtgtctaccgacccccagccactgaaagaacagcccgccctgaacgacagccggtactgcctgagcagcagactgagagtgtccgccaccttctggcagaacccccggaaccacttcagatgccaggtgcagttctacggcctgagcgagaacgacgagtggacccaggacagagccaagcccgtgacccagatcgtgtctgccgaagcctggggcagagccgattgcggctttaccagcgagagctaccagcagggcgtgctgagcgccaccaacctgagcgtgatcggcttcagaatcctgctgctgaaagtggccggctttaacctgctgatgaccctgcggctgtggtccagccgcgccaagagaagcggatctggcgtgaagcagaccctgaatttcgacctgctgaagctggctggcgacgtggaatccaacccaggcccttctagaggccatatgaccgagtacaagcccacggtgcgcctcgccacccgcgacgacgtccccagggccgtacgcaccctcgccgccgcgttcgccgactaccccgccacgcgccacaccgtcgatccggaccgccacatcgagcgggtcaccgagctgcaagaactcttcctcacgcgcgtcgggctcgacatcggcaaggtgtgggtcgcggacgacggcgccgcggtggcggtctggaccacgccggagagcgtcgaagcgggggcggtgttcgccgagatcggcccgcgcatggccgagttgagcggttcccggctggccgcgcagcaacagatggaaggcctcctggcgccgcaccggcccaaggagcccgcgtggttcctggccaccgtcggcgtctcgcccgaccaccagggcaagggtctgggcagcgccgtcgtgctccccggagtggaggcggccgagcgcgccggggtgcccgccttcctggagacctccgcgccccgcaacctccccttctacgagcggctcggcttcaccgtcaccgccgacgtcgaggtgcccgaaggaccgcgcacctggtgcatgacccgcaagcccggtgcctga

SEQ ID NO: 39321 - DNA, 2619 bp, synthetic construct
  source 1..2619: mol_type = other DNA
atggccttaccagtgaccgccttgctcctgccgctggccttgctgctccacgccgccaggccgctcgaggaggacctgaagaacgtgttcccacctgaggtggccgtgttcgagcctagcgaggccgagatcagccacacccagaaagccaccctcgtgtgcctggctaccggcttctaccccgaccatgtggaactgtcttggtgggtcaacggcaaagaggtgcacagcggcgtgtgtaccgacccccagccactgaaagaacagcccgccctgaacgacagccggtactgcctgagcagcagactgagagtgtccgccaccttctggcagaacccccggaaccacttcagatgccaggtgcagttctacggcctgagcgagaacgacgagtggacccaggacagagccaagcccgtgacccagatcgtgtctgccgaagcctggggcagagccgattgcgacgtgaagctggtggaaaagagcttcgagacagacaccaacctgaacttccagaacctgagcgtgatcggcttcagaatcctgctgctgaaagtggccggctttaacctgctgatgaccctgcggctgtggtccagcagggccaagcgatctggatctggagcaacaaacttctcactactcaaacaagcaggtgacgtggaggagaatcccgggcctactagcatggccttaccagtgaccgccttgctcctgccgctggccttgctgctccacgccgccaggccggacatccagatgacacagagccctagcagcctgtctgccagcgtgggagacagagtgaccatcacctgtagagccagccaggacatcaacacagccgtggcttggtatcagcagaagcctggcaaggcccctaagctgctgatctacagcgcctacttcctgtacagcggcgtgcccagcagattcagcggaagcagaagcggcaccgacttcaccctgacaatatccagcctccagcctgaggacttcgccacctactactgccagcagtacagcagatacagccccgtgacctttggacagggcaccaaggtggaaatcaagagaggcggaggcggaagtggaggcggaggatctggcggcggaggctctgaagttcagctggttgaaagtggtggcggcctggttcaacctggcggatctctgagactgagctgtgccgccagcggcttcaatgtgtacgcctctggaatgcactgggtccgacaggcccctggcaaaggacttgagtgggtcgccaaaatctaccccgacagcgactacacctattacgccgacagcgtgaagggcagattcaccatcagcgccgacaccagcaagaacaccgcctacctccagatgaactccctgagagccgaggacaccgccgtgtactactgtagcagagacagcagcttctactacgtgtacgctatggactactggggccagggcacactggtcacagtctcttctacgcgtatccagaaccctgatcctgccgtgtaccagctgcgggatagcaagagcagcgacaagagcgtgtgtctgttcaccgacttcgacagccagaccaacgtgtcccagagcaaggactccgacgtgtacatcaccgataagtgcgtgctggacatgcggagcatggacttcaagagcaactccgccgtggcctggtccaacaagtccgatttcgcctgcgccaacgccttcaacaacagcattatccccgaggacacattcttcccaagccccgagagcagctgcggctttaccagcgagagctaccagcagggcgtgctgagcgccaccatcctgtacgagatcctgctgggcaaggccaccctgtacgccgtgctggtgtctgccctggtgctgatggctatggtcaagcggaaggacagccggggacgcgccaagagaagcggatctggcgtgaagcagaccctgaatttcgacctgctgaagctggctggcgacgtggaatccaacccaggcccttctagaggccatatgaccgagtacaagcccacggtgcgcctcgccacccgcgacgacgtccccagggccgtacgcaccctcgccgccgcgttcgccgactaccccgccacgcgccacaccgtcgatccggaccgccacatcgagcgggtcaccgagctgcaagaactcttcctcacgcgcgtcgggctcgacatcggcaaggtgtgggtcgcggacgacggcgccgcggtggcggtctggaccacgccggagagcgtcgaagcgggggcggtgttcgccgagatcggcccgcgcatggccgagttgagcggttcccggctggccgcgcagcaacagatggaaggcctcctggcgccgcaccggcccaaggagcccgcgtggttcctggccaccgtcggcgtctcgcccgaccaccagggcaagggtctgggcagcgccgtcgtgctccccggagtggaggcggccgagcgcgccggggtgcccgccttcctggagacctccgcgccccgcaacctccccttctacgagcggctcggcttcaccgtcaccgccgacgtcgaggtgcccgaaggaccgcgcacctggtgcatgacccgcaagcccggtgcctga

SEQ ID NO: 39322 - DNA, 2619 bp, synthetic construct
  source 1..2619: mol_type = other DNA
atggccttaccagtgaccgccttgctcctgccgctggccttgctgctccacgccgccaggccgctcgaggaggacctgaagaacgtgttcccacctgaggtggccgtgttcgagcctagcgaggccgagatcagccacacccagaaagccaccctcgtgtgcctggctaccggcttctaccccgaccatgtggaactgtcttggtgggtcaacggcaaagaggtgcacagcggcgtgtctaccgacccccagccactgaaagaacagcccgccctgaacgacagccggtactgcctgagcagcagactgagagtgtccgccaccttctggcagaacccccggaaccacttcagatgccaggtgcagttctacggcctgagcgagaacgacgagtggacccaggacagagccaagcccgtgacccagatcgtgtctgccgaagcctggggcagagccgattgcgacgtgaagctggtggaaaagagcttcgagacagacaccaacctgaacttccagaacctgagcgtgatcggcttcagaatcctgctgctgaaagtggccggctttaacctgctgatgaccctgcggctgtggtccagcagggccaagcgatctggatctggagcaacaaacttctcactactcaaacaagcaggtgacgtggaggagaatcccgggcctactagcatggccttaccagtgaccgccttgctcctgccgctggccttgctgctccacgccgccaggccggacatccagatgacacagagccctagcagcctgtctgccagcgtgggagacagagtgaccatcacctgtagagccagccaggacatcaacacagccgtggcttggtatcagcagaagcctggcaaggcccctaagctgctgatctacagcgcctacttcctgtacagcggcgtgcccagcagattcagcggaagcagaagcggcaccgacttcaccctgacaatatccagcctccagcctgaggacttcgccacctactactgccagcagtacagcagatacagccccgtgacctttggacagggcaccaaggtggaaatcaagagaggcggaggcggaagtggaggcggaggatctggcggcggaggctctgaagttcagctggttgaaagtggtggcggcctggttcaacctggcggatctctgagactgagctgtgccgccagcggcttcaatgtgtacgcctctggaatgcactgggtccgacaggcccctggcaaaggacttgagtgggtcgccaaaatctaccccgacagcgactacacctattacgccgacagcgtgaagggcagattcaccatcagcgccgacaccagcaagaacaccgcctacctccagatgaactccctgagagccgaggacaccgccgtgtactactgtagcagagacagcagcttctactacgtgtacgctatggactactggggccagggcacactggtcacagtctcttctacgcgtatccagaaccctgatcctgccgtgtaccagctgcgggatagcaagagcagcgacaagagcgtgtgtctgttcaccgacttcgacagccagaccaacgtgtcccagagcaaggactccgacgtgtacatcaccgataagaccgtgctggacatgcggagcatggacttcaagagcaactccgccgtggcctggtccaacaagtccgatttcgcctgcgccaacgccttcaacaacagcattatccccgaggacacattcttcccaagccccgagagcagctgcggctttaccagcgagagctaccagcagggcgtgctgagcgccaccatcctgtacgagatcctgctgggcaaggccaccctgtacgccgtgctggtgtctgccctggtgctgatggctatggtcaagcggaaggacagccggggacgcgccaagagaagcggatctggcgtgaagcagaccctgaatttcgacctgctgaagctggctggcgacgtggaatccaacccaggcccttctagaggccatatgaccgagtacaagcccacggtgcgcctcgccacccgcgacgacgtccccagggccgtacgcaccctcgccgccgcgttcgccgactaccccgccacgcgccacaccgtcgatccggaccgccacatcgagcgggtcaccgagctgcaagaactcttcctcacgcgcgtcgggctcgacatcggcaaggtgtgggtcgcggacgacggcgccgcggtggcggtctggaccacgccggagagcgtcgaagcgggggcggtgttcgccgagatcggcccgcgcatggccgagttgagcggttcccggctggccgcgcagcaacagatggaaggcctcctggcgccgcaccggcccaaggagcccgcgtggttcctggccaccgtcggcgtctcgcccgaccaccagggcaagggtctgggcagcgccgtcgtgctccccggagtggaggcggccgagcgcgccggggtgcccgccttcctggagacctccgcgccccgcaacctccccttctacgagcggctcggcttcaccgtcaccgccgacgtcgaggtgcccgaaggaccgcgcacctggtgcatgacccgcaagcccggtgcctga

SEQ ID NO: 39323 - DNA, 2928 bp, synthetic construct
  source 1..2928: mol_type = other DNA
atggccttaccagtgaccgccttgctcctgccgctggccttgctgctccacgccgccaggccgctcgaggaggaggacctgaagaacgtgttcccacctgaggtggccgtgttcgagcctagcgaggccgagatcagccacacccagaaagccaccctcgtgtgcctggctaccggcttctaccccgaccatgtggaactgtcttggtgggtcaacggcaaagaggtgcacagcggcgtgtctaccgacccccagccactgaaagaacagcccgccctgaacgacagccggtactgcctgagcagcagactgagagtgtccgccaccttctggcagaacccccggaaccacttcagatgccaggtgcagttctacggcctgagcgagaacgacgagtggacccaggacagagccaagcccgtgacccagatcgtgtctgccgaagcctggggcagagccgatgatgtgattaagatccactggcaggaaaagaagtccaacaccatcctgggcagccaggaaggcaacaccatgaagaccaacgacacctacatgaagttcagctggctgaccgtgcccgagaagtccctggacaaagaacacagatgcatcgtgcggcacgaaaacaacaagaacggcgtggaccaggaaatcatcttcccacccatcaagaccgatgtgattacaatggaccccaaggacaactgctccaaggacgccaacgataccctgctgctccagctgaccaacaccagcgcctactacatgtacttgttgctgctgctgaagtccgtggtgtacttcgccatcatcacatgctgcctgctgcggagaaccgccttctgctgcaacggcgagaagtctagggccaagcgatctggatctggagcaacaaacttctcactactcaaacaagcaggtgacgtggaggagaatcccgggcctactagcatggccttaccagtgaccgccttgctcctgccgctggccttgctgctccacgccgccaggccggacatccagatgacacagagccctagcagcctgtctgccagcgtgggagacagagtgaccatcacctgtagagccagccaggacatcaacacagccgtggcttggtatcagcagaagcctggcaaggcccctaagctgctgatctacagcgcctacttcctgtacagcggcgtgcccagcagattcagcggaagcagaagcggcaccgacttcaccctgacaatatccagcctccagcctgaggacttcgccacctactactgccagcagtacagcagatacagccccgtgacctttggacagggcaccaaggtggaaatcaagagaggcggaggcggaagtggaggcggaggatctggcggcggaggctctgaagttcagctggttgaaagtggtggcggcctggttcaacctggcggatctctgagactgagctgtgccgccagcggcttcaatgtgtacgcctctggaatgcactgggtccgacaggcccctggcaaaggacttgagtgggtcgccaaaatctaccccgacagcgactacacctattacgccgacagcgtgaagggcagattcaccatcagcgccgacaccagcaagaacaccgcctacctccagatgaactccctgagagccgaggacaccgccgtgtactactgtagcagagacagcagcttctactacgtgtacgctatggactactggggccagggcacactggtcacagtctcttctacgcgtatccagaaccctgatcctgccgtgtaccagctgcgggatagcaagagcagcgacaagagcgtgtgtctgttcaccgacttcgacagccagaccaacgtgtcccagagcaaggactccgacgtgtacatcaccgataagaccgtgctggacatgcggagcatggacttcaagagcaactccgccgtggcctggtccaacaagtccgatttcgcctgcgccaacgccttcaacaacagcattatccccgaggacacattcttcccaagccccgagagcagcgactccaccgaccacgtgaagcccaaagagacagagaacaccaagcagcccagcaagagctgccacaagcccaaggccatcgtgcacaccgagaaagtgaacatgatgagcctgaccgtgctgggcctgcggatgctgttcgccaaaaccgtggccgtgaacttcctgctgaccgccaagctgttcttcctccgcgccaagagaagcggatctggcgtgaagcagaccctgaatttcgacctgctgaagctggctggcgacgtggaatccaacccaggcccttctagaggccatatgaccgagtacaagcccacggtgcgcctcgccacccgcgacgacgtccccagggccgtacgcaccctcgccgccgcgttcgccgactaccccgccacgcgccacaccgtcgatccggaccgccacatcgagcgggtcaccgagctgcaagaactcttcctcacgcgcgtcgggctcgacatcggcaaggtgtgggtcgcggacgacggcgccgcggtggcggtctggaccacgccggagagcgtcgaagcgggggcggtgttcgccgagatcggcccgcgcatggccgagttgagcggttcccggctggccgcgcagcaacagatggaaggcctcctggcgccgcaccggcccaaggagcccgcgtggttcctggccaccgtcggcgtctcgcccgaccaccagggcaagggtctgggcagcgccgtcgtgctccccggagtggaggcggccgagcgcgccggggtgcccgccttcctggagacctccgcgccccgcaacctccccttctacgagcggctcggcttcaccgtcaccgccgacgtcgaggtgcccgaaggaccgcgcacctggtgcatgacccgcaagcccggtgcctga

SEQ ID NO: 39324 - DNA, 2619 bp, synthetic construct
  source 1..2619: mol_type = other DNA
atggccttaccagtgaccgccttgctcctgccgctggccttgctgctccacgccgccaggccgctcgaggaggacctgaagaacgtgttcccacctgaggtggccgtgttcgagcctagcgaggccgagatcagccacacccagaaagccaccctcgtgtgcctggctaccggcttctaccccgaccatgtggaactgtcttggtgggtcaacggcaaagaggtgcacagcggcgtgtgtaccgacccccagccactgaaagaacagcccgccctgaacgacagccggtactgcctgagcagcagactgagagtgtccgccaccttctggcagaacccccggaaccacttcagatgccaggtgcagttctacggcctgagcgagaacgacgagtggacccaggacagagccaagcccgtgacccagatcgtgtctgccgaagcctggggcagagccgattgcggctttaccagcgagagctaccagcagggcgtgctgagcgccaccaacctgagcgtgatcggcttcagaatcctgctgctgaaagtggccggctttaacctgctgatgaccctgcggctgtggtccagcagggccaagcgatctggatctggagcaacaaacttctcactactcaaacaagcaggtgacgtggaggagaatcccgggcctactagcatggccttaccagtgaccgccttgctcctgccgctggccttgctgctccacgccgccaggccggacatccagatgacacagagccctagcagcctgtctgccagcgtgggagacagagtgaccatcacctgtagagccagccaggacatcaacacagccgtggcttggtatcagcagaagcctggcaaggcccctaagctgctgatctacagcgcctacttcctgtacagcggcgtgcccagcagattcagcggaagcagaagcggcaccgacttcaccctgacaatatccagcctccagcctgaggacttcgccacctactactgccagcagtacagcagatacagccccgtgacctttggacagggcaccaaggtggaaatcaagagaggcggaggcggaagtggaggcggaggatctggcggcggaggctctgaagttcagctggttgaaagtggtggcggcctggttcaacctggcggatctctgagactgagctgtgccgccagcggcttcaatgtgtacgcctctggaatgcactgggtccgacaggcccctggcaaaggacttgagtgggtcgccaaaatctaccccgacagcgactacacctattacgccgacagcgtgaagggcagattcaccatcagcgccgacaccagcaagaacaccgcctacctccagatgaactccctgagagccgaggacaccgccgtgtactactgtagcagagacagcagcttctactacgtgtacgctatggactactggggccagggcacactggtcacagtctcttctacgcgtatccagaaccctgatcctgccgtgtaccagctgcgggatagcaagagcagcgacaagagcgtgtgtctgttcaccgacttcgacagccagaccaacgtgtcccagagcaaggactccgacgtgtacatcaccgataagtgcgtgctggacatgcggagcatggacttcaagagcaactccgccgtggcctggtccaacaagtccgatttcgcctgcgccaacgccttcaacaacagcattatccccgaggacacattcttcccaagccccgagagcagctgcgacgtgaagctggtggaaaagagcttcgagacagacaccaacctgaacttccagatcctgtacgagatcctgctgggcaaggccaccctgtacgccgtgctggtgtctgccctggtgctgatggctatggtcaagcggaaggacagccggggacgcgccaagagaagcggatctggcgtgaagcagaccctgaatttcgacctgctgaagctggctggcgacgtggaatccaacccaggcccttctagaggccatatgaccgagtacaagcccacggtgcgcctcgccacccgcgacgacgtccccagggccgtacgcaccctcgccgccgcgttcgccgactaccccgccacgcgccacaccgtcgatccggaccgccacatcgagcgggtcaccgagctgcaagaactcttcctcacgcgcgtcgggctcgacatcggcaaggtgtgggtcgcggacgacggcgccgcggtggcggtctggaccacgccggagagcgtcgaagcgggggcggtgttcgccgagatcggcccgcgcatggccgagttgagcggttcccggctggccgcgcagcaacagatggaaggcctcctggcgccgcaccggcccaaggagcccgcgtggttcctggccaccgtcggcgtctcgcccgaccaccagggcaagggtctgggcagcgccgtcgtgctccccggagtggaggcggccgagcgcgccggggtgcccgccttcctggagacctccgcgccccgcaacctccccttctacgagcggctcggcttcaccgtcaccgccgacgtcgaggtgcccgaaggaccgcgcacctggtgcatgacccgcaagcccggtgcctga

SEQ ID NO: 39325 - DNA, 2706 bp, synthetic construct
  source 1..2706: mol_type = other DNA
atggccttaccagtgaccgccttgctcctgccgctggccttgctgctccacgccgccaggccgctcgaggaggaggacctgaagaacgtgttcccacctgaggtggccgtgttcgagcctagcgaggccgagatcagccacacccagaaagccaccctcgtgtgcctggctaccggcttctaccccgaccatgtggaactgtcttggtgggtcaacggcaaagaggtgcacagcggcgtgtgtaccgacccccagccactgaaagaacagcccgccctgaacgacagccggtactgcctgagcagcagactgagagtgtccgccaccttctggcagaacccccggaaccacttcagatgccaggtgcagttctacggcctgagcgagaacgacgagtggacccaggacagagccaagcccgtgacccagatcgtgtctgccgaagcctggggcagagccgattgcggctttaccagcgagagctaccagcagggcgtgctgagcgccaccaacctgagcgtgatcggcttcagaatcctgctgctgaaagtggccggctttaacctgctgatgaccctgcggctgtggtccagcagggccaagcgatctggatctggagcaacaaacttctcactactcaaacaagcaggtgacgtggaggagaatcccgggcctactagcatggccttaccagtgaccgccttgctcctgccgctggccttgctgctccacgccgccaggccggacatccagatgacacagagccctagcagcctgtctgccagcgtgggagacagagtgaccatcacctgtagagccagccaggacatcaacacagccgtggcttggtatcagcagaagcctggcaaggcccctaagctgctgatctacagcgcctacttcctgtacagcggcgtgcccagcagattcagcggaagcagaagcggcaccgacttcaccctgacaatatccagcctccagcctgaggacttcgccacctactactgccagcagtacagcagatacagccccgtgacctttggacagggcaccaaggtggaaatcaagagaggcggaggcggaagtggaggcggaggatctggcggcggaggctctgaagttcagctggttgaaagtggtggcggcctggttcaacctggcggatctctgagactgagctgtgccgccagcggcttcaatgtgtacgcctctggaatgcactgggtccgacaggcccctggcaaaggacttgagtgggtcgccaaaatctaccccgacagcgactacacctattacgccgacagcgtgaagggcagattcaccatcagcgccgacaccagcaagaacaccgcctacctccagatgaactccctgagagccgaggacaccgccgtgtactactgtagcagagacagcagcttctactacgtgtacgctatggactactggggccagggcacactggtcacagtctcttctacgcgtggacagcctaaggccaatcctaccgtgacactgttccctccaagcagcgaagaactccaggccaacaaggccacacttgtgtgcctgatctccgacttctaccctggggctgtgacagtggcttggaaggccgatggatctcctgtgaaagccggcgtggaaaccaccaagccatccaagcagagcaacaacaaatacgccgccagctcctacctgagcctgacacctgagcagtggaagtcccacagatcctacagctgccaagtgacccacgaaggcagcaccgtggaaaagacagtggcccctacagagtgcagccccatcaagaccgatgtgattacaatggaccccaaggacaactgctccaaggacgccaacgataccctgctgctccagctgaccaacaccagcgcctactacatgtacttgttgctgctgctgaagtccgtggtgtacttcgccatcatcacatgctgcctgctgcggagaaccgccttctgctgcaacggcgagaagtctcgcgccaagagaagcggatctggcgtgaagcagaccctgaatttcgacctgctgaagctggctggcgacgtggaatccaacccaggcccttctagaggccatatgaccgagtacaagcccacggtgcgcctcgccacccgcgacgacgtccccagggccgtacgcaccctcgccgccgcgttcgccgactaccccgccacgcgccacaccgtcgatccggaccgccacatcgagcgggtcaccgagctgcaagaactcttcctcacgcgcgtcgggctcgacatcggcaaggtgtgggtcgcggacgacggcgccgcggtggcggtctggaccacgccggagagcgtcgaagcgggggcggtgttcgccgagatcggcccgcgcatggccgagttgagcggttcccggctggccgcgcagcaacagatggaaggcctcctggcgccgcaccggcccaaggagcccgcgtggttcctggccaccgtcggcgtctcgcccgaccaccagggcaagggtctgggcagcgccgtcgtgctccccggagtggaggcggccgagcgcgccggggtgcccgccttcctggagacctccgcgccccgcaacctccccttctacgagcggctcggcttcaccgtcaccgccgacgtcgaggtgcccgaaggaccgcgcacctggtgcatgacccgcaagcccggtgcctga

SEQ ID NO: 39326 - DNA, 2706 bp, synthetic construct
  source 1..2706: mol_type = other DNA
atggccttaccagtgaccgccttgctcctgccgctggccttgctgctccacgccgccaggccgctcgagggacagcctaaggccaatcctaccgtgacactgttccctccaagcagcgaagaactccaggccaacaaggccacacttgtgtgcctgatctccgacttctaccctggggctgtgacagtggcttggaaggccgatggatctcctgtgaaagccggcgtggaaaccaccaagccatccaagcagagcaacaacaaatacgccgccagctcctacctgagcctgacacctgagcagtggaagtcccacagatcctacagctgccaagtgacccacgaaggcagcaccgtggaaaagacagtggcccctacagagtgcagccccatcaagaccgatgtgattacaatggaccccaaggacaactgctccaaggacgccaacgataccctgctgctccagctgaccaacaccagcgcctactacatgtacttgttgctgctgctgaagtccgtggtgtacttcgccatcatcacatgctgcctgctgcggagaaccgccttctgctgcaacggcgagaagtctagggccaagcgatctggatctggagcaacaaacttctcactactcaaacaagcaggtgacgtggaggagaatcccgggcctactagcatggccttaccagtgaccgccttgctcctgccgctggccttgctgctccacgccgccaggccggacatccagatgacacagagccctagcagcctgtctgccagcgtgggagacagagtgaccatcacctgtagagccagccaggacatcaacacagccgtggcttggtatcagcagaagcctggcaaggcccctaagctgctgatctacagcgcctacttcctgtacagcggcgtgcccagcagattcagcggaagcagaagcggcaccgacttcaccctgacaatatccagcctccagcctgaggacttcgccacctactactgccagcagtacagcagatacagccccgtgacctttggacagggcaccaaggtggaaatcaagagaggcggaggcggaagtggaggcggaggatctggcggcggaggctctgaagttcagctggttgaaagtggtggcggcctggttcaacctggcggatctctgagactgagctgtgccgccagcggcttcaatgtgtacgcctctggaatgcactgggtccgacaggcccctggcaaaggacttgagtgggtcgccaaaatctaccccgacagcgactacacctattacgccgacagcgtgaagggcagattcaccatcagcgccgacaccagcaagaacaccgcctacctccagatgaactccctgagagccgaggacaccgccgtgtactactgtagcagagacagcagcttctactacgtgtacgctatggactactggggccagggcacactggtcacagtctcttctacgcgtgaggaggacctgaagaacgtgttcccacctgaggtggccgtgttcgagcctagcgaggccgagatcagccacacccagaaagccaccctcgtgtgcctggctaccggcttctaccccgaccatgtggaactgtcttggtgggtcaacggcaaagaggtgcacagcggcgtgtgtaccgacccccagccactgaaagaacagcccgccctgaacgacagccggtactgcctgagcagcagactgagagtgtccgccaccttctggcagaacccccggaaccacttcagatgccaggtgcagttctacggcctgagcgagaacgacgagtggacccaggacagagccaagcccgtgacccagatcgtgtctgccgaagcctggggcagagccgattgcggctttaccagcgagagctaccagcagggcgtgctgagcgccaccaacctgagcgtgatcggcttcagaatcctgctgctgaaagtggccggctttaacctgctgatgaccctgcggctgtggtccagccgcgccaagagaagcggatctggcgtgaagcagaccctgaatttcgacctgctgaagctggctggcgacgtggaatccaacccaggcccttctagaggccatatgaccgagtacaagcccacggtgcgcctcgccacccgcgacgacgtccccagggccgtacgcaccctcgccgccgcgttcgccgactaccccgccacgcgccacaccgtcgatccggaccgccacatcgagcgggtcaccgagctgcaagaactcttcctcacgcgcgtcgggctcgacatcggcaaggtgtgggtcgcggacgacggcgccgcggtggcggtctggaccacgccggagagcgtcgaagcgggggcggtgttcgccgagatcggcccgcgcatggccgagttgagcggttcccggctggccgcgcagcaacagatggaaggcctcctggcgccgcaccggcccaaggagcccgcgtggttcctggccaccgtcggcgtctcgcccgaccaccagggcaagggtctgggcagcgccgtcgtgctccccggagtggaggcggccgagcgcgccggggtgcccgccttcctggagacctccgcgccccgcaacctccccttctacgagcggctcggcttcaccgtcaccgccgacgtcgaggtgcccgaaggaccgcgcacctggtgcatgacccgcaagcccggtgcctga

SEQ ID NO: 39327 - DNA, 2697 bp, synthetic construct
  source 1..2697: mol_type = other DNA
atggccttaccagtgaccgccttgctcctgccgctggccttgctgctccacgccgccaggccgctcgaggaggcctctacaaagggaccctccgtgtttcctctggctcccagcagcaagtctacaagcggaggaacagccgctctgggctgcctggtcaaggattactttcccgagcctgtgaccgtgtcctggaatagcggagcactgacaagcggcgtgcacacctttccagccgtgctgcaaagcagcggcctgtactctctgagcagcgtggtcacagtgcctagctctagcctgggcacccagacctacatctgcaatgtgaaccacaagcctagcaacaccaaggtggacaagagagtggaacccaagagctgtcccatcaagaccgatgtgattacaatggaccccaaggacaactgctccaaggacgccaacgataccctgctgctccagctgaccaacaccagcgcctactacatgtacttgttgctgctgctgaagtccgtggtgtacttcgccatcatcacatgctgcctgctgcggagaaccgccttctgctgcaacggcgagaagtctagggccaagcgatctggatctggagcaacaaacttctcactactcaaacaagcaggtgacgtggaggagaatcccgggcctactagcatggccttaccagtgaccgccttgctcctgccgctggccttgctgctccacgccgccaggccggacatccagatgacacagagccctagcagcctgtctgccagcgtgggagacagagtgaccatcacctgtagagccagccaggacatcaacacagccgtggcttggtatcagcagaagcctggcaaggcccctaagctgctgatctacagcgcctacttcctgtacagcggcgtgcccagcagattcagcggaagcagaagcggcaccgacttcaccctgacaatatccagcctccagcctgaggacttcgccacctactactgccagcagtacagcagatacagccccgtgacctttggacagggcaccaaggtggaaatcaagagaggcggaggcggaagtggaggcggaggatctggcggcggaggctctgaagttcagctggttgaaagtggtggcggcctggttcaacctggcggatctctgagactgagctgtgccgccagcggcttcaatgtgtacgcctctggaatgcactgggtccgacaggcccctggcaaaggacttgagtgggtcgccaaaatctaccccgacagcgactacacctattacgccgacagcgtgaagggcagattcaccatcagcgccgacaccagcaagaacaccgcctacctccagatgaactccctgagagccgaggacaccgccgtgtactactgtagcagagacagcagcttctactacgtgtacgctatggactactggggccagggcacactggtcacagtctcttctacgcgtggacagcctaaggccaatcctaccgtgacactgttccctccaagcagcgaagaactccaggccaacaaggccacacttgtgtgcctgatctccgacttctaccctggggctgtgacagtggcttggaaggccgatggatctcctgtgaaagccggcgtggaaaccaccaagccatccaagcagagcaacaacaaatacgccgccagctcctacctgagcctgacacctgagcagtggaagtcccacagatcctacagctgccaagtgacccacgaaggcagcaccgtggaaaagacagtggcccctacagagtgcagcgaagtgaaaaccgactccaccgaccacgtgaagcccaaagagacagagaacaccaagcagcccagcaagagctgccacaagcccaaggccatcgtgcacaccgagaaagtgaacatgatgagcctgaccgtgctgggcctgcggatgctgttcgccaaaaccgtggccgtgaacttcctgctgaccgccaagctgttcttcctccgcgccaagagaagcggatctggcgtgaagcagaccctgaatttcgacctgctgaagctggctggcgacgtggaatccaacccaggcccttctagaggccatatgaccgagtacaagcccacggtgcgcctcgccacccgcgacgacgtccccagggccgtacgcaccctcgccgccgcgttcgccgactaccccgccacgcgccacaccgtcgatccggaccgccacatcgagcgggtcaccgagctgcaagaactcttcctcacgcgcgtcgggctcgacatcggcaaggtgtgggtcgcggacgacggcgccgcggtggcggtctggaccacgccggagagcgtcgaagcgggggcggtgttcgccgagatcggcccgcgcatggccgagttgagcggttcccggctggccgcgcagcaacagatggaaggcctcctggcgccgcaccggcccaaggagcccgcgtggttcctggccaccgtcggcgtctcgcccgaccaccagggcaagggtctgggcagcgccgtcgtgctccccggagtggaggcggccgagcgcgccggggtgcccgccttcctggagacctccgcgccccgcaacctccccttctacgagcggctcggcttcaccgtcaccgccgacgtcgaggtgcccgaaggaccgcgcacctggtgcatgacccgcaagcccggtgcctga

SEQ ID NO: 39328 - DNA, 2631 bp, synthetic construct
  source 1..2631: mol_type = other DNA
atggccttaccagtgaccgccttgctcctgccgctggccttgctgctccacgccgccaggccgctcgaggaggcctctacaaagggaccctccgtgtttcctctggctcccagcagcaagtctacaagcggaggaacagccgctctgggctgcctggtcaaggattactttcccgagcctgtgaccgtgtcctggaatagcggagcactgacaagcggcgtgcacacctttccagccgtgctgcaaagcagcggcctgtactctctgagcagcgtggtcacagtgcctagctctagcctgggcacccagacctacatctgcaatgtgaaccacaagcctagcaacaccaaggtggacaagagagtggaacccaagagctgtggcagagccgattgcggctttaccagcgagagctaccagcagggcgtgctgagcgccaccatcctgtacgagatcctgctgggcaaggccaccctgtacgccgtgctggtgtctgccctggtgctgatggctatggtcaagcggaaggacagccggggaagggccaagcgatctggatctggagcaacaaacttctcactactcaaacaagcaggtgacgtggaggagaatcccgggcctactagcatggccttaccagtgaccgccttgctcctgccgctggccttgctgctccacgccgccaggccggacatccagatgacacagagccctagcagcctgtctgccagcgtgggagacagagtgaccatcacctgtagagccagccaggacatcaacacagccgtggcttggtatcagcagaagcctggcaaggcccctaagctgctgatctacagcgcctacttcctgtacagcggcgtgcccagcagattcagcggaagcagaagcggcaccgacttcaccctgacaatatccagcctccagcctgaggacttcgccacctactactgccagcagtacagcagatacagccccgtgacctttggacagggcaccaaggtggaaatcaagagaggcggaggcggaagtggaggcggaggatctggcggcggaggctctgaagttcagctggttgaaagtggtggcggcctggttcaacctggcggatctctgagactgagctgtgccgccagcggcttcaatgtgtacgcctctggaatgcactgggtccgacaggcccctggcaaaggacttgagtgggtcgccaaaatctaccccgacagcgactacacctattacgccgacagcgtgaagggcagattcaccatcagcgccgacaccagcaagaacaccgcctacctccagatgaactccctgagagccgaggacaccgccgtgtactactgtagcagagacagcagcttctactacgtgtacgctatggactactggggccagggcacactggtcacagtctcttctacgcgtggacagcctaaggccaatcctaccgtgacactgttccctccaagcagcgaagaactccaggccaacaaggccacacttgtgtgcctgatctccgacttctaccctggggctgtgacagtggcttggaaggccgatggatctcctgtgaaagccggcgtggaaaccaccaagccatccaagcagagcaacaacaaatacgccgccagctcctacctgagcctgacacctgagcagtggaagtcccacagatcctacagctgccaagtgacccacgaaggcagcaccgtggaaaagacagtggcccctacagagtgcagcatccccgaggacacattcttcccaagccccgagagcagctgcgacgtgaagctggtggaaaagagcttcgagacagacaccaacctgaacttccagaacctgagcgtgatcggcttcagaatcctgctgctgaaagtggccggctttaacctgctgatgaccctgcggctgtggtccagccgcgccaagagaagcggatctggcgtgaagcagaccctgaatttcgacctgctgaagctggctggcgacgtggaatccaacccaggcccttctagaggccatatgaccgagtacaagcccacggtgcgcctcgccacccgcgacgacgtccccagggccgtacgcaccctcgccgccgcgttcgccgactaccccgccacgcgccacaccgtcgatccggaccgccacatcgagcgggtcaccgagctgcaagaactcttcctcacgcgcgtcgggctcgacatcggcaaggtgtgggtcgcggacgacggcgccgcggtggcggtctggaccacgccggagagcgtcgaagcgggggcggtgttcgccgagatcggcccgcgcatggccgagttgagcggttcccggctggccgcgcagcaacagatggaaggcctcctggcgccgcaccggcccaaggagcccgcgtggttcctggccaccgtcggcgtctcgcccgaccaccagggcaagggtctgggcagcgccgtcgtgctccccggagtggaggcggccgagcgcgccggggtgcccgccttcctggagacctccgcgccccgcaacctccccttctacgagcggctcggcttcaccgtcaccgccgacgtcgaggtgcccgaaggaccgcgcacctggtgcatgacccgcaagcccggtgcctga

SEQ ID NO: 39329 - DNA, 2631 bp, synthetic construct
  source 1..2631: mol_type = other DNA
atggccttaccagtgaccgccttgctcctgccgctggccttgctgctccacgccgccaggccgctcgaggaggcctctacaaagggaccctccgtgtttcctctggctcccagcagcaagtctacaagcggaggaacagccgctctgggctgcctggtcaaggattactttcccgagcctgtgaccgtgtcctggaatagcggagcactgacaagcggcgtgcacacctttccagccgtgctgcaaagcagcggcctgtactctctgagcagcgtggtcacagtgcctagctctagcctgggcacccagacctacatctgcaatgtgaaccacaagcctagcaacaccaaggtggacaagagagtggaacccaagagctgtatccccgaggacacattcttcccaagccccgagagcagctgcgacgtgaagctggtggaaaagagcttcgagacagacaccaacctgaacttccagaacctgagcgtgatcggcttcagaatcctgctgctgaaagtggccggctttaacctgctgatgaccctgcggctgtggtccagcagggccaagcgatctggatctggagcaacaaacttctcactactcaaacaagcaggtgacgtggaggagaatcccgggcctactagcatggccttaccagtgaccgccttgctcctgccgctggccttgctgctccacgccgccaggccggacatccagatgacacagagccctagcagcctgtctgccagcgtgggagacagagtgaccatcacctgtagagccagccaggacatcaacacagccgtggcttggtatcagcagaagcctggcaaggcccctaagctgctgatctacagcgcctacttcctgtacagcggcgtgcccagcagattcagcggaagcagaagcggcaccgacttcaccctgacaatatccagcctccagcctgaggacttcgccacctactactgccagcagtacagcagatacagccccgtgacctttggacagggcaccaaggtggaaatcaagagaggcggaggcggaagtggaggcggaggatctggcggcggaggctctgaagttcagctggttgaaagtggtggcggcctggttcaacctggcggatctctgagactgagctgtgccgccagcggcttcaatgtgtacgcctctggaatgcactgggtccgacaggcccctggcaaaggacttgagtgggtcgccaaaatctaccccgacagcgactacacctattacgccgacagcgtgaagggcagattcaccatcagcgccgacaccagcaagaacaccgcctacctccagatgaactccctgagagccgaggacaccgccgtgtactactgtagcagagacagcagcttctactacgtgtacgctatggactactggggccagggcacactggtcacagtctcttctacgcgtggacagcctaaggccaatcctaccgtgacactgttccctccaagcagcgaagaactccaggccaacaaggccacacttgtgtgcctgatctccgacttctaccctggggctgtgacagtggcttggaaggccgatggatctcctgtgaaagccggcgtggaaaccaccaagccatccaagcagagcaacaacaaatacgccgccagctcctacctgagcctgacacctgagcagtggaagtcccacagatcctacagctgccaagtgacccacgaaggcagcaccgtggaaaagacagtggcccctacagagtgcagcggcagagccgattgcggctttaccagcgagagctaccagcagggcgtgctgagcgccaccatcctgtacgagatcctgctgggcaaggccaccctgtacgccgtgctggtgtctgccctggtgctgatggctatggtcaagcggaaggacagccggggacgcgccaagagaagcggatctggcgtgaagcagaccctgaatttcgacctgctgaagctggctggcgacgtggaatccaacccaggcccttctagaggccatatgaccgagtacaagcccacggtgcgcctcgccacccgcgacgacgtccccagggccgtacgcaccctcgccgccgcgttcgccgactaccccgccacgcgccacaccgtcgatccggaccgccacatcgagcgggtcaccgagctgcaagaactcttcctcacgcgcgtcgggctcgacatcggcaaggtgtgggtcgcggacgacggcgccgcggtggcggtctggaccacgccggagagcgtcgaagcgggggcggtgttcgccgagatcggcccgcgcatggccgagttgagcggttcccggctggccgcgcagcaacagatggaaggcctcctggcgccgcaccggcccaaggagcccgcgtggttcctggccaccgtcggcgtctcgcccgaccaccagggcaagggtctgggcagcgccgtcgtgctccccggagtggaggcggccgagcgcgccggggtgcccgccttcctggagacctccgcgccccgcaacctccccttctacgagcggctcggcttcaccgtcaccgccgacgtcgaggtgcccgaaggaccgcgcacctggtgcatgacccgcaagcccggtgcctga

SEQ ID NO: 39330 - DNA, 1869 bp, synthetic construct
  source 1..1869: mol_type = other DNA
atggccttaccagtgaccgccttgctcctgccgctggccttgctgctccacgccgccaggccggacatccagatgacacagagccctagcagcctgtctgccagcgtgggagacagagtgaccatcacctgtagagccagccaggacatcaacacagccgtggcttggtatcagcagaagcctggcaaggcccctaagctgctgatctacagcgcctacttcctgtacagcggcgtgcccagcagattcagcggaagcagaagcggcaccgacttcaccctgacaatatccagcctccagcctgaggacttcgccacctactactgccagcagtacagcagatacagccccgtgacctttggacagggcaccaaggtggaaatcaagagactcgaggacctgaagaacgtgttcccacctgaggtggccgtgttcgagcctagcgaggccgagatcagccacacccagaaagccaccctcgtgtgcctggctaccggcttctaccccgaccatgtggaactgtcttggtgggtcaacggcaaagaggtgcacagcggcgtgtgtaccgacccccagccactgaaagaacagcccgccctgaacgacagccggtactgcctgagcagcagactgagagtgtccgccaccttctggcagaacccccggaaccacttcagatgccaggtgcagttctacggcctgagcgagaacgacgagtggacccaggacagagccaagcccgtgacccagatcgtgtctgccgaagcctggggcagagccgatagcggctttaccagcgagagctaccagcagggcgtgctgagcgccaccatcctgtacgagatcctgctgggcaaggccaccctgtacgccgtgctggtgtctgccctggtgctgatggctatggtcaagcggaaggacagccggggaagggccaagcgatctggatctggagcaacaaacttctcactactcaaacaagcaggtgacgtggaggagaatcccgggcctactagtatggactggatttggcgcatccttttccttgtcggcgctgctaccggcgcgcattccttcgaagaagttcagctggttgaaagtggtggcggcctggttcaacctggcggatctctgagactgagctgtgccgccagcggcttcaatgtgtacgcctctggaatgcactgggtccgacaggcccctggcaaaggacttgagtgggtcgccaaaatctaccccgacagcgactacacctattacgccgacagcgtgaagggcagattcaccatcagcgccgacaccagcaagaacaccgcctacctccagatgaactccctgagagccgaggacaccgccgtgtactactgtagcagagacagcagcttctactacgtgtacgctatggactactggggccagggcacactggtcacagtctcttctacgcgtatccagaaccctgatcctgccgtgtaccagctgcgggatagcaagagcagcgacaagagcgtgtgtctgttcaccgacttcgacagccagaccaacgtgtcccagagcaaggactccgacgtgtacatcaccgataagtgcgtgctggacatgcggagcatggacttcaagagcaactccgccgtggcctggtccaacaagtccgatttcgcctgcgccaacgccttcaacaacagcattatccccgaggacacattcttcccaagccccgagagcagcagcgacgtgaagctggtggaaaagagcttcgagacagacaccaacctgaacttccagaacctgagcgtgatcggcttcagaatcctgctgctgaaagtggccggctttaacctgctgatgaccctgcggctgtggtccagc

SEQ ID NO: 39331 - DNA, 2709 bp, synthetic construct
  source 1..2709: mol_type = other DNA
atggccttaccagtgaccgccttgctcctgccgctggccttgctgctccacgccgccaggccggaggttcagctgcttgagtctggcggaggactggttcaacctggcggaagcctgagactgtcttgtgccgcctctggcagaaccttcagcatgggctggtatagacaggcccctggcaagggcctcgaatttgtgtctgccatcacatacagcggcggcagcccttactacgccgattctgtgaagggcagattcaccatcagccgggacaacagcaagaacaccgtgtacctccagatgaacagcctgagagccgaggacaccgccgtgtactactgtgccgccaatccaacctacggcagcgactggaatgccgagaattggggccagggcacactggtcacagtgtctagtggtaccggcggaggcggatctggcggcggaggtagcggtggcggaggatctgaattcgacatccagatgacacagagccctagcagcctgtctgccagcgtgggagacagagtgaccatcacctgtagagccagccaggacatcaacacagccgtggcttggtatcagcagaagcctggcaaggcccctaagctgctgatctacagcgcctacttcctgtacagcggcgtgcccagcagattcagcggaagcagaagcggcaccgacttcaccctgacaatatccagcctccagcctgaggacttcgccacctactactgccagcagtacagcagatacagccccgtgacctttggacagggcaccaaggtggaaatcaagagactcgagatccagaaccctgatcctgccgtgtaccagctgcgggatagcaagagcagcgacaagagcgtgtgtctgttcaccgacttcgacagccagaccaacgtgtcccagagcaaggactccgacgtgtacatcaccgataagtgcgtgctggacatgcggagcatggacttcaagagcaactccgccgtggcctggtccaacaagtccgatttcgcctgcgccaacgccttcaacaacagcattatccccgaggacacattcttcccaagcagcgacgtgccctgcgacgtgaagctggtggaaaagagcttcgagacagacaccaacctgaacttccagaacctgagcgtgatcggcttcagaatcctgctgctgaaagtggccggctttaacctgctgatgaccctgcggctgtggtccagccgcgccaagagaagcggatctggcgtgaagcagaccctgaatttcgacctgctgaagctggctggcgacgtggaatccaacccaggccctactagtaccatggactggatttggcgcatccttttccttgtcggcgctgctaccggcacccattccgggcccgaagtgcaactggttgaatccggtggcggcctggtgcaacccggcggatctctcagacttagctgtgccgcctccggcagaaccttcacaatgggatggtacaggcaggctccagggaaagagagagagttcgtcgccgccatctctctgtctcccacactggcctactacgccgactctgtgaaaggccggttcaccatctccagagataatagcaagaacaccgtggtgctgcaaatgaactctctgagagccgaggatacagccctgtactattgtgccgctgaccggaagtccgtgatgagcatcagacccgattactggggacagggcacactggtcacagtgtctagtggatccggcggcggaggatctggcggaggcggatctgggggcggaggctctttcgaagaagttcagctggttgaaagtggtggcggcctggttcaacctggcggatctctgagactgagctgtgccgccagcggcttcaatgtgtacgcctctggaatgcactgggtccgacaggcccctggcaaaggacttgagtgggtcgccaaaatctaccccgacagcgactacacctattacgccgacagcgtgaagggcagattcaccatcagcgccgacaccagcaagaacaccgcctacctccagatgaactccctgagagccgaggacaccgccgtgtactactgtagcagagacagcagcttctactacgtgtacgctatggactactggggccagggcacactggtcacagtctcttctacgcgtgaggacctgaagaacgtgttcccacctgaggtggccgtgttcgagcctagcaaggccgagatcgcccacacccagaaagccaccctcgtgtgcctggctaccggcttctaccccgaccatgtggaactgtcttggtgggtcaacggcaaagaggtgcacagcggcgtgtgtaccgacccccagccactgaaagaacagcccgccctgaacgacagccggtactgcctgagcagcagactgagagtgtccgccaccttctggcagaacccccggaaccacttcagatgccaggtgcagttctacggcctgagcgagaacgacgagtggacccaggacagagccaagcccgtgacccagatcgtgtctgccgaagcctggggcagagccgattgcggcatcaccagcgccagctaccaccagggcgtgctgagcgccaccatcctgtacgagatcctgctgggcaaggccaccctgtacgccgtgctggtgtctgccctggtgctgatggctatggtcaagcggaaggacagccggggataa

SEQ ID NO: 39332 - DNA, 2709 bp, synthetic construct
  source 1..2709: mol_type = other DNA
atggccttaccagtgaccgccttgctcctgccgctggccttgctgctccacgccgccaggccggaagtgcagctggttgaatctggcggaggactggttcaggctggcggatctctgagactgtcttgtgccgccagcggcagaacctttagcatgggctggtttagacaggcccctggcaaagagagagagttcgtcgccgccatcacatactctggcggcagcccttactacgccgactctgtgaagggcagattcaccatcagccgggacaacgccaagaacaccgtgtacctccagatgaacagcctgaagcctgaggacaccgccgtgtactactgcgccgccaatccaacatacggcagcgactggaacgccgagaattggggccagggaacccaagtgacagtgtctagcggtaccggcggaggcggatctggcggcggaggtagcggtggcggaggatctgaattcgacatccagatgacacagagccctagcagcctgtctgccagcgtgggagacagagtgaccatcacctgtagagccagccaggacatcaacacagccgtggcttggtatcagcagaagcctggcaaggcccctaagctgctgatctacagcgcctacttcctgtacagcggcgtgcccagcagattcagcggaagcagaagcggcaccgacttcaccctgacaatatccagcctccagcctgaggacttcgccacctactactgccagcagtacagcagatacagccccgtgacctttggacagggcaccaaggtggaaatcaagagactcgagatccagaaccctgatcctgccgtgtaccagctgcgggatagcaagagcagcgacaagagcgtgtgtctgttcaccgacttcgacagccagaccaacgtgtcccagagcaaggactccgacgtgtacatcaccgataagtgcgtgctggacatgcggagcatggacttcaagagcaactccgccgtggcctggtccaacaagtccgatttcgcctgcgccaacgccttcaacaacagcattatccccgaggacacattcttcccaagcagcgacgtgccctgcgacgtgaagctggtggaaaagagcttcgagacagacaccaacctgaacttccagaacctgagcgtgatcggcttcagaatcctgctgctgaaagtggccggctttaacctgctgatgaccctgcggctgtggtccagccgcgccaagagaagcggatctggcgtgaagcagaccctgaatttcgacctgctgaagctggctggcgacgtggaatccaacccaggccctactagtaccatggactggatttggcgcatccttttccttgtcggcgctgctaccggcgcccattccgggcccgaagtgcaactggttgaatccggtggcggcctggtgcaacccggcggatctctcagacttagctgtgccgcctccggcagaaccttcacaatgggatggtacaggcaggctccagggaaagagagagagttcgtcgccgccatctctctgtctcccacactggcctactacgccgactctgtgaaaggccggttcaccatctccagagataatagcaagaacaccgtggtgctgcaaatgaactctctgagagccgaggatacagccctgtactattgtgccgctgaccggaagtccgtgatgagcatcagacccgattactggggacagggcacactggtcacagtgtctagtggatccggcggcggaggatctggcggaggcggatctgggggcggaggctctttcgaagaagttcagctggttgaaagtggtggcggcctggttcaacctggcggatctctgagactgagctgtgccgccagcggcttcaatgtgtacgcctctggaatgcactgggtccgacaggcccctggcaaaggacttgagtgggtcgccaaaatctaccccgacagcgactacacctattacgccgacagcgtgaagggcagattcaccatcagcgccgacaccagcaagaacaccgcctacctccagatgaactccctgagagccgaggacaccgccgtgtactactgtagcagagacagcagcttctactacgtgtacgctatggactactggggccagggcacactggtcacagtctcttctacgcgtgaggacctgaagaacgtgttcccacctgaggtggccgtgttcgagcctagcaaggccgagatcgcccacacccagaaagccaccctcgtgtgcctggctaccggcttctaccccgaccatgtggaactgtcttggtgggtcaacggcaaagaggtgcacagcggcgtgtgtaccgacccccagccactgaaagaacagcccgccctgaacgacagccggtactgcctgagcagcagactgagagtgtccgccaccttctggcagaacccccggaaccacttcagatgccaggtgcagttctacggcctgagcgagaacgacgagtggacccaggacagagccaagcccgtgacccagatcgtgtctgccgaagcctggggcagagccgattgcggcatcaccagcgccagctaccaccagggcgtgctgagcgccaccatcctgtacgagatcctgctgggcaaggccaccctgtacgccgtgctggtgtctgccctggtgctgatggctatggtcaagcggaaggacagccggggataa

SEQ ID NO: 39333 - DNA, 2700 bp, synthetic construct
  source 1..2700: mol_type = other DNA
atggccttaccagtgaccgccttgctcctgccgctggccttgctgctccacgccgccaggccggaagtgcagctggttgaatctggcggaggactggttcaggctggcggatctctgagactgtcttgtgccgccagcggcagaacctttagcatgggctggtttagacaggcccctggcaaagagagagagttcgtcgccgccatcacatactctggcggcagcccttactacgccgactctgtgaagggcagattcaccatcagccgggacaacgccaagaacaccgtgtacctccagatgaacagcctgaagcctgaggacaccgccgtgtactactgcgccgccaatccaacatacggcagcgactggaacgccgagaattggggccagggaacccaagtgacagtgtctagcggtaccggcggaggcggatctggcggcggaggtagcggtggcggaggatctgaattcgacatccagatgacacagagccctagcagcctgtctgccagcgtgggagacagagtgaccatcacctgtagagccagccaggacatcaacacagccgtggcttggtatcagcagaagcctggcaaggcccctaagctgctgatctacagcgcctacttcctgtacagcggcgtgcccagcagattcagcggaagcagaagcggcaccgacttcaccctgacaatatccagcctccagcctgaggacttcgccacctactactgccagcagtacagcagatacagccccgtgacctttggacagggcaccaaggtggaaatcaagagactcgaggacctgaagaacgtgttcccacctgaggtggccgtgttcgagcctagcgaggccgagatcagccacacccagaaagccaccctcgtgtgcctggctaccggcttctaccccgaccatgtggaactgtcttggtgggtcaacggcaaagaggtgcacagcggcgtgtgtaccgacccccagccactgaaagaacagcccgccctgaacgacagccggtactgcctgagcagcagactgagagtgtccgccaccttctggcagaacccccggaaccacttcagatgccaggtgcagttctacggcctgagcgagaacgacgagtggacccaggacagagccaagcccgtgacccagatcgtgtctgccgaagcctggggcagagccgattgcggctttaccagcgagagctaccagcagggcgtgctgagcgccaccatcctgtacgagatcctgctgggcaaggccaccctgtacgccgtgctggtgtctgccctggtgctgatggctatggtcaagcggaaggacagccggggaagggccaagcgatctggatctggagcaacaaacttctcactactcaaacaagcaggtgacgtggaggagaatcccgggcctactagtgccaccatggactggatttggcgcatccttttccttgtcggcgctgctaccggcgcccattccgggcccgaagtgcaactggttgaatccggtggcggcctggtgcaagcaggcggatctctcagacttagctgtgccgcctccggcagaaccttcacaatgggatggtttaggcaggctccagggaaagagagagagttcgtcgccgccatctctctgtctcccacactggcctactacgccgactctgtgaaaggccggttcaccatctccagagataatgccaagaacaccgtggtgctgcaaatgaactctctgaaacccgaggatacagccctgtactattgtgccgctgaccggaagtccgtgatgagcatcagacccgattactggggacagggcacacaagtcacagtgtcctctggatccggcggcggaggatctggcggaggcggatctgggggcggaggctctttcgaagaagttcagctggttgaaagtggtggcggcctggttcaacctggcggatctctgagactgagctgtgccgccagcggcttcaatgtgtacgcctctggaatgcactgggtccgacaggcccctggcaaaggacttgagtgggtcgccaaaatctaccccgacagcgactacacctattacgccgacagcgtgaagggcagattcaccatcagcgccgacaccagcaagaacaccgcctacctccagatgaactccctgagagccgaggacaccgccgtgtactactgtagcagagacagcagcttctactacgtgtacgctatggactactggggccagggcacactggtcacagtctcttctacgcgtatccagaaccctgatcctgccgtgtaccagctgcgggatagcaagagcagcgacaagagcgtgtgtctgttcaccgacttcgacagccagaccaacgtgtcccagagcaaggactccgacgtgtacatcaccgataagtgcgtgctggacatgcggagcatggacttcaagagcaactccgccgtggcctggtccaacaagtccgatttcgcctgcgccaacgccttcaacaacagcattatccccgaggacacattcttcccaagccccgagagcagctgcgacgtgaagctggtggaaaagagcttcgagacagacaccaacctgaacttccagaacctgagcgtgatcggcttcagaatcctgctgctgaaagtggccggctttaacctgctgatgaccctgcggctgtggtccagctaa

SEQ ID NO: 39334 - DNA, 2313 bp, synthetic construct
  source 1..2313: mol_type = other DNA
atggccttaccagtgaccgccttgctcctgccgctggccttgctgctccacgccgccaggccggaagtgcagctggttgaatctggcggaggactggttcagcctggcggatctctgagactgagctgtgaagccagcggcttcgccagcgacgattacatcatcggctggttcagacaggcccctggcaaagagagagagggcgtcagctgcatcagctctaagtacgccaacaccgtgtacaccgacagcgtgaagggcagattcagactgagcagaggcaccgccaagaataccgtgtacctccagatgagcgccctgaagcctgaggataccgccgtgtactactgcgctatggacagccgcagagtgacatgccctgagatcagcaccatgcaccggaacttcgattcttggggccagggcacactggtcacagtgtcatctggtaccggcggaggcggatctggcggcggaggtagcggtggcggaggatctgaattcgacatccagatgacacagagccctagcagcctgtctgccagcgtgggagacagagtgaccatcacctgtagagccagccaggacatcaacacagccgtggcttggtatcagcagaagcctggcaaggcccctaagctgctgatctacagcgcctacttcctgtacagcggcgtgcccagcagattcagcggaagcagaagcggcaccgacttcaccctgacaatatccagcctccagcctgaggacttcgccacctactactgccagcagtacagcagatacagccccgtgacctttggacagggcaccaaggtggaaatcaagagactcgaggacctgaagaacgtgttcccacctgaggtggccgtgttcgagcctagcaaggccgagatcgcccacacccagaaagccaccctcgtgtgcctggctaccggcttctaccccgaccatgtggaactgtcttggtgggtcaacggcaaagaggtgcacagcggcgtgtgtaccgacccccagccactgaaagaacagcccgccctgaacgacagccggtactgcctgagcagcagactgagagtgtccgccaccttctggcagaacccccggaaccacttcagatgccaggtgcagttctacggcctgagcgagaacgacgagtggacccaggacagagccaagcccgtgacccagatcgtgtctgccgaagcctggggcagagccgattgcggcatcaccagcgccagctaccaccagggcgtgctgagcgccaccatcctgtacgagatcctgctgggcaaggccaccctgtacgccgtgctggtgtctgccctggtgctgatggctatggtcaagcggaaggacagccggggaagggccaagcgatctggatctggagcaacaaacttctcactactcaaacaagcaggtgacgtggaggagaatcccgggcctactagtatggactggatttggcgcatccttttccttgtcggcgctgctaccggcgcgcattccttcgaagaagttcagctggttgaaagtggtggcggcctggttcaacctggcggatctctgagactgagctgtgccgccagcggcttcaatgtgtacgcctctggaatgcactgggtccgacaggcccctggcaaaggacttgagtgggtcgccaaaatctaccccgacagcgactacacctattacgccgacagcgtgaagggcagattcaccatcagcgccgacaccagcaagaacaccgcctacctccagatgaactccctgagagccgaggacaccgccgtgtactactgtagcagagacagcagcttctactacgtgtacgctatggactactggggccagggcacactggtcacagtctcttctacgcgtatccagaaccctgatcctgccgtgtaccagctgcgggatagcaagagcagcgacaagagcgtgtgtctgttcaccgacttcgacagccagaccaacgtgtcccagagcaaggactccgacgtgtacatcaccgataagtgcgtgctggacatgcggagcatggacttcaagagcaactccgccgtggcctggtccaacaagtccgatttcgcctgcgccaacgccttcaacaacagcattatccccgaggacacattcttcccaagcagcgacgtgccctgcgacgtgaagctggtggaaaagagcttcgagacagacaccaacctgaacttccagaacctgagcgtgatcggcttcagaatcctgctgctgaaagtggccggctttaacctgctgatgaccctgcggctgtggtccagctaa

SEQ ID NO: 39335 - DNA, 2286 bp, synthetic construct
  source 1..2286: mol_type = other DNA
atggccttaccagtgaccgccttgctcctgccgctggccttgctgctccacgccgccaggccggacatccagatgacacagagccctagcagcctgtctgccagcgtgggagacagagtgaccatcacctgtagagccagccaggacatcaacacagccgtggcttggtatcagcagaagcctggcaaggcccctaagctgctgatctacagcgcctacttcctgtacagcggcgtgcccagcagattcagcggaagcagaagcggcaccgacttcaccctgacaatatccagcctccagcctgaggacttcgccacctactactgccagcagtacagcagatacagccccgtgacctttggacagggcaccaaggtggaaatcaagagactcgaggacctgaagaacgtgttcccacctgaggtggccgtgttcgagcctagcgaggccgagatcagccacacccagaaagccaccctcgtgtgcctggctaccggcttctaccccgaccatgtggaactgtcttggtgggtcaacggcaaagaggtgcacagcggcgtgtgtaccgacccccagccactgaaagaacagcccgccctgaacgacagccggtactgcctgagcagcagactgagagtgtccgccaccttctggcagaacccccggaaccacttcagatgccaggtgcagttctacggcctgagcgagaacgacgagtggacccaggacagagccaagcccgtgacccagatcgtgtctgccgaagcctggggcagagccgattgcggctttaccagcgagagctaccagcagggcgtgctgagcgccaccatcctgtacgagatcctgctgggcaaggccaccctgtacgccgtgctggtgtctgccctggtgctgatggctatggtcaagcggaaggacagccggggaagggccaagcgatctggatctggagcaacaaacttctcactactcaaacaagcaggtgacgtggaggagaatcccgggcctactagtaccatggactggatttggcgcatccttttccttgtcggcgctgctaccggcgcccattccgggcccgaagtgcaactggttgaatccggtggcggcctggtgcaacccggcggatctctcagacttagctgtgccgcctccggcagaaccttcacaatgggatggtacaggcaggctccagggaaagagagagagttcgtcgccgccatctctctgtctcccacactggcctactacgccgactctgtgaaaggccggttcaccatctccagagataatagcaagaacaccgtggtgctgcaaatgaactctctgagagccgaggatacagccctgtactattgtgccgctgaccggaagtccgtgatgagcatcagacccgattactggggacagggcacactggtcacagtgtctagtggatccggcggcggaggatctggcggaggcggatctgggggcggaggctctttcgaagaagttcagctggttgaaagtggtggcggcctggttcaacctggcggatctctgagactgagctgtgccgccagcggcttcaatgtgtacgcctctggaatgcactgggtccgacaggcccctggcaaaggacttgagtgggtcgccaaaatctaccccgacagcgactacacctattacgccgacagcgtgaagggcagattcaccatcagcgccgacaccagcaagaacaccgcctacctccagatgaactccctgagagccgaggacaccgccgtgtactactgtagcagagacagcagcttctactacgtgtacgctatggactactggggccagggcacactggtcacagtctcttctacgcgtatccagaaccctgatcctgccgtgtaccagctgcgggatagcaagagcagcgacaagagcgtgtgtctgttcaccgacttcgacagccagaccaacgtgtcccagagcaaggactccgacgtgtacatcaccgataagtgcgtgctggacatgcggagcatggacttcaagagcaactccgccgtggcctggtccaacaagtccgatttcgcctgcgccaacgccttcaacaacagcattatccccgaggacacattcttcccaagccccgagagcagctgcgacgtgaagctggtggaaaagagcttcgagacagacaccaacctgaacttccagaacctgagcgtgatcggcttcagaatcctgctgctgaaagtggccggctttaacctgctgatgaccctgcggctgtggtccagctaa

SEQ ID NO: 39336 - DNA, 2304 bp, synthetic construct
  source 1..2304: mol_type = other DNA
atggccttaccagtgaccgccttgctcctgccgctggccttgctgctccacgccgccaggccggacatccagatgacacagagccctagcagcctgtctgccagcgtgggagacagagtgaccatcacctgtagagccagccaggacatcaacacagccgtggcttggtatcagcagaagcctggcaaggcccctaagctgctgatctacagcgcctacttcctgtacagcggcgtgcccagcagattcagcggaagcagaagcggcaccgacttcaccctgacaatatccagcctccagcctgaggacttcgccacctactactgccagcagtacagcagatacagccccgtgacctttggacagggcaccaaggtggaaatcaagagactcgaggacctgaagaacgtgttcccacctgaggtggccgtgttcgagcctagcgaggccgagatcagccacacccagaaagccaccctcgtgtgcctggctaccggcttctaccccgaccatgtggaactgtcttggtgggtcaacggcaaagaggtgcacagcggcgtgtgtaccgacccccagccactgaaagaacagcccgccctgaacgacagccggtactgcctgagcagcagactgagagtgtccgccaccttctggcagaacccccggaaccacttcagatgccaggtgcagttctacggcctgagcgagaacgacgagtggacccaggacagagccaagcccgtgacccagatcgtgtctgccgaagcctggggcagagccgattgcggctttaccagcgagagctaccagcagggcgtgctgagcgccaccatcctgtacgagatcctgctgggcaaggccaccctgtacgccgtgctggtgtctgccctggtgctgatggctatggtcaagcggaaggacagccggggaagggccaagcgatctggatctggagcaacaaacttctcactactcaaacaagcaggtgacgtggaggagaatcccgggcctactagtaccatggactggatttggcgcatccttttccttgtcggcgctgctaccggcgcccattccgggccccaggtgcagctggttgaatctggcggaggactggttcagcctggcggatctctgagactgtcttgtgccgccagcggcaacatcaacagcagaaactgcatgggctggttcagacaggcccctggcaagggaagagaaggcgtggcagctatcggccaagtgaccggcagaacctactacgtggacagcgtgaagggcagattcaccatcagcctggacaacagcaagaacaccctgtacctccagatgaacagcctgagagccgaggacaccgccgtgtactattgtgctgctgcccctggctgtctgctgtctgcacttagaagcgccgactacagaaactggggccagggcacactggtcaccgtttcttctggatccggcggcggaggatctggcggaggcggatctgggggcggaggctctttcgaagaagttcagctggttgaaagtggtggcggcctggttcaacctggcggatctctgagactgagctgtgccgccagcggcttcaatgtgtacgcctctggaatgcactgggtccgacaggcccctggcaaaggacttgagtgggtcgccaaaatctaccccgacagcgactacacctattacgccgacagcgtgaagggcagattcaccatcagcgccgacaccagcaagaacaccgcctacctccagatgaactccctgagagccgaggacaccgccgtgtactactgtagcagagacagcagcttctactacgtgtacgctatggactactggggccagggcacactggtcacagtctcttctacgcgtatccagaaccctgatcctgccgtgtaccagctgcgggatagcaagagcagcgacaagagcgtgtgtctgttcaccgacttcgacagccagaccaacgtgtcccagagcaaggactccgacgtgtacatcaccgataagtgcgtgctggacatgcggagcatggacttcaagagcaactccgccgtggcctggtccaacaagtccgatttcgcctgcgccaacgccttcaacaacagcattatccccgaggacacattcttcccaagccccgagagcagctgcgacgtgaagctggtggaaaagagcttcgagacagacaccaacctgaacttccagaacctgagcgtgatcggcttcagaatcctgctgctgaaagtggccggctttaacctgctgatgaccctgcggctgtggtccagc

SEQ ID NO: 39337 - DNA, 2307 bp, synthetic construct
  source 1..2307: mol_type = other DNA
atggccttaccagtgaccgccttgctcctgccgctggccttgctgctccacgccgccaggccggacatccagatgacacagagccctagcagcctgtctgccagcgtgggagacagagtgaccatcacctgtagagccagccaggacatcaacacagccgtggcttggtatcagcagaagcctggcaaggcccctaagctgctgatctacagcgcctacttcctgtacagcggcgtgcccagcagattcagcggaagcagaagcggcaccgacttcaccctgacaatatccagcctccagcctgaggacttcgccacctactactgccagcagtacagcagatacagccccgtgacctttggacagggcaccaaggtggaaatcaagagactcgaggacctgaagaacgtgttcccacctgaggtggccgtgttcgagcctagcgaggccgagatcagccacacccagaaagccaccctcgtgtgcctggctaccggcttctaccccgaccatgtggaactgtcttggtgggtcaacggcaaagaggtgcacagcggcgtgtgtaccgacccccagccactgaaagaacagcccgccctgaacgacagccggtactgcctgagcagcagactgagagtgtccgccaccttctggcagaacccccggaaccacttcagatgccaggtgcagttctacggcctgagcgagaacgacgagtggacccaggacagagccaagcccgtgacccagatcgtgtctgccgaagcctggggcagagccgattgcggctttaccagcgagagctaccagcagggcgtgctgagcgccaccatcctgtacgagatcctgctgggcaaggccaccctgtacgccgtgctggtgtctgccctggtgctgatggctatggtcaagcggaaggacagccggggaagggccaagcgatctggatctggagcaacaaacttctcactactcaaacaagcaggtgacgtggaggagaatcccgggcctactagtaccatggactggatttggcgcatccttttccttgtcggcgctgctaccggcgcccattccgggccccaggtgcagctggttgaatctggcggaggatctgttcaggctggcggctctctgagactgtcttgtggcgcttccggcaacatcagcagcagaaactgcatgggctggttcagacaggcccctggcaaagagagagaaggcgttgccgccatcggacaagtgaccggcagatcctactacgtggacagcgtgaagggcagattcaccatcagcctggacaacgccaagaacaccctgtacctccagatgaacacactgaagcccgaggacaccgccatgtactactgtgctgctgcccctggctgtctgctgtctgcacttagaagcgccgactacagaaactggggccagggaacccaagtgacagtgtctagtggatccggcggcggaggatctggcggaggcggatctgggggcggaggctctttcgaagaagttcagctggttgaaagtggtggcggcctggttcaacctggcggatctctgagactgagctgtgccgccagcggcttcaatgtgtacgcctctggaatgcactgggtccgacaggcccctggcaaaggacttgagtgggtcgccaaaatctaccccgacagcgactacacctattacgccgacagcgtgaagggcagattcaccatcagcgccgacaccagcaagaacaccgcctacctccagatgaactccctgagagccgaggacaccgccgtgtactactgtagcagagacagcagcttctactacgtgtacgctatggactactggggccagggcacactggtcacagtctcttctacgcgtatccagaaccctgatcctgccgtgtaccagctgcgggatagcaagagcagcgacaagagcgtgtgtctgttcaccgacttcgacagccagaccaacgtgtcccagagcaaggactccgacgtgtacatcaccgataagtgcgtgctggacatgcggagcatggacttcaagagcaactccgccgtggcctggtccaacaagtccgatttcgcctgcgccaacgccttcaacaacagcattatccccgaggacacattcttcccaagccccgagagcagctgcgacgtgaagctggtggaaaagagcttcgagacagacaccaacctgaacttccagaacctgagcgtgatcggcttcagaatcctgctgctgaaagtggccggctttaacctgctgatgaccctgcggctgtggtccagctaa

SEQ ID NO: 39338 - DNA, 2730 bp, synthetic construct
  source 1..2730: mol_type = other DNA
atggccttaccagtgaccgccttgctcctgccgctggccttgctgctccacgccgccaggccggaagtgcagctggttgaatctggcggaggactggttcaggctggcggatctctgagactgtcttgtgccgccagcggcagaacctttagcatgggctggtttagacaggcccctggcaaagagagagagttcgtcgccgccatcacatactctggcggcagcccttactacgccgactctgtgaagggcagattcaccatcagccgggacaacgccaagaacaccgtgtacctccagatgaacagcctgaagcctgaggacaccgccgtgtactactgcgccgccaatccaacatacggcagcgactggaacgccgagaattggggccagggaacccaagtgacagtgtctagcggtaccggcggaggcggatctggcggcggaggtagcggtggcggaggatctgaattcgacatccagatgacacagagccctagcagcctgtctgccagcgtgggagacagagtgaccatcacctgtagagccagccaggacatcaacacagccgtggcttggtatcagcagaagcctggcaaggcccctaagctgctgatctacagcgcctacttcctgtacagcggcgtgcccagcagattcagcggaagcagaagcggcaccgacttcaccctgacaatatccagcctccagcctgaggacttcgccacctactactgccagcagtacagcagatacagccccgtgacctttggacagggcaccaaggtggaaatcaagagactcgagatccagaaccctgatcctgccgtgtaccagctgcgggatagcaagagcagcgacaagagcgtgtgtctgttcaccgacttcgacagccagaccaacgtgtcccagagcaaggactccgacgtgtacatcaccgataagtgcgtgctggacatgcggagcatggacttcaagagcaactccgccgtggcctggtccaacaagtccgatttcgcctgcgccaacgccttcaacaacagcattatccccgaggacacattcttcccaagcagcgacgtgccctgcgacgtgaagctggtggaaaagagcttcgagacagacaccaacctgaacttccagaacctgagcgtgatcggcttcagaatcctgctgctgaaagtggccggctttaacctgctgatgaccctgcggctgtggtccagccgcgccaagagaagcggatctggcgtgaagcagaccctgaatttcgacctgctgaagctggctggcgacgtggaatccaacccaggccctactagtaccatggactggatttggcgcatccttttccttgtcggcgctgctaccggcgcccattccgggccccaggtgcagctggttgaatctggcggaggatctgttcaggctggcggctctctgagactgtcttgtggcgcttccggcaacatcagcagcagaaactgcatgggctggttcagacaggcccctggcaaagagagagaaggcgttgccgccatcggacaagtgaccggcagatcctactacgtggacagcgtgaagggcagattcaccatcagcctggacaacgccaagaacaccctgtacctccagatgaacacactgaagcccgaggacaccgccatgtactactgtgctgctgcccctggctgtctgctgtctgcacttagaagcgccgactacagaaactggggccagggaacccaagtgacagtgtctagtggatccggcggcggaggatctggcggaggcggatctgggggcggaggctctttcgaagaagttcagctggttgaaagtggtggcggcctggttcaacctggcggatctctgagactgagctgtgccgccagcggcttcaatgtgtacgcctctggaatgcactgggtccgacaggcccctggcaaaggacttgagtgggtcgccaaaatctaccccgacagcgactacacctattacgccgacagcgtgaagggcagattcaccatcagcgccgacaccagcaagaacaccgcctacctccagatgaactccctgagagccgaggacaccgccgtgtactactgtagcagagacagcagcttctactacgtgtacgctatggactactggggccagggcacactggtcacagtctcttctacgcgtgaggacctgaagaacgtgttcccacctgaggtggccgtgttcgagcctagcaaggccgagatcgcccacacccagaaagccaccctcgtgtgcctggctaccggcttctaccccgaccatgtggaactgtcttggtgggtcaacggcaaagaggtgcacagcggcgtgtgtaccgacccccagccactgaaagaacagcccgccctgaacgacagccggtactgcctgagcagcagactgagagtgtccgccaccttctggcagaacccccggaaccacttcagatgccaggtgcagttctacggcctgagcgagaacgacgagtggacccaggacagagccaagcccgtgacccagatcgtgtctgccgaagcctggggcagagccgattgcggcatcaccagcgccagctaccaccagggcgtgctgagcgccaccatcctgtacgagatcctgctgggcaaggccaccctgtacgccgtgctggtgtctgccctggtgctgatggctatggtcaagcggaaggacagccggggataa

SEQ ID NO: 39339 - DNA, 2721 bp, synthetic construct
  source 1..2721: mol_type = other DNA
atggccttaccagtgaccgccttgctcctgccgctggccttgctgctccacgccgccaggccgcaggtgcagctggttgaatctggcggaggatctgttcaggctggcggctctctgagactgtcttgtggcgcttccggcaacatcagcagcagaaactgcatgggctggttcagacaggcccctggcaaagagagagaaggcgttgccgccatcggacaagtgaccggcagatcctactacgtggacagcgtgaagggcagattcaccatcagcctggacaacgccaagaacaccctgtacctccagatgaacacactgaagcccgaggacaccgccatgtactactgtgctgctgcccctggctgtctgctgtctgcacttagaagcgccgactacagaaactggggccagggaacccaagtgacagtgtctagtggtaccggcggaggcggatctggcggcggaggtagcggtggcggaggatctgaattcgacatccagatgacacagagccctagcagcctgtctgccagcgtgggagacagagtgaccatcacctgtagagccagccaggacatcaacacagccgtggcttggtatcagcagaagcctggcaaggcccctaagctgctgatctacagcgcctacttcctgtacagcggcgtgcccagcagattcagcggaagcagaagcggcaccgacttcaccctgacaatatccagcctccagcctgaggacttcgccacctactactgccagcagtacagcagatacagccccgtgacctttggacagggcaccaaggtggaaatcaagagactcgaggacctgaagaacgtgttcccacctgaggtggccgtgttcgagcctagcgaggccgagatcagccacacccagaaagccaccctcgtgtgcctggctaccggcttctaccccgaccatgtggaactgtcttggtgggtcaacggcaaagaggtgcacagcggcgtgtgtaccgacccccagccactgaaagaacagcccgccctgaacgacagccggtactgcctgagcagcagactgagagtgtccgccaccttctggcagaacccccggaaccacttcagatgccaggtgcagttctacggcctgagcgagaacgacgagtggacccaggacagagccaagcccgtgacccagatcgtgtctgccgaagcctggggcagagccgattgcggctttaccagcgagagctaccagcagggcgtgctgagcgccaccatcctgtacgagatcctgctgggcaaggccaccctgtacgccgtgctggtgtctgccctggtgctgatggctatggtcaagcggaaggacagccggggaagggccaagcgatctggatctggagcaacaaacttctcactactcaaacaagcaggtgacgtggaggagaatcccgggcctactagtgccaccatggactggatttggcgcatccttttccttgtcggcgctgctaccggcgcccattccgggcccgaagtgcaactggttgaatccggtggcggcctggtgcaagcaggcggatctctcagacttagctgtgccgcctccggcagaaccttcacaatgggatggtttaggcaggctccagggaaagagagagagttcgtcgccgccatctctctgtctcccacactggcctactacgccgactctgtgaaaggccggttcaccatctccagagataatgccaagaacaccgtggtgctgcaaatgaactctctgaaacccgaggatacagccctgtactattgtgccgctgaccggaagtccgtgatgagcatcagacccgattactggggacagggcacacaagtcacagtgtcctctggatccggcggcggaggatctggcggaggcggatctgggggcggaggctctttcgaagaagttcagctggttgaaagtggtggcggcctggttcaacctggcggatctctgagactgagctgtgccgccagcggcttcaatgtgtacgcctctggaatgcactgggtccgacaggcccctggcaaaggacttgagtgggtcgccaaaatctaccccgacagcgactacacctattacgccgacagcgtgaagggcagattcaccatcagcgccgacaccagcaagaacaccgcctacctccagatgaactccctgagagccgaggacaccgccgtgtactactgtagcagagacagcagcttctactacgtgtacgctatggactactggggccagggcacactggtcacagtctcttctacgcgtatccagaaccctgatcctgccgtgtaccagctgcgggatagcaagagcagcgacaagagcgtgtgtctgttcaccgacttcgacagccagaccaacgtgtcccagagcaaggactccgacgtgtacatcaccgataagtgcgtgctggacatgcggagcatggacttcaagagcaactccgccgtggcctggtccaacaagtccgatttcgcctgcgccaacgccttcaacaacagcattatccccgaggacacattcttcccaagccccgagagcagctgcgacgtgaagctggtggaaaagagcttcgagacagacaccaacctgaacttccagaacctgagcgtgatcggcttcagaatcctgctgctgaaagtggccggctttaacctgctgatgaccctgcggctgtggtccagctaa

SEQ ID NO: 39340 - DNA, 2310 bp, synthetic construct
  source 1..2310: mol_type = other DNA
atggccttaccagtgaccgccttgctcctgccgctggccttgctgctccacgccgccaggccgcaggtgcagctggttgaatctggcggaggatctgttcaggctggcggctctctgagactgtcttgtggcgcttccggcaacatcagcagcagaaactgcatgggctggttcagacaggcccctggcaaagagagagaaggcgttgccgccatcggacaagtgaccggcagatcctactacgtggacagcgtgaagggcagattcaccatcagcctggacaacgccaagaacaccctgtacctccagatgaacacactgaagcccgaggacaccgccatgtactactgtgctgctgcccctggctgtctgctgtctgcacttagaagcgccgactacagaaactggggccagggaacccaagtgacagtgtctagtggtaccggcggaggcggatctggcggcggaggtagcggtggcggaggatctgaattcgacatccagatgacacagagccctagcagcctgtctgccagcgtgggagacagagtgaccatcacctgtagagccagccaggacatcaacacagccgtggcttggtatcagcagaagcctggcaaggcccctaagctgctgatctacagcgcctacttcctgtacagcggcgtgcccagcagattcagcggaagcagaagcggcaccgacttcaccctgacaatatccagcctccagcctgaggacttcgccacctactactgccagcagtacagcagatacagccccgtgacctttggacagggcaccaaggtggaaatcaagagactcgaggacctgaagaacgtgttcccacctgaggtggccgtgttcgagcctagcgaggccgagatcagccacacccagaaagccaccctcgtgtgcctggctaccggcttctaccccgaccatgtggaactgtcttggtgggtcaacggcaaagaggtgcacagcggcgtgtgtaccgacccccagccactgaaagaacagcccgccctgaacgacagccggtactgcctgagcagcagactgagagtgtccgccaccttctggcagaacccccggaaccacttcagatgccaggtgcagttctacggcctgagcgagaacgacgagtggacccaggacagagccaagcccgtgacccagatcgtgtctgccgaagcctggggcagagccgattgcggctttaccagcgagagctaccagcagggcgtgctgagcgccaccatcctgtacgagatcctgctgggcaaggccaccctgtacgccgtgctggtgtctgccctggtgctgatggctatggtcaagcggaaggacagccggggaagggccaagcgatctggatctggagcaacaaacttctcactactcaaacaagcaggtgacgtggaggagaatcccgggcctactagtgccaccatggactggatttggcgcatccttttccttgtcggcgctgctaccggcgcccattccttcgaagaagttcagctggttgaaagtggtggcggcctggttcaacctggcggatctctgagactgagctgtgccgccagcggcttcaatgtgtacgcctctggaatgcactgggtccgacaggcccctggcaaaggacttgagtgggtcgccaaaatctaccccgacagcgactacacctattacgccgacagcgtgaagggcagattcaccatcagcgccgacaccagcaagaacaccgcctacctccagatgaactccctgagagccgaggacaccgccgtgtactactgtagcagagacagcagcttctactacgtgtacgctatggactactggggccagggcacactggtcacagtctcttctacgcgtatccagaaccctgatcctgccgtgtaccagctgcgggatagcaagagcagcgacaagagcgtgtgtctgttcaccgacttcgacagccagaccaacgtgtcccagagcaaggactccgacgtgtacatcaccgataagtgcgtgctggacatgcggagcatggacttcaagagcaactccgccgtggcctggtccaacaagtccgatttcgcctgcgccaacgccttcaacaacagcattatccccgaggacacattcttcccaagccccgagagcagctgcgacgtgaagctggtggaaaagagcttcgagacagacaccaacctgaacttccagaacctgagcgtgatcggcttcagaatcctgctgctgaaagtggccggctttaacctgctgatgaccctgcggctgtggtccagctaa

SEQ ID NO: 39341 - DNA, 2310 bp, synthetic construct
  source 1..2310: mol_type = other DNA
atggccttaccagtgaccgccttgctcctgccgctggccttgctgctccacgccgccaggccgcaagttcagctggtggaaagcggtggtggcgttgtgcaacctggtggaagtctgaggctgagctgtgccgcttctggcctgagctttagcacctacactgtggcctggttcaggcaggctcccggaaagggtcttgaaggcgtggccgccattccttacaccagccagcacatggtgtacacagacagcgtcagaggccggttcaccatcagcagagacaactccaagaatacgctctatctccagatgaactctctgcgcgccgaagatacagccgtgtattactgcgccaccgacagacggcctggcacctctatgctggctatcaacggctacaacagatggggacagggaaccaccgtgaccgtgtcatctggtaccggcggaggcggatctggcggcggaggtagcggtggcggaggatctgaattcgacatccagatgacacagagccctagcagcctgtctgccagcgtgggagacagagtgaccatcacctgtagagccagccaggacatcaacacagccgtggcttggtatcagcagaagcctggcaaggcccctaagctgctgatctacagcgcctacttcctgtacagcggcgtgcccagcagattcagcggaagcagaagcggcaccgacttcaccctgacaatatccagcctccagcctgaggacttcgccacctactactgccagcagtacagcagatacagccccgtgacctttggacagggcaccaaggtggaaatcaagagactcgaggacctgaagaacgtgttcccacctgaggtggccgtgttcgagcctagcgaggccgagatcagccacacccagaaagccaccctcgtgtgcctggctaccggcttctaccccgaccatgtggaactgtcttggtgggtcaacggcaaagaggtgcacagcggcgtgtgtaccgacccccagccactgaaagaacagcccgccctgaacgacagccggtactgcctgagcagcagactgagagtgtccgccaccttctggcagaacccccggaaccacttcagatgccaggtgcagttctacggcctgagcgagaacgacgagtggacccaggacagagccaagcccgtgacccagatcgtgtctgccgaagcctggggcagagccgattgcggctttaccagcgagagctaccagcagggcgtgctgagcgccaccatcctgtacgagatcctgctgggcaaggccaccctgtacgccgtgctggtgtctgccctggtgctgatggctatggtcaagcggaaggacagccggggaagggccaagcgatctggatctggagcaacaaacttctcactactcaaacaagcaggtgacgtggaggagaatcccgggcctactagtgccaccatggactggatttggcgcatccttttccttgtcggcgctgctaccggcgcccattccttcgaagaagttcagctggttgaaagtggtggcggcctggttcaacctggcggatctctgagactgagctgtgccgccagcggcttcaatgtgtacgcctctggaatgcactgggtccgacaggcccctggcaaaggacttgagtgggtcgccaaaatctaccccgacagcgactacacctattacgccgacagcgtgaagggcagattcaccatcagcgccgacaccagcaagaacaccgcctacctccagatgaactccctgagagccgaggacaccgccgtgtactactgtagcagagacagcagcttctactacgtgtacgctatggactactggggccagggcacactggtcacagtctcttctacgcgtatccagaaccctgatcctgccgtgtaccagctgcgggatagcaagagcagcgacaagagcgtgtgtctgttcaccgacttcgacagccagaccaacgtgtcccagagcaaggactccgacgtgtacatcaccgataagtgcgtgctggacatgcggagcatggacttcaagagcaactccgccgtggcctggtccaacaagtccgatttcgcctgcgccaacgccttcaacaacagcattatccccgaggacacattcttcccaagccccgagagcagctgcgacgtgaagctggtggaaaagagcttcgagacagacaccaacctgaacttccagaacctgagcgtgatcggcttcagaatcctgctgctgaaagtggccggctttaacctgctgatgaccctgcggctgtggtccagctaa

SEQ ID NO: 39342 - DNA, 2307 bp, synthetic construct
  source 1..2307: mol_type = other DNA
atggccttaccagtgaccgccttgctcctgccgctggccttgctgctccacgccgccaggccggacatccagatgacacagagccctagcagcctgtctgccagcgtgggagacagagtgaccatcacctgtagagccagccaggacatcaacacagccgtggcttggtatcagcagaagcctggcaaggcccctaagctgctgatctacagcgcctacttcctgtacagcggcgtgcccagcagattcagcggaagcagaagcggcaccgacttcaccctgacaatatccagcctccagcctgaggacttcgccacctactactgccagcagtacagcagatacagccccgtgacctttggacagggcaccaaggtggaaatcaagagactcgaggacctgaagaacgtgttcccacctgaggtggccgtgttcgagcctagcgaggccgagatcagccacacccagaaagccaccctcgtgtgcctggctaccggcttctaccccgaccatgtggaactgtcttggtgggtcaacggcaaagaggtgcacagcggcgtgtgtaccgacccccagccactgaaagaacagcccgccctgaacgacagccggtactgcctgagcagcagactgagagtgtccgccaccttctggcagaacccccggaaccacttcagatgccaggtgcagttctacggcctgagcgagaacgacgagtggacccaggacagagccaagcccgtgacccagatcgtgtctgccgaagcctggggcagagccgattgcggctttaccagcgagagctaccagcagggcgtgctgagcgccaccatcctgtacgagatcctgctgggcaaggccaccctgtacgccgtgctggtgtctgccctggtgctgatggctatggtcaagcggaaggacagccggggaagggccaagcgatctggatctggagcaacaaacttctcactactcaaacaagcaggtgacgtggaggagaatcccgggcctactagtaccatggactggatttggcgcatccttttccttgtcggcgctgctaccggcgcccattccgggccccaagttcagctggtggaaagcggtggtggcgttgtgcaacctggtggaagtctgaggctgagctgtgccgcttctggcctgagctttagcacctacactgtggcctggttcaggcaggctcccggaaagggtcttgaaggcgtggccgccattccttacaccagccagcacatggtgtacacagacagcgtcagaggccggttcaccatcagcagagacaactccaagaatacgctctatctccagatgaactctctgcgcgccgaagatacagccgtgtattactgcgccaccgacagacggcctggcacctctatgctggctatcaacggctacaacagatggggacagggaaccaccgtgaccgtgtcatctggatccggcggcggaggatctggcggaggcggatctgggggcggaggctctttcgaagaagttcagctggttgaaagtggtggcggcctggttcaacctggcggatctctgagactgagctgtgccgccagcggcttcaatgtgtacgcctctggaatgcactgggtccgacaggcccctggcaaaggacttgagtgggtcgccaaaatctaccccgacagcgactacacctattacgccgacagcgtgaagggcagattcaccatcagcgccgacaccagcaagaacaccgcctacctccagatgaactccctgagagccgaggacaccgccgtgtactactgtagcagagacagcagcttctactacgtgtacgctatggactactggggccagggcacactggtcacagtctcttctacgcgtatccagaaccctgatcctgccgtgtaccagctgcgggatagcaagagcagcgacaagagcgtgtgtctgttcaccgacttcgacagccagaccaacgtgtcccagagcaaggactccgacgtgtacatcaccgataagtgcgtgctggacatgcggagcatggacttcaagagcaactccgccgtggcctggtccaacaagtccgatttcgcctgcgccaacgccttcaacaacagcattatccccgaggacacattcttcccaagccccgagagcagctgcgacgtgaagctggtggaaaagagcttcgagacagacaccaacctgaacttccagaacctgagcgtgatcggcttcagaatcctgctgctgaaagtggccggctttaacctgctgatgaccctgcggctgtggtccagctaa

SEQ ID NO: 39343 - DNA, 2313 bp, synthetic construct
  source 1..2313: mol_type = other DNA
atggccttaccagtgaccgccttgctcctgccgctggccttgctgctccacgccgccaggccggacatccagatgacacagagccctagcagcctgtctgccagcgtgggagacagagtgaccatcacctgtagagccagccaggacatcaacacagccgtggcttggtatcagcagaagcctggcaaggcccctaagctgctgatctacagcgcctacttcctgtacagcggcgtgcccagcagattcagcggaagcagaagcggcaccgacttcaccctgacaatatccagcctccagcctgaggacttcgccacctactactgccagcagtacagcagatacagccccgtgacctttggacagggcaccaaggtggaaatcaagagactcgaggacctgaagaacgtgttcccacctgaggtggccgtgttcgagcctagcgaggccgagatcagccacacccagaaagccaccctcgtgtgcctggctaccggcttctaccccgaccatgtggaactgtcttggtgggtcaacggcaaagaggtgcacagcggcgtgtgtaccgacccccagccactgaaagaacagcccgccctgaacgacagccggtactgcctgagcagcagactgagagtgtccgccaccttctggcagaacccccggaaccacttcagatgccaggtgcagttctacggcctgagcgagaacgacgagtggacccaggacagagccaagcccgtgacccagatcgtgtctgccgaagcctggggcagagccgattgcggctttaccagcgagagctaccagcagggcgtgctgagcgccaccatcctgtacgagatcctgctgggcaaggccaccctgtacgccgtgctggtgtctgccctggtgctgatggctatggtcaagcggaaggacagccggggaagggccaagcgatctggatctggagcaacaaacttctcactactcaaacaagcaggtgacgtggaggagaatcccgggcctactagtaccatggactggatttggcgcatccttttccttgtcggcgctgctaccggcgcccattccgggcccgaggtgcagctggttgaatctggcggaggatctgttcaggctggcggctctctgagactgtcttgtgccgccagcggctacacctacagcatcaactgcatgggctggttcagacaggcccctggcaaagagagagaaggcgttgccgccatctctaccggcggaggcagaaccgattaccgggattctgtgaagggcagattcaccatcagccaggacaacgccaagaacaccgtgtacctccagatgaacagcctgaagcctgaggacaccgccatgtactactgtgccggcaagaccacctatcctggctacggatgtggcctgggcagaagcgcctacaattattggggccagggcacccaagtgaccgtgtcatctggatccggcggcggaggatctggcggaggcggatctgggggcggaggctctttcgaagaagttcagctggttgaaagtggtggcggcctggttcaacctggcggatctctgagactgagctgtgccgccagcggcttcaatgtgtacgcctctggaatgcactgggtccgacaggcccctggcaaaggacttgagtgggtcgccaaaatctaccccgacagcgactacacctattacgccgacagcgtgaagggcagattcaccatcagcgccgacaccagcaagaacaccgcctacctccagatgaactccctgagagccgaggacaccgccgtgtactactgtagcagagacagcagcttctactacgtgtacgctatggactactggggccagggcacactggtcacagtctcttctacgcgtatccagaaccctgatcctgccgtgtaccagctgcgggatagcaagagcagcgacaagagcgtgtgtctgttcaccgacttcgacagccagaccaacgtgtcccagagcaaggactccgacgtgtacatcaccgataagtgcgtgctggacatgcggagcatggacttcaagagcaactccgccgtggcctggtccaacaagtccgatttcgcctgcgccaacgccttcaacaacagcattatccccgaggacacattcttcccaagccccgagagcagctgcgacgtgaagctggtggaaaagagcttcgagacagacaccaacctgaacttccagaacctgagcgtgatcggcttcagaatcctgctgctgaaagtggccggctttaacctgctgatgaccctgcggctgtggtccagctaa

SEQ ID NO: 39344 - DNA, 1869 bp, synthetic construct
  source 1..1869: mol_type = other DNA
atggccttaccagtgaccgccttgctcctgccgctggccttgctgctccacgccgccaggccggacatccagatgacacagagccctagcagcctgtctgccagcgtgggagacagagtgaccatcacctgtagagccagccaggacatcaacacagccgtggcttggtatcagcagaagcctggcaaggcccctaagctgctgatctacagcgcctacttcctgtacagcggcgtgcccagcagattcagcggaagcagaagcggcaccgacttcaccctgacaatatccagcctccagcctgaggacttcgccacctactactgccagcagtacagcagatacagccccgtgacctttggacagggcaccaaggtggaaatcaagagactcgaggacctgaagcacgtgttcccacctgaggtggccgtgttcgagcctagcgacgccgagatctggcacacccagaaagccaccctcgtgtgcctggctaccggcttctaccccgaccatgtggaactgtcttggtgggtcaacggcaaagaggtgcacagcggcgtgtctaccgacccccagccactgaaagaacagcccgccctgaacgacagccggtactgcctgagcagcagactgagagtgtccgccaccttctggcagaacccccggaaccacttcagatgccaggtgcagttctacggcctgagcgagaacgacgagtggacccaggacagagccaagcccgtgacccagatcgtgtctgccgaagcctggggcagagccgattgcggctttaccagcgagagctaccagcagggcgtgctgagcgccaccatcctgtacgagatcctgctgggcaaggccaccctgtacgccgtgctggtgtctgccctggtgctgatggctatggtcaagcggaaggacagccggggaagggccaagcgatctggatctggagcaacaaacttctcactactcaaacaagcaggtgacgtggaggagaatcccgggcctactagtatggactggatttggcgcatccttttccttgtcggcgctgctaccggcgcgcattccttcgaagaagttcagctggttgaaagtggtggcggcctggttcaacctggcggatctctgagactgagctgtgccgccagcggcttcaatgtgtacgcctctggaatgcactgggtccgacaggcccctggcaaaggacttgagtgggtcgccaaaatctaccccgacagcgactacacctattacgccgacagcgtgaagggcagattcaccatcagcgccgacaccagcaagaacaccgcctacctccagatgaactccctgagagccgaggacaccgccgtgtactactgtagcagagacagcagcttctactacgtgtacgctatggactactggggccagggcacactggtcacagtctcttctacgcgtatccagaaccctgatcctgccgtgtaccagctgcgggatagcaagagcagcgacaagagcgtgtgtctgttcaccgacttcgacagccagaccaacgtgtcccagagcaaggactccgacgtgtacatcaccgataagaccgtgctggacatgcggagcatggacttcaagagcaactccgccgtggcctggtccagcaagtccgatttcgcctgcgccaacgccttcaacaacagcattatccccgaggacacattcttcccaagccccgagatggcctgcgacgtgaagctggtggaaaagagcttcgagacagacaccaacctgaacttccagaacctgctcgtgatctggctgagaatcctgctgctgaaagtggccggctttaacctgctgatgaccctgcggctgtggtccagc

SEQ ID NO: 39345 - DNA, 1869 bp, synthetic construct
  source 1..1869: mol_type = other DNA
atggccttaccagtgaccgccttgctcctgccgctggccttgctgctccacgccgccaggccggacatccagatgacacagagccctagcagcctgtctgccagcgtgggagacagagtgaccatcacctgtagagccagccaggacatcaacacagccgtggcttggtatcagcagaagcctggcaaggcccctaagctgctgatctacagcgcctacttcctgtacagcggcgtgcccagcagattcagcggaagcagaagcggcaccgacttcaccctgacaatatccagcctccagcctgaggacttcgccacctactactgccagcagtacagcagatacagccccgtgacctttggacagggcaccaaggtggaaatcaagagactcgaggacctgaagcacgtgttcccacctgaggtggccgtgttcgagcctagcgacgccgagatctggcacacccagaaagccaccctcgtgtgcctggctaccggcttctaccccgaccatgtggaactgtcttggtgggtcaacggcaaagaggtgcacagcggcgtgtctaccgacccccagccactgaaagaacagcccgccctgaacgacagccggtactgcctgagcagcagactgagagtgtccgccaccttctggcagaacccccggaaccacttcagatgccaggtgcagttctacggcctgagcgagaacgacgagtggacccaggacagagccaagcccgtgacccagatcgtgtctgccgaagcctggggcagagccgattgcggctttaccagcgagagctaccagcagggcgtgctgagcgccaccatcctgtacgagatcctgctgggcaaggccaccctgtacgccgtgctggtgtctgccctggtgctgatggctatggtcaagcggaaggacagccggggaagggccaagcgatctggatctggagcaacaaacttctcactactcaaacaagcaggtgacgtggaggagaatcccgggcctactagtatggactggatttggcgcatccttttccttgtcggcgctgctaccggcgcgcattccttcgaagaagttcagctggttgaaagtggtggcggcctggttcaacctggcggatctctgagactgagctgtgccgccagcggcttcaatgtgtacgcctctggaatgcactgggtccgacaggcccctggcaaaggacttgagtgggtcgccaaaatctaccccgacagcgactacacctattacgccgacagcgtgaagggcagattcaccatcagcgccgacaccagcaagaacaccgcctacctccagatgaactccctgagagccgaggacaccgccgtgtactactgtagcagagacagcagcttctactacgtgtacgctatggactactggggccagggcacactggtcacagtctcttctacgcgtatccagaaccctgatcctgccgtgtaccagctgcgggatagcaagagcagcgacaagagcgtgtgtctgttcaccgacttcgacagccagaccaacgtgtcccagagcaaggactccgacgtgtacatcaccgataagaccgtgctggacatgcggagcatggacttcaagagcaactccgccgtggcctggtccaccaagtccgatttcgcctgcgccaacgccttcaacaacagcattatccccgaggacacattcttcccaagccccgaggtggtgtgcgacgtgaagctggtggaaaagagcttcgagacagacaccaacctgaacttccagaacctggtggtgatcggcgccagaatcctgctgctgaaagtggccggctttaacctgctgatgaccctgcggctgtggtccagc

SEQ ID NO: 39346 - DNA, 1869 bp, synthetic construct
  source 1..1869: mol_type = other DNA
atggccttaccagtgaccgccttgctcctgccgctggccttgctgctccacgccgccaggccggacatccagatgacacagagccctagcagcctgtctgccagcgtgggagacagagtgaccatcacctgtagagccagccaggacatcaacacagccgtggcttggtatcagcagaagcctggcaaggcccctaagctgctgatctacagcgcctacttcctgtacagcggcgtgcccagcagattcagcggaagcagaagcggcaccgacttcaccctgacaatatccagcctccagcctgaggacttcgccacctactactgccagcagtacagcagatacagccccgtgacctttggacagggcaccaaggtggaaatcaagagactcgaggacctgaagaacgtgttcccacctgaggtggccgtgttcgagcctagcaaggccgagatcagcagaacccagaaagccaccctcgtgtgcctggctaccggcttctaccctcctcatgtggaactgtcttggtgggtcaacggcaaagaggtgcacgacggcgtgtgtaccgacccccagccactgaaagaacagcccgccctgaacgacagccggtactgcctgagcagcagactgagagtgtccgccaccttctggcagaacccccggaaccacttcagatgccaggtgcagttctacggcctgagcgagaacgacgagtggacccaggacagagccaagcccgtgacccagatcgtgtctgccgaagcctggggcagagccgattgcggctttaccagcgagagctaccagcagggcgtgctgagcgccaccatcctgtacgagatcctgctgggcaaggccaccctgtacgccgtgctggtgtctgccctggtgctgatggctatggtcaagcggaaggacagccggggaagggccaagcgatctggatctggagcaacaaacttctcactactcaaacaagcaggtgacgtggaggagaatcccgggcctactagtatggactggatttggcgcatccttttccttgtcggcgctgctaccggcgcgcattccttcgaagaagttcagctggttgaaagtggtggcggcctggttcaacctggcggatctctgagactgagctgtgccgccagcggcttcaatgtgtacgcctctggaatgcactgggtccgacaggcccctggcaaaggacttgagtgggtcgccaaaatctaccccgacagcgactacacctattacgccgacagcgtgaagggcagattcaccatcagcgccgacaccagcaagaacaccgcctacctccagatgaactccctgagagccgaggacaccgccgtgtactactgtagcagagacagcagcttctactacgtgtacgctatggactactggggccagggcacactggtcacagtctcttctacgcgtatccagaaccctgatcctgccgtgtaccagctgcgggatagcaagagcagcgacaagttcgtgtgtctgttcaccgacttcgacagccagatcaacgtgtcccagagcaaggactccgacgtgtacatcaccgataagtgcgtgctggacatgcggagcatggacttcaagagcaactccgccgtggcctggtccaacaagtccgatttcacctgcgccaacgccttcaacaacagcattatccccgaggacacattcttcccaagccccgagagcagctgcgacgtgaagctggtggaaaagagcttcgagacagacaccaacctgaacttccagaacctgagcgtgatcggcttcagaatcctgctgctgaaagtggccggctttaacctgctgatgaccctgcggctgtggtccagc

SEQ ID NO: 39347 - DNA, 2295 bp, synthetic construct
  source 1..2295: mol_type = other DNA
atggccttaccagtgaccgccttgctcctgccgctggccttgctgctccacgccgccaggccggacatccagatgacacagagccctagcagcctgtctgccagcgtgggagacagagtgaccatcacctgtagagccagccaggacatcaacacagccgtggcttggtatcagcagaagcctggcaaggcccctaagctgctgatctacagcgcctacttcctgtacagcggcgtgcccagcagattcagcggaagcagaagcggcaccgacttcaccctgacaatatccagcctccagcctgaggacttcgccacctactactgccagcagtacagcagatacagccccgtgacctttggacagggcaccaaggtggaaatcaagagactcgaggacctgaagaacgtgttcccacctgaggtggccgtgttcgagcctagcgaggccgagatcagccacacccagaaagccaccctcgtgtgcctggctaccggcttctaccccgaccatgtggaactgtcttggtgggtcaacggcaaagaggtgcacagcggcgtgtgtaccgacccccagccactgaaagaacagcccgccctgaacgacagccggtactgcctgagcagcagactgagagtgtccgccaccttctggcagaacccccggaaccacttcagatgccaggtgcagttctacggcctgagcgagaacgacgagtggacccaggacagagccaagcccgtgacccagatcgtgtctgccgaagcctggggcagagccgattgcggctttaccagcgagagctaccagcagggcgtgctgagcgccaccatcctgtacgagatcctgctgggcaaggccaccctgtacgccgtgctggtgtctgccctggtgctgatggctatggtcaagcggaaggacagccggggaagggccaagcgatctggatctggagcaacaaacttctcactactcaaacaagcaggtgacgtggaggagaatcccgggcctactagtaccatggactggatttggcgcatccttttccttgtcggcgctgctaccggcgcccattccgggccccaggtgcagctccaagaaagcggacccggactggttaagccctctcagaccctgtctctgacctgcacagttagcggagccagcattaccacaggcgagtattattggaattggtttcggcagccaccaggcaaggggcttgagtggatgggtgctattgctgcctctggcagcaccacctactctcccagctttgagagcagaacctccatcagccgggacacctccaaaaaccagttctctctgaagctgtcctccgtgaccgctgctgacaccgccgtctattattgtggccggtctttcggcgtggcagctgtgaccacaggacagaacagaggccagggaacacttgtgaccgtgtcctctggatccggcggcggaggatctggcggaggcggatctgggggcggaggctctttcgaagaagttcagctggttgaaagtggtggcggcctggttcaacctggcggatctctgagactgagctgtgccgccagcggcttcaatgtgtacgcctctggaatgcactgggtccgacaggcccctggcaaaggacttgagtgggtcgccaaaatctaccccgacagcgactacacctattacgccgacagcgtgaagggcagattcaccatcagcgccgacaccagcaagaacaccgcctacctccagatgaactccctgagagccgaggacaccgccgtgtactactgtagcagagacagcagcttctactacgtgtacgctatggactactggggccagggcacactggtcacagtctcttctacgcgtatccagaaccctgatcctgccgtgtaccagctgcgggatagcaagagcagcgacaagagcgtgtgtctgttcaccgacttcgacagccagaccaacgtgtcccagagcaaggactccgacgtgtacatcaccgataagtgcgtgctggacatgcggagcatggacttcaagagcaactccgccgtggcctggtccaacaagtccgatttcgcctgcgccaacgccttcaacaacagcattatccccgaggacacattcttcccaagccccgagagcagctgcgacgtgaagctggtggaaaagagcttcgagacagacaccaacctgaacttccagaacctgagcgtgatcggcttcagaatcctgctgctgaaagtggccggctttaacctgctgatgaccctgcggctgtggtccagc

SEQ ID NO: 39348 - DNA, 2718 bp, synthetic construct
  source 1..2718: mol_type = other DNA
atggccttaccagtgaccgccttgctcctgccgctggccttgctgctccacgccgccaggccgcaggttcagctgcaagagtctggccctggcctggtcaagcctagccaaacactgagcctgacctgtaccgtgtctggcggctctatcaccaccggcgagttctactggaactggttcagacagcctcctggcaaaggactggaatggatgggagccattgccgccagcggcagcacaacatacagccctagcttcgagagccggaccagcatcagcagagacaccagcaagaatcagttcagcctgaagctgagcagcgtgacagccgccgatacagccgtgtattactgcggcagatcctttggagtggccgccgtgacaaccggccagaatagaggacagggcaccctggtcacagtgtctagcggtaccggcggaggcggatctggcggcggaggtagcggtggcggaggatctgaattcgacatccagatgacacagagccctagcagcctgtctgccagcgtgggagacagagtgaccatcacctgtagagccagccaggacatcaacacagccgtggcttggtatcagcagaagcctggcaaggcccctaagctgctgatctacagcgcctacttcctgtacagcggcgtgcccagcagattcagcggaagcagaagcggcaccgacttcaccctgacaatatccagcctccagcctgaggacttcgccacctactactgccagcagtacagcagatacagccccgtgacctttggacagggcaccaaggtggaaatcaagagactcgagatccagaaccctgatcctgccgtgtaccagctgcgggatagcaagagcagcgacaagagcgtgtgtctgttcaccgacttcgacagccagaccaacgtgtcccagagcaaggactccgacgtgtacatcaccgataagtgcgtgctggacatgcggagcatggacttcaagagcaactccgccgtggcctggtccaacaagtccgatttcgcctgcgccaacgccttcaacaacagcattatccccgaggacacattcttcccaagcagcgacgtgccctgcgacgtgaagctggtggaaaagagcttcgagacagacaccaacctgaacttccagaacctgagcgtgatcggcttcagaatcctgctgctgaaagtggccggctttaacctgctgatgaccctgcggctgtggtccagccgcgccaagagaagcggatctggcgtgaagcagaccctgaatttcgacctgctgaagctggctggcgacgtggaatccaacccaggccctactagtaccatggactggatttggcgcatccttttccttgtcggcgctgctaccggcgcccattccgggcccgaagtgcaactggttgaatccggtggcggcctggtgcaacccggcggatctctcagacttagctgtgccgcctccggcagaaccttcacaatgggatggtacaggcaggctccagggaaagagagagagttcgtcgccgccatctctctgtctcccacactggcctactacgccgactctgtgaaaggccggttcaccatctccagagataatagcaagaacaccgtggtgctgcaaatgaactctctgagagccgaggatacagccctgtactattgtgccgctgaccggaagtccgtgatgagcatcagacccgattactggggacagggcacactggtcacagtgtctagtggatccggcggcggaggatctggcggaggcggatctgggggcggaggctctttcgaagaagttcagctggttgaaagtggtggcggcctggttcaacctggcggatctctgagactgagctgtgccgccagcggcttcaatgtgtacgcctctggaatgcactgggtccgacaggcccctggcaaaggacttgagtgggtcgccaaaatctaccccgacagcgactacacctattacgccgacagcgtgaagggcagattcaccatcagcgccgacaccagcaagaacaccgcctacctccagatgaactccctgagagccgaggacaccgccgtgtactactgtagcagagacagcagcttctactacgtgtacgctatggactactggggccagggcacactggtcacagtctcttctacgcgtgaggacctgaagaacgtgttcccacctgaggtggccgtgttcgagcctagcaaggccgagatcgcccacacccagaaagccaccctcgtgtgcctggctaccggcttctaccccgaccatgtggaactgtcttggtgggtcaacggcaaagaggtgcacagcggcgtgtgtaccgacccccagccactgaaagaacagcccgccctgaacgacagccggtactgcctgagcagcagactgagagtgtccgccaccttctggcagaacccccggaaccacttcagatgccaggtgcagttctacggcctgagcgagaacgacgagtggacccaggacagagccaagcccgtgacccagatcgtgtctgccgaagcctggggcagagccgattgcggcatcaccagcgccagctaccaccagggcgtgctgagcgccaccatcctgtacgagatcctgctgggcaaggccaccctgtacgccgtgctggtgtctgccctggtgctgatggctatggtcaagcggaaggacagccgggga

SEQ ID NO: 39349 - DNA, 2307 bp, synthetic construct
  source 1..2307: mol_type = other DNA
atggccttaccagtgaccgccttgctcctgccgctggccttgctgctccacgccgccaggccgcaggttcagctgcaagagtctggccctggcctggtcaagcctagccaaacactgagcctgacctgtaccgtgtctggcggctctatcaccaccggcgagttctactggaactggttcagacagcctcctggcaaaggactggaatggatgggagccattgccgccagcggcagcacaacatacagccctagcttcgagagccggaccagcatcagcagagacaccagcaagaatcagttcagcctgaagctgagcagcgtgacagccgccgatacagccgtgtattactgcggcagatcctttggagtggccgccgtgacaaccggccagaatagaggacagggcaccctggtcacagtgtctagcggtaccggcggaggcggatctggcggcggaggtagcggtggcggaggatctgaattcgacatccagatgacacagagccctagcagcctgtctgccagcgtgggagacagagtgaccatcacctgtagagccagccaggacatcaacacagccgtggcttggtatcagcagaagcctggcaaggcccctaagctgctgatctacagcgcctacttcctgtacagcggcgtgcccagcagattcagcggaagcagaagcggcaccgacttcaccctgacaatatccagcctccagcctgaggacttcgccacctactactgccagcagtacagcagatacagccccgtgacctttggacagggcaccaaggtggaaatcaagagactcgagatccagaaccctgatcctgccgtgtaccagctgcgggatagcaagagcagcgacaagagcgtgtgtctgttcaccgacttcgacagccagaccaacgtgtcccagagcaaggactccgacgtgtacatcaccgataagtgcgtgctggacatgcggagcatggacttcaagagcaactccgccgtggcctggtccaacaagtccgatttcgcctgcgccaacgccttcaacaacagcattatccccgaggacacattcttcccaagcagcgacgtgccctgcgacgtgaagctggtggaaaagagcttcgagacagacaccaacctgaacttccagaacctgagcgtgatcggcttcagaatcctgctgctgaaagtggccggctttaacctgctgatgaccctgcggctgtggtccagccgcgccaagagaagcggatctggcgtgaagcagaccctgaatttcgacctgctgaagctggctggcgacgtggaatccaacccaggccctactagtaccatggactggatttggcgcatccttttccttgtcggcgctgctaccggcgcccattccttcgaagaagttcagctggttgaaagtggtggcggcctggttcaacctggcggatctctgagactgagctgtgccgccagcggcttcaatgtgtacgcctctggaatgcactgggtccgacaggcccctggcaaaggacttgagtgggtcgccaaaatctaccccgacagcgactacacctattacgccgacagcgtgaagggcagattcaccatcagcgccgacaccagcaagaacaccgcctacctccagatgaactccctgagagccgaggacaccgccgtgtactactgtagcagagacagcagcttctactacgtgtacgctatggactactggggccagggcacactggtcacagtctcttctacgcgtgaggacctgaagaacgtgttcccacctgaggtggccgtgttcgagcctagcaaggccgagatcgcccacacccagaaagccaccctcgtgtgcctggctaccggcttctaccccgaccatgtggaactgtcttggtgggtcaacggcaaagaggtgcacagcggcgtgtgtaccgacccccagccactgaaagaacagcccgccctgaacgacagccggtactgcctgagcagcagactgagagtgtccgccaccttctggcagaacccccggaaccacttcagatgccaggtgcagttctacggcctgagcgagaacgacgagtggacccaggacagagccaagcccgtgacccagatcgtgtctgccgaagcctggggcagagccgattgcggcatcaccagcgccagctaccaccagggcgtgctgagcgccaccatcctgtacgagatcctgctgggcaaggccaccctgtacgccgtgctggtgtctgccctggtgctgatggctatggtcaagcggaaggacagccgggga

SEQ ID NO: 39350 - DNA, 2706 bp, synthetic construct
  source 1..2706: mol_type = other DNA
atggccttaccagtgaccgccttgctcctgccgctggccttgctgctccacgccgccaggccggaagtgcagctggttgaatctggcggaggactggttcaggctggcggatctctgagactgtcttgtgccgccagcggcagaacctttagcatgggctggtttagacaggcccctggcaaagagagagagttcgtcgccgccatcacatactctggcggcagcccttactacgccgactctgtgaagggcagattcaccatcagccgggacaacgccaagaacaccgtgtacctccagatgaacagcctgaagcctgaggacaccgccgtgtactactgcgccgccaatccaacatacggcagcgactggaacgccgagaattggggccagggaacccaagtgacagtgtctagcggtaccggcggaggcggatctggcggcggaggtagcggtggcggaggatctgaattcgacatccagatgacacagagccctagcagcctgtctgccagcgtgggagacagagtgaccatcacctgtagagccagccaggacatcaacacagccgtggcttggtatcagcagaagcctggcaaggcccctaagctgctgatctacagcgcctacttcctgtacagcggcgtgcccagcagattcagcggaagcagaagcggcaccgacttcaccctgacaatatccagcctccagcctgaggacttcgccacctactactgccagcagtacagcagatacagccccgtgacctttggacagggcaccaaggtggaaatcaagagactcgaggacctgaagaacgtgttcccacctgaggtggccgtgttcgagcctagcgaggccgagatcagccacacccagaaagccaccctcgtgtgcctggctaccggcttctaccccgaccatgtggaactgtcttggtgggtcaacggcaaagaggtgcacagcggcgtgtgtaccgacccccagccactgaaagaacagcccgccctgaacgacagccggtactgcctgagcagcagactgagagtgtccgccaccttctggcagaacccccggaaccacttcagatgccaggtgcagttctacggcctgagcgagaacgacgagtggacccaggacagagccaagcccgtgacccagatcgtgtctgccgaagcctggggcagagccgattgcggctttaccagcgagagctaccagcagggcgtgctgagcgccaccatcctgtacgagatcctgctgggcaaggccaccctgtacgccgtgctggtgtctgccctggtgctgatggctatggtcaagcggaaggacagccggggaagggccaagcgatctggatctggagcaacaaacttctcactactcaaacaagcaggtgacgtggaggagaatcccgggcctactagtaccatggactggatttggcgcatccttttccttgtcggcgctgctaccggcgcccattccgggccccaggtgcagctccaagaaagcggacccggactggttaagccctctcagaccctgtctctgacctgcacagttagcggagccagcattaccacaggcgagtattattggaattggtttcggcagccaccaggcaaggggcttgagtggatgggtgctattgctgcctctggcagcaccacctactctcccagctttgagagcagaacctccatcagccgggacacctccaaaaaccagttctctctgaagctgtcctccgtgaccgctgctgacaccgccgtctattattgtggccggtctttcggcgtggcagctgtgaccacaggacagaacagaggccagggaacacttgtgaccgtgtcctctggatccggcggcggaggatctggcggaggcggatctgggggcggaggctctttcgaagaagttcagctggttgaaagtggtggcggcctggttcaacctggcggatctctgagactgagctgtgccgccagcggcttcaatgtgtacgcctctggaatgcactgggtccgacaggcccctggcaaaggacttgagtgggtcgccaaaatctaccccgacagcgactacacctattacgccgacagcgtgaagggcagattcaccatcagcgccgacaccagcaagaacaccgcctacctccagatgaactccctgagagccgaggacaccgccgtgtactactgtagcagagacagcagcttctactacgtgtacgctatggactactggggccagggcacactggtcacagtctcttctacgcgtatccagaaccctgatcctgccgtgtaccagctgcgggatagcaagagcagcgacaagagcgtgtgtctgttcaccgacttcgacagccagaccaacgtgtcccagagcaaggactccgacgtgtacatcaccgataagtgcgtgctggacatgcggagcatggacttcaagagcaactccgccgtggcctggtccaacaagtccgatttcgcctgcgccaacgccttcaacaacagcattatccccgaggacacattcttcccaagccccgagagcagctgcgacgtgaagctggtggaaaagagcttcgagacagacaccaacctgaacttccagaacctgagcgtgatcggcttcagaatcctgctgctgaaagtggccggctttaacctgctgatgaccctgcggctgtggtccagc

SEQ ID NO: 39351 - DNA, 2727 bp, synthetic construct
  source 1..2727: mol_type = other DNA
atggccttaccagtgaccgccttgctcctgccgctggccttgctgctccacgccgccaggccggaagtgcagctggttgaatctggcggaggactggttcaggctggcggatctctgagactgtcttgtgccgccagcggcagaacctttagcatgggctggtttagacaggcccctggcaaagagagagagttcgtcgccgccatcacatactctggcggcagcccttactacgccgactctgtgaagggcagattcaccatcagccgggacaacgccaagaacaccgtgtacctccagatgaacagcctgaagcctgaggacaccgccgtgtactactgcgccgccaatccaacatacggcagcgactggaacgccgagaattggggccagggaacccaagtgacagtgtctagcggtaccggcggaggcggatctggcggcggaggtagcggtggcggaggatctgaattcgacatccagatgacacagagccctagcagcctgtctgccagcgtgggagacagagtgaccatcacctgtagagccagccaggacatcaacacagccgtggcttggtatcagcagaagcctggcaaggcccctaagctgctgatctacagcgcctacttcctgtacagcggcgtgcccagcagattcagcggaagcagaagcggcaccgacttcaccctgacaatatccagcctccagcctgaggacttcgccacctactactgccagcagtacagcagatacagccccgtgacctttggacagggcaccaaggtggaaatcaagagactcgagatccagaaccctgatcctgccgtgtaccagctgcgggatagcaagagcagcgacaagagcgtgtgtctgttcaccgacttcgacagccagaccaacgtgtcccagagcaaggactccgacgtgtacatcaccgataagtgcgtgctggacatgcggagcatggacttcaagagcaactccgccgtggcctggtccaacaagtccgatttcgcctgcgccaacgccttcaacaacagcattatccccgaggacacattcttcccaagcagcgacgtgccctgcgacgtgaagctggtggaaaagagcttcgagacagacaccaacctgaacttccagaacctgagcgtgatcggcttcagaatcctgctgctgaaagtggccggctttaacctgctgatgaccctgcggctgtggtccagccgcgccaagagaagcggatctggcgtgaagcagaccctgaatttcgacctgctgaagctggctggcgacgtggaatccaacccaggccctactagtaccatggactggatttggcgcatccttttccttgtcggcgctgctaccggcgcccattccgggccccaggtgcagctggttgaatctggcggaggactggttcagcctggcggatctctgagactgtcttgtgccgccagcggcaacatcaacagcagaaactgcatgggctggttcagacaggcccctggcaagggaagagaaggcgtggcagctatcggccaagtgaccggcagaacctactacgtggacagcgtgaagggcagattcaccatcagcctggacaacagcaagaacaccctgtacctccagatgaacagcctgagagccgaggacaccgccgtgtactattgtgctgctgcccctggctgtctgctgtctgcacttagaagcgccgactacagaaactggggccagggcacactggtcaccgtttcttctggatccggcggcggaggatctggcggaggcggatctgggggcggaggctctttcgaagaagttcagctggttgaaagtggtggcggcctggttcaacctggcggatctctgagactgagctgtgccgccagcggcttcaatgtgtacgcctctggaatgcactgggtccgacaggcccctggcaaaggacttgagtgggtcgccaaaatctaccccgacagcgactacacctattacgccgacagcgtgaagggcagattcaccatcagcgccgacaccagcaagaacaccgcctacctccagatgaactccctgagagccgaggacaccgccgtgtactactgtagcagagacagcagcttctactacgtgtacgctatggactactggggccagggcacactggtcacagtctcttctacgcgtgaggacctgaagaacgtgttcccacctgaggtggccgtgttcgagcctagcaaggccgagatcgcccacacccagaaagccaccctcgtgtgcctggctaccggcttctaccccgaccatgtggaactgtcttggtgggtcaacggcaaagaggtgcacagcggcgtgtgtaccgacccccagccactgaaagaacagcccgccctgaacgacagccggtactgcctgagcagcagactgagagtgtccgccaccttctggcagaacccccggaaccacttcagatgccaggtgcagttctacggcctgagcgagaacgacgagtggacccaggacagagccaagcccgtgacccagatcgtgtctgccgaagcctggggcagagccgattgcggcatcaccagcgccagctaccaccagggcgtgctgagcgccaccatcctgtacgagatcctgctgggcaaggccaccctgtacgccgtgctggtgtctgccctggtgctgatggctatggtcaagcggaaggacagccgggga

SEQ ID NO: 39352 - DNA, 2715 bp, synthetic construct
  source 1..2715: mol_type = other DNA
atggccttaccagtgaccgccttgctcctgccgctggccttgctgctccacgccgccaggccggaagtgcagctggttgaatctggcggaggactggttcaggctggcggatctctgagactgtcttgtgccgccagcggcagaacctttagcatgggctggtttagacaggcccctggcaaagagagagagttcgtcgccgccatcacatactctggcggcagcccttactacgccgactctgtgaagggcagattcaccatcagccgggacaacgccaagaacaccgtgtacctccagatgaacagcctgaagcctgaggacaccgccgtgtactactgcgccgccaatccaacatacggcagcgactggaacgccgagaattggggccagggaacccaagtgacagtgtctagcggtaccggcggaggcggatctggcggcggaggtagcggtggcggaggatctgaattcgacatccagatgacacagagccctagcagcctgtctgccagcgtgggagacagagtgaccatcacctgtagagccagccaggacatcaacacagccgtggcttggtatcagcagaagcctggcaaggcccctaagctgctgatctacagcgcctacttcctgtacagcggcgtgcccagcagattcagcggaagcagaagcggcaccgacttcaccctgacaatatccagcctccagcctgaggacttcgccacctactactgccagcagtacagcagatacagccccgtgacctttggacagggcaccaaggtggaaatcaagagactcgaggacctgaagaacgtgttcccacctgaggtggccgtgttcgagcctagcgaggccgagatcagccacacccagaaagccaccctcgtgtgcctggctaccggcttctaccccgaccatgtggaactgtcttggtgggtcaacggcaaagaggtgcacagcggcgtgtgtaccgacccccagccactgaaagaacagcccgccctgaacgacagccggtactgcctgagcagcagactgagagtgtccgccaccttctggcagaacccccggaaccacttcagatgccaggtgcagttctacggcctgagcgagaacgacgagtggacccaggacagagccaagcccgtgacccagatcgtgtctgccgaagcctggggcagagccgattgcggctttaccagcgagagctaccagcagggcgtgctgagcgccaccatcctgtacgagatcctgctgggcaaggccaccctgtacgccgtgctggtgtctgccctggtgctgatggctatggtcaagcggaaggacagccggggaagggccaagcgatctggatctggagcaacaaacttctcactactcaaacaagcaggtgacgtggaggagaatcccgggcctactagtaccatggactggatttggcgcatccttttccttgtcggcgctgctaccggcgcccattccgggccccaggtgcagctggttgaatctggcggaggactggttcagcctggcggatctctgagactgtcttgtgccgccagcggcaacatcaacagcagaaactgcatgggctggttcagacaggcccctggcaagggaagagaaggcgtggcagctatcggccaagtgaccggcagaacctactacgtggacagcgtgaagggcagattcaccatcagcctggacaacagcaagaacaccctgtacctccagatgaacagcctgagagccgaggacaccgccgtgtactattgtgctgctgcccctggctgtctgctgtctgcacttagaagcgccgactacagaaactggggccagggcacactggtcaccgtttcttctggatccggcggcggaggatctggcggaggcggatctgggggcggaggctctttcgaagaagttcagctggttgaaagtggtggcggcctggttcaacctggcggatctctgagactgagctgtgccgccagcggcttcaatgtgtacgcctctggaatgcactgggtccgacaggcccctggcaaaggacttgagtgggtcgccaaaatctaccccgacagcgactacacctattacgccgacagcgtgaagggcagattcaccatcagcgccgacaccagcaagaacaccgcctacctccagatgaactccctgagagccgaggacaccgccgtgtactactgtagcagagacagcagcttctactacgtgtacgctatggactactggggccagggcacactggtcacagtctcttctacgcgtatccagaaccctgatcctgccgtgtaccagctgcgggatagcaagagcagcgacaagagcgtgtgtctgttcaccgacttcgacagccagaccaacgtgtcccagagcaaggactccgacgtgtacatcaccgataagtgcgtgctggacatgcggagcatggacttcaagagcaactccgccgtggcctggtccaacaagtccgatttcgcctgcgccaacgccttcaacaacagcattatccccgaggacacattcttcccaagccccgagagcagctgcgacgtgaagctggtggaaaagagcttcgagacagacaccaacctgaacttccagaacctgagcgtgatcggcttcagaatcctgctgctgaaagtggccggctttaacctgctgatgaccctgcggctgtggtccagc

SEQ ID NO: 39353 - DNA, 2715 bp, synthetic construct
  source 1..2715: mol_type = other DNA
atggccttaccagtgaccgccttgctcctgccgctggccttgctgctccacgccgccaggccggaagtgcaactggttgaatccggtggcggcctggtgcaagcaggcggatctctcagacttagctgtgccgcctccggcagaaccttcacaatgggatggtttaggcaggctccagggaaagagagagagttcgtcgccgccatctctctgtctcccacactggcctactacgccgactctgtgaaaggccggttcaccatctccagagataatgccaagaacaccgtggtgctgcaaatgaactctctgaaacccgaggatacagccctgtactattgtgccgctgaccggaagtccgtgatgagcatcagacccgattactggggacagggcacacaagtcacagtgtcctctggtaccggcggaggcggatctggcggcggaggtagcggtggcggaggatctgaattcgacatccagatgacacagagccctagcagcctgtctgccagcgtgggagacagagtgaccatcacctgtagagccagccaggacatcaacacagccgtggcttggtatcagcagaagcctggcaaggcccctaagctgctgatctacagcgcctacttcctgtacagcggcgtgcccagcagattcagcggaagcagaagcggcaccgacttcaccctgacaatatccagcctccagcctgaggacttcgccacctactactgccagcagtacagcagatacagccccgtgacctttggacagggcaccaaggtggaaatcaagagactcgaggacctgaagaacgtgttcccacctgaggtggccgtgttcgagcctagcgaggccgagatcagccacacccagaaagccaccctcgtgtgcctggctaccggcttctaccccgaccatgtggaactgtcttggtgggtcaacggcaaagaggtgcacagcggcgtgtgtaccgacccccagccactgaaagaacagcccgccctgaacgacagccggtactgcctgagcagcagactgagagtgtccgccaccttctggcagaacccccggaaccacttcagatgccaggtgcagttctacggcctgagcgagaacgacgagtggacccaggacagagccaagcccgtgacccagatcgtgtctgccgaagcctggggcagagccgattgcggctttaccagcgagagctaccagcagggcgtgctgagcgccaccatcctgtacgagatcctgctgggcaaggccaccctgtacgccgtgctggtgtctgccctggtgctgatggctatggtcaagcggaaggacagccggggaagggccaagcgatctggatctggagcaacaaacttctcactactcaaacaagcaggtgacgtggaggagaatcccgggcctactagtaccatggactggatttggcgcatccttttccttgtcggcgctgctaccggcgcccattccgggccccaggtgcagctggttgaatctggcggaggactggttcagcctggcggatctctgagactgtcttgtgccgccagcggcaacatcaacagcagaaactgcatgggctggttcagacaggcccctggcaagggaagagaaggcgtggcagctatcggccaagtgaccggcagaacctactacgtggacagcgtgaagggcagattcaccatcagcctggacaacagcaagaacaccctgtacctccagatgaacagcctgagagccgaggacaccgccgtgtactattgtgctgctgcccctggctgtctgctgtctgcacttagaagcgccgactacagaaactggggccagggcacactggtcaccgtttcttctggatccggcggcggaggatctggcggaggcggatctgggggcggaggctctttcgaagaagttcagctggttgaaagtggtggcggcctggttcaacctggcggatctctgagactgagctgtgccgccagcggcttcaatgtgtacgcctctggaatgcactgggtccgacaggcccctggcaaaggacttgagtgggtcgccaaaatctaccccgacagcgactacacctattacgccgacagcgtgaagggcagattcaccatcagcgccgacaccagcaagaacaccgcctacctccagatgaactccctgagagccgaggacaccgccgtgtactactgtagcagagacagcagcttctactacgtgtacgctatggactactggggccagggcacactggtcacagtctcttctacgcgtatccagaaccctgatcctgccgtgtaccagctgcgggatagcaagagcagcgacaagagcgtgtgtctgttcaccgacttcgacagccagaccaacgtgtcccagagcaaggactccgacgtgtacatcaccgataagtgcgtgctggacatgcggagcatggacttcaagagcaactccgccgtggcctggtccaacaagtccgatttcgcctgcgccaacgccttcaacaacagcattatccccgaggacacattcttcccaagccccgagagcagctgcgacgtgaagctggtggaaaagagcttcgagacagacaccaacctgaacttccagaacctgagcgtgatcggcttcagaatcctgctgctgaaagtggccggctttaacctgctgatgaccctgcggctgtggtccagc

SEQ ID NO: 39354 - DNA, 2727 bp, synthetic construct
  source 1..2727: mol_type = other DNA
atggccttaccagtgaccgccttgctcctgccgctggccttgctgctccacgccgccaggccgcaggttcagctgcaagagtctggccctggcctggtcaagcctagccaaacactgagcctgacctgtaccgtgtctggcggctctatcaccaccggcgagttctactggaactggttcagacagcctcctggcaaaggactggaatggatgggagccattgccgccagcggcagcacaacatacagccctagcttcgagagccggaccagcatcagcagagacaccagcaagaatcagttcagcctgaagctgagcagcgtgacagccgccgatacagccgtgtattactgcggcagatcctttggagtggccgccgtgacaaccggccagaatagaggacagggcaccctggtcacagtgtctagcggtaccggcggaggcggatctggcggcggaggtagcggtggcggaggatctgaattcgacatccagatgacacagagccctagcagcctgtctgccagcgtgggagacagagtgaccatcacctgtagagccagccaggacatcaacacagccgtggcttggtatcagcagaagcctggcaaggcccctaagctgctgatctacagcgcctacttcctgtacagcggcgtgcccagcagattcagcggaagcagaagcggcaccgacttcaccctgacaatatccagcctccagcctgaggacttcgccacctactactgccagcagtacagcagatacagccccgtgacctttggacagggcaccaaggtggaaatcaagagactcgaggacctgaagaacgtgttcccacctgaggtggccgtgttcgagcctagcgaggccgagatcagccacacccagaaagccaccctcgtgtgcctggctaccggcttctaccccgaccatgtggaactgtcttggtgggtcaacggcaaagaggtgcacagcggcgtgtgtaccgacccccagccactgaaagaacagcccgccctgaacgacagccggtactgcctgagcagcagactgagagtgtccgccaccttctggcagaacccccggaaccacttcagatgccaggtgcagttctacggcctgagcgagaacgacgagtggacccaggacagagccaagcccgtgacccagatcgtgtctgccgaagcctggggcagagccgattgcggctttaccagcgagagctaccagcagggcgtgctgagcgccaccatcctgtacgagatcctgctgggcaaggccaccctgtacgccgtgctggtgtctgccctggtgctgatggctatggtcaagcggaaggacagccggggaagggccaagcgatctggatctggagcaacaaacttctcactactcaaacaagcaggtgacgtggaggagaatcccgggcctactagtaccatggactggatttggcgcatccttttccttgtcggcgctgctaccggcgcccattccgggccccaggtgcagctggttgaatctggcggaggactggttcagcctggcggatctctgagactgtcttgtgccgccagcggcaacatcaacagcagaaactgcatgggctggttcagacaggcccctggcaagggaagagaaggcgtggcagctatcggccaagtgaccggcagaacctactacgtggacagcgtgaagggcagattcaccatcagcctggacaacagcaagaacaccctgtacctccagatgaacagcctgagagccgaggacaccgccgtgtactattgtgctgctgcccctggctgtctgctgtctgcacttagaagcgccgactacagaaactggggccagggcacactggtcaccgtttcttctggatccggcggcggaggatctggcggaggcggatctgggggcggaggctctttcgaagaagttcagctggttgaaagtggtggcggcctggttcaacctggcggatctctgagactgagctgtgccgccagcggcttcaatgtgtacgcctctggaatgcactgggtccgacaggcccctggcaaaggacttgagtgggtcgccaaaatctaccccgacagcgactacacctattacgccgacagcgtgaagggcagattcaccatcagcgccgacaccagcaagaacaccgcctacctccagatgaactccctgagagccgaggacaccgccgtgtactactgtagcagagacagcagcttctactacgtgtacgctatggactactggggccagggcacactggtcacagtctcttctacgcgtatccagaaccctgatcctgccgtgtaccagctgcgggatagcaagagcagcgacaagagcgtgtgtctgttcaccgacttcgacagccagaccaacgtgtcccagagcaaggactccgacgtgtacatcaccgataagtgcgtgctggacatgcggagcatggacttcaagagcaactccgccgtggcctggtccaacaagtccgatttcgcctgcgccaacgccttcaacaacagcattatccccgaggacacattcttcccaagccccgagagcagctgcgacgtgaagctggtggaaaagagcttcgagacagacaccaacctgaacttccagaacctgagcgtgatcggcttcagaatcctgctgctgaaagtggccggctttaacctgctgatgaccctgcggctgtggtccagc

SEQ ID NO: 39355 - DNA, 1464 bp, synthetic construct
  source 1..1464: mol_type = other DNA
atggccttaccagtgaccgccttgctcctgccgctggccttgctgctccacgccgccaggccggacatccagatgacacagagccctagcagcctgtctgccagcgtgggagacagagtgaccatcacctgtagagccagccaggacgtgaacacagccgtggcttggtatcagcagaagcctggcaaggcccctaagctgctgatctacagcgcctacttcctgtacagcggcgtgcccagcagattcagcggaagcagaagcggcaccgacttcaccctgacaatatccagcctccagcctgaggacttcgccacctactactgccagcagtacagcagatacagccccgtgacctttggacagggcaccaaggtggaaatcaagagaggcggaggcggaagtggaggcggaggatctggcggcggaggctctgaagttcagctggttgaaagtggtggcggcctggttcaacctggcggatctctgagactgagctgtgccgccagcggcttcaatgtgtacgcctctggaatgcactgggtccgacaggcccctggcaaaggacttgagtgggtcgccaaaatctaccccgacagcgactacacctattacgccgacagcgtgaagggcagattcaccatcagcgccgacaccagcaagaacaccgcctacctccagatgaactccctgagagccgaggacaccgccgtgtactactgtagcagagacagcagcttctactacgtgtacgctatggactactggggccagggcacactggtcacagtctcttctacgcgtaaaattgaagttatgtatcctcctccttacctagacaatgagaagagcaatggaaccattatccatgtgaaagggaaacacctttgtccaagtcccctatttcccggaccttctaagcccttttgggtgctggtggtggttgggggagtcctggcttgctatagcttgctagtaacagtggcctttattattttctgggtgaggagtaagaggagcaggctcctgcacagtgactacatgaacatgactccacgccgccccggacccacccgcaagcattaccagccctatgccccaccacgcgacttcgcagcctatcgctccagagtgaagttcagcaggagcgcagacgcccccgcgtaccagcagggccagaaccagctctataacgagctcaatctaggacgaagagaggagtacgatgttttggacaagagacgtggccgggaccctgagatggggggaaagccgagaaggaagaaccctcaggaaggcctgtacaatgaactgcagaaagataagatggcggaggcctacagtgagattgggatgaaaggcgagcgccggaggggcaaggggcacgatggcctttaccagggtctcagtacagccaccaaggacacctacgacgcccttcacatgcaggccctgccccctcgc

SEQ ID NO: 39356 - DNA, 1482 bp, synthetic construct
  source 1..1482: mol_type = other DNA
atggccttaccagtgaccgccttgctcctgccgctggccttgctgctccacgccgccaggccggacatccagatgacacagagccctagcagcctgtctgccagcgtgggagacagagtgaccatcacctgtagagccagccaggacgtgaacacagccgtggcttggtatcagcagaagcctggcaaggcccctaagctgctgatctacagcgcctacttcctgtacagcggcgtgcccagcagattcagcggaagcagaagcggcaccgacttcaccctgacaatatccagcctccagcctgaggacttcgccacctactactgccagcagtacagcagatacagccccgtgacctttggacagggcaccaaggtggaaatcaagagaggcggaggcggaagtggaggcggaggatctggcggcggaggctctgaagttcagctggttgaaagtggtggcggcctggttcaacctggcggatctctgagactgagctgtgccgccagcggcttcaatgtgtacgcctctggaatgcactgggtccgacaggcccctggcaaaggacttgagtgggtcgccaaaatctaccccgacagcgactacacctattacgccgacagcgtgaagggcagattcaccatcagcgccgacaccagcaagaacaccgcctacctccagatgaactccctgagagccgaggacaccgccgtgtactactgtagcagagacagcagcttctactacgtgtacgctatggactactggggccagggcacactggtcacagtctcttctacgcgtgcgaagcccaccacgacgccagcgccgcgaccaccaacaccggcgcccaccatcgcgtcgcagcccctgtccctgcgcccagaggcgtgccggccagcggcggggggcgcagtgcacacgagggggctggacttcgcctgtgacatctacatctgggcgcccttggccgggacttgtggggtccttctcctgtcactggttatcaccctttactgcaaacggggcagaaagaaactcctgtatatattcaaacaaccatttatgagaccagtacaaactactcaagaggaagatggctgtagctgccgatttccagaagaagaagaaggaggatgtgaactgagagtgaagttcagcaggagcgcagacgcccccgcgtaccagcagggccagaaccagctctataacgagctgaatctaggacgaagagaggagtacgatgttttggacaagagacgtggccgggaccctgagatggggggaaagccgagaaggaagaaccctcaggaaggcctgtacaatgaactgcagaaagataagatggcggaggcctacagtgagattgggatgaaaggcgagcgccggaggggcaaggggcacgatggcctttaccagggtctcagtacagccaccaaggacacctacgacgcccttcacatgcaggccctgccccctcgc

SEQ ID NO: 39357 - DNA, 1482 bp, synthetic construct
  source 1..1482: mol_type = other DNA
atggccttaccagtgaccgccttgctcctgccgctggccttgctgctccacgccgccaggccggaagttcagctggttgaaagtggtggcggcctggttcaacctggcggatctctgagactgagctgtgccgccagcggcttcaatgtgtacgcctctggaatgcactgggtccgacaggcccctggcaaaggacttgagtgggtcgccaaaatctaccccgacagcgactacacctattacgccgacagcgtgaagggcagattcaccatcagcgccgacaccagcaagaacaccgcctacctccagatgaactccctgagagccgaggacaccgccgtgtactactgtagcagagacagcagcttctactacgtgtacgctatggactactggggccagggcacactggtcacagtctcttctggcggaggcggaagtggaggcggaggatctggcggcggaggctctgacatccagatgacacagagccctagcagcctgtctgccagcgtgggagacagagtgaccatcacctgtagagccagccaggacgtgaacacagccgtggcttggtatcagcagaagcctggcaaggcccctaagctgctgatctacagcgcctacttcctgtacagcggcgtgcccagcagattcagcggaagcagaagcggcaccgacttcaccctgacaatatccagcctccagcctgaggacttcgccacctactactgccagcagtacagcagatacagccccgtgacctttggacagggcaccaaggtggaaatcaagagaacgcgtgcgaagcccaccacgacgccagcgccgcgaccaccaacaccggcgcccaccatcgcgtcgcagcccctgtccctgcgcccagaggcgtgccggccagcggcggggggcgcagtgcacacgagggggctggacttcgcctgtgacatctacatctgggcgcccttggccgggacttgtggggtccttctcctgtcactggttatcaccctttactgcaaacggggcagaaagaaactcctgtatatattcaaacaaccatttatgagaccagtacaaactactcaagaggaagatggctgtagctgccgatttccagaagaagaagaaggaggatgtgaactgagagtgaagttcagcaggagcgcagacgcccccgcgtaccagcagggccagaaccagctctataacgagctgaatctaggacgaagagaggagtacgatgttttggacaagagacgtggccgggaccctgagatggggggaaagccgagaaggaagaaccctcaggaaggcctgtacaatgaactgcagaaagataagatggcggaggcctacagtgagattgggatgaaaggcgagcgccggaggggcaaggggcacgatggcctttaccagggtctcagtacagccaccaaggacacctacgacgcccttcacatgcaggccctgccccctcgc

SEQ ID NO: 39358 - DNA, 1881 bp, synthetic construct
  source 1..1881: mol_type = other DNA
atggccttaccagtgaccgccttgctcctgccgctggccttgctgctccacgccgccaggccggacatccagatgacacagagccctagcagcctgtctgccagcgtgggagacagagtgaccatcacctgtagagccagccaggacgtgaacacagccgtggcttggtatcagcagaagcctggcaaggcccctaagctgctgatctacagcgcctacttcctgtacagcggcgtgcccagcagattcagcggaagcagaagcggcaccgacttcaccctgacaatatccagcctccagcctgaggacttcgccacctactactgccagcagtacagcagatacagccccgtgacctttggacagggcaccaaggtggaaatcaagagactcgagatccagaaccctgatcctgccgtgtaccagctgcgggatagcaagagcagcgacaagagcgtgtgtctgttcaccgacttcgacagccagaccaacgtgtcccagagcaaggactccgacgtgtacatcaccgataagtgcgtgctggacatgcggagcatggacttcaagagcaactccgccgtggcctggtccaacaagtccgatttcgcctgcgccaacgccttcaacaacagcattatccccgaggacacattcttcccaagcagcgacgtgccctgcgacgtgaagctggtggaaaagagcttcgagacagacaccaacctgaacttccagaacctgagcgtgatcggcttcagaatcctgctgctgaaagtggccggctttaacctgctgatgaccctgcggctgtggtccagccgcgccaagagaagcggatctggcgtgaagcagaccctgaatttcgacctgctgaagctggctggcgacgtggaatccaacccaggccctactagtatggactggatttggcgcatccttttccttgtcggcgctgctaccggcgcgcattccttcgaagaagttcagctggttgaaagtggtggcggcctggttcaacctggcggatctctgagactgagctgtgccgccagcggcttcaatgtgtacgcctctggaatgcactgggtccgacaggcccctggcaaaggacttgagtgggtcgccaaaatctaccccgacagcgactacacctattacgccgacagcgtgaagggcagattcaccatcagcgccgacaccagcaagaacaccgcctacctccagatgaactccctgagagccgaggacaccgccgtgtactactgtagcagagacagcagcttctactacgtgtacgctatggactactggggccagggcacactggtcacagtctcttctacgcgtgaggacctgaagaacgtgttcccacctgaggtggccgtgttcgagcctagcaaggccgagatcgcccacacccagaaagccaccctcgtgtgcctggctaccggcttctaccccgaccatgtggaactgtcttggtgggtcaacggcaaagaggtgcacagcggcgtgtgtaccgacccccagccactgaaagaacagcccgccctgaacgacagccggtactgcctgagcagcagactgagagtgtccgccaccttctggcagaacccccggaaccacttcagatgccaggtgcagttctacggcctgagcgagaacgacgagtggacccaggacagagccaagcccgtgacccagatcgtgtctgccgaagcctggggcagagccgattgcggcatcaccagcgccagctaccaccagggcgtgctgagcgccaccatcctgtacgagatcctgctgggcaaggccaccctgtacgccgtgctggtgtctgccctggtgctgatggctatggtcaagcggaaggacagccgggga

SEQ ID NO: 39359 - DNA, 1869 bp, synthetic construct
  source 1..1869: mol_type = other DNA
atggccttaccagtgaccgccttgctcctgccgctggccttgctgctccacgccgccaggccggacatccagatgacacagagccctagcagcctgtctgccagcgtgggagacagagtgaccatcacctgtagagccagccaggacgtgaacacagccgtggcttggtatcagcagaagcctggcaaggcccctaagctgctgatctacagcgcctacttcctgtacagcggcgtgcccagcagattcagcggaagcagaagcggcaccgacttcaccctgacaatatccagcctccagcctgaggacttcgccacctactactgccagcagtacagcagatacagccccgtgacctttggacagggcaccaaggtggaaatcaagagactcgaggacctgaagaacgtgttcccacctgaggtggccgtgttcgagcctagcaaggccgagatcgcccacacccagaaagccaccctcgtgtgcctggctaccggcttctaccccgaccatgtggaactgtcttggtgggtcaacggcaaagaggtgcacagcggcgtgtgtaccgacccccagccactgaaagaacagcccgccctgaacgacagccggtactgcctgagcagcagactgagagtgtccgccaccttctggcagaacccccggaaccacttcagatgccaggtgcagttctacggcctgagcgagaacgacgagtggacccaggacagagccaagcccgtgacccagatcgtgtctgccgaagcctggggcagagccgattgcggcatcaccagcgccagctaccaccagggcgtgctgagcgccaccatcctgtacgagatcctgctgggcaaggccaccctgtacgccgtgctggtgtctgccctggtgctgatggctatggtcaagcggaaggacagccggggaagggccaagcgatctggatctggagcaacaaacttctcactactcaaacaagcaggtgacgtggaggagaatcccgggcctactagtatggactggatttggcgcatccttttccttgtcggcgctgctaccggcgcgcattccttcgaagaagttcagctggttgaaagtggtggcggcctggttcaacctggcggatctctgagactgagctgtgccgccagcggcttcaatgtgtacgcctctggaatgcactgggtccgacaggcccctggcaaaggacttgagtgggtcgccaaaatctaccccgacagcgactacacctattacgccgacagcgtgaagggcagattcaccatcagcgccgacaccagcaagaacaccgcctacctccagatgaactccctgagagccgaggacaccgccgtgtactactgtagcagagacagcagcttctactacgtgtacgctatggactactggggccagggcacactggtcacagtctcttctacgcgtatccagaaccctgatcctgccgtgtaccagctgcgggatagcaagagcagcgacaagagcgtgtgtctgttcaccgacttcgacagccagaccaacgtgtcccagagcaaggactccgacgtgtacatcaccgataagtgcgtgctggacatgcggagcatggacttcaagagcaactccgccgtggcctggtccaacaagtccgatttcgcctgcgccaacgccttcaacaacagcattatccccgaggacacattcttcccaagcagcgacgtgccctgcgacgtgaagctggtggaaaagagcttcgagacagacaccaacctgaacttccagaacctgagcgtgatcggcttcagaatcctgctgctgaaagtggccggctttaacctgctgatgaccctgcggctgtggtccagc

SEQ ID NO: 39360 - DNA, 1869 bp, synthetic construct
  source 1..1869: mol_type = other DNA
atggccttaccagtgaccgccttgctcctgccgctggccttgctgctccacgccgccaggccggacatccagatgacacagagccctagcagcctgtctgccagcgtgggagacagagtgaccatcacctgtagagccagccaggacgtgaacacagccgtggcttggtatcagcagaagcctggcaaggcccctaagctgctgatctacagcgcctacttcctgtacagcggcgtgcccagcagattcagcggaagcagaagcggcaccgacttcaccctgacaatatccagcctccagcctgaggacttcgccacctactactgccagcagtacagcagatacagccccgtgacctttggacagggcaccaaggtggaaatcaagagactcgaggacctgaagaacgtgttcccacctgaggtggccgtgttcgagcctagcgaggccgagatcagccacacccagaaagccaccctcgtgtgcctggctaccggcttctaccccgaccatgtggaactgtcttggtgggtcaacggcaaagaggtgcacagcggcgtgtgtaccgacccccagccactgaaagaacagcccgccctgaacgacagccggtactgcctgagcagcagactgagagtgtccgccaccttctggcagaacccccggaaccacttcagatgccaggtgcagttctacggcctgagcgagaacgacgagtggacccaggacagagccaagcccgtgacccagatcgtgtctgccgaagcctggggcagagccgattgcggctttaccagcgagagctaccagcagggcgtgctgagcgccaccatcctgtacgagatcctgctgggcaaggccaccctgtacgccgtgctggtgtctgccctggtgctgatggctatggtcaagcggaaggacagccggggaagggccaagcgatctggatctggagcaacaaacttctcactactcaaacaagcaggtgacgtggaggagaatcccgggcctactagtatggactggatttggcgcatccttttccttgtcggcgctgctaccggcgcgcattccttcgaagaagttcagctggttgaaagtggtggcggcctggttcaacctggcggatctctgagactgagctgtgccgccagcggcttcaatgtgtacgcctctggaatgcactgggtccgacaggcccctggcaaaggacttgagtgggtcgccaaaatctaccccgacagcgactacacctattacgccgacagcgtgaagggcagattcaccatcagcgccgacaccagcaagaacaccgcctacctccagatgaactccctgagagccgaggacaccgccgtgtactactgtagcagagacagcagcttctactacgtgtacgctatggactactggggccagggcacactggtcacagtctcttctacgcgtatccagaaccctgatcctgccgtgtaccagctgcgggatagcaagagcagcgacaagagcgtgtgtctgttcaccgacttcgacagccagaccaacgtgtcccagagcaaggactccgacgtgtacatcaccgataagtgcgtgctggacatgcggagcatggacttcaagagcaactccgccgtggcctggtccaacaagtccgatttcgcctgcgccaacgccttcaacaacagcattatccccgaggacacattcttcccaagccccgagagcagctgcgacgtgaagctggtggaaaagagcttcgagacagacaccaacctgaacttccagaacctgagcgtgatcggcttcagaatcctgctgctgaaagtggccggctttaacctgctgatgaccctgcggctgtggtccagc

SEQ ID NO: 39361 - DNA, 1881 bp, synthetic construct
  source 1..1881: mol_type = other DNA
atggccttaccagtgaccgccttgctcctgccgctggccttgctgctccacgccgccaggccggacatccagatgacacagagccctagcagcctgtctgccagcgtgggagacagagtgaccatcacctgtagagccagccaggacgtgaacacagccgtggcttggtatcagcagaagcctggcaaggcccctaagctgctgatctacagcgcctacttcctgtacagcggcgtgcccagcagattcagcggaagcagaagcggcaccgacttcaccctgacaatatccagcctccagcctgaggacttcgccacctactactgccagcagtacagcagatacagccccgtgacctttggacagggcaccaaggtggaaatcaagagactcgagatccagaaccctgatcctgccgtgtaccagctgcgggatagcaagagcagcgacaagagcgtgtgtctgttcaccgacttcgacagccagaccaacgtgtcccagagcaaggactccgacgtgtacatcaccgataagtgcgtgctggacatgcggagcatggacttcaagagcaactccgccgtggcctggtccaacaagtccgatttcgcctgcgccaacgccttcaacaacagcattatccccgaggacacattcttcccaagccccgagagcagctgcgacgtgaagctggtggaaaagagcttcgagacagacaccaacctgaacttccagaacctgagcgtgatcggcttcagaatcctgctgctgaaagtggccggctttaacctgctgatgaccctgcggctgtggtccagccgcgccaagagaagcggatctggcgtgaagcagaccctgaatttcgacctgctgaagctggctggcgacgtggaatccaacccaggccctactagtatggactggatttggcgcatccttttccttgtcggcgctgctaccggcgcgcattccttcgaagaagttcagctggttgaaagtggtggcggcctggttcaacctggcggatctctgagactgagctgtgccgccagcggcttcaatgtgtacgcctctggaatgcactgggtccgacaggcccctggcaaaggacttgagtgggtcgccaaaatctaccccgacagcgactacacctattacgccgacagcgtgaagggcagattcaccatcagcgccgacaccagcaagaacaccgcctacctccagatgaactccctgagagccgaggacaccgccgtgtactactgtagcagagacagcagcttctactacgtgtacgctatggactactggggccagggcacactggtcacagtctcttctacgcgtgaggacctgaagaacgtgttcccacctgaggtggccgtgttcgagcctagcgaggccgagatcagccacacccagaaagccaccctcgtgtgcctggctaccggcttctaccccgaccatgtggaactgtcttggtgggtcaacggcaaagaggtgcacagcggcgtgtgtaccgacccccagccactgaaagaacagcccgccctgaacgacagccggtactgcctgagcagcagactgagagtgtccgccaccttctggcagaacccccggaaccacttcagatgccaggtgcagttctacggcctgagcgagaacgacgagtggacccaggacagagccaagcccgtgacccagatcgtgtctgccgaagcctggggcagagccgattgcggctttaccagcgagagctaccagcagggcgtgctgagcgccaccatcctgtacgagatcctgctgggcaaggccaccctgtacgccgtgctggtgtctgccctggtgctgatggctatggtcaagcggaaggacagccgggga

SEQ ID NO: 39362 - DNA, 1917 bp, synthetic construct
  source 1..1917: mol_type = other DNA
atggccttaccagtgaccgccttgctcctgccgctggccttgctgctccacgccgccaggccgctcgaggaggacctgaagaacgtgttcccacctgaggtggccgtgttcgagcctagcaaggccgagatcgcccacacccagaaagccaccctcgtgtgcctggctaccggcttctaccccgaccatgtggaactgtcttggtgggtcaacggcaaagaggtgcacagcggcgtgtgtaccgacccccagccactgaaagaacagcccgccctgaacgacagccggtactgcctgagcagcagactgagagtgtccgccaccttctggcagaacccccggaaccacttcagatgccaggtgcagttctacggcctgagcgagaacgacgagtggacccaggacagagccaagcccgtgacccagatcgtgtctgccgaagcctggggcagagccgattgcggcatcaccagcgccagctaccaccagggcgtgctgagcgccaccatcctgtacgagatcctgctgggcaaggccaccctgtacgccgtgctggtgtctgccctggtgctgatggctatggtcaagcggaaggacagccggggaagggccaagcgatctggatctggagcaacaaacttctcactactcaaacaagcaggtgacgtggaggagaatcccgggcctactagcatggccttaccagtgaccgccttgctcctgccgctggccttgctgctccacgccgccaggccggacatccagatgacacagagccctagcagcctgtctgccagcgtgggagacagagtgaccatcacctgtagagccagccaggacgtgaacacagccgtggcttggtatcagcagaagcctggcaaggcccctaagctgctgatctacagcgcctacttcctgtacagcggcgtgcccagcagattcagcggaagcagaagcggcaccgacttcaccctgacaatatccagcctccagcctgaggacttcgccacctactactgccagcagtacagcagatacagccccgtgacctttggacagggcaccaaggtggaaatcaagagaggcggaggcggaagtggaggcggaggatctggcggcggaggctctgaagttcagctggttgaaagtggtggcggcctggttcaacctggcggatctctgagactgagctgtgccgccagcggcttcaatgtgtacgcctctggaatgcactgggtccgacaggcccctggcaaaggacttgagtgggtcgccaaaatctaccccgacagcgactacacctattacgccgacagcgtgaagggcagattcaccatcagcgccgacaccagcaagaacaccgcctacctccagatgaactccctgagagccgaggacaccgccgtgtactactgtagcagagacagcagcttctactacgtgtacgctatggactactggggccagggcacactggtcacagtctcttctacgcgtatccagaaccctgatcctgccgtgtaccagctgcgggatagcaagagcagcgacaagagcgtgtgtctgttcaccgacttcgacagccagaccaacgtgtcccagagcaaggactccgacgtgtacatcaccgataagtgcgtgctggacatgcggagcatggacttcaagagcaactccgccgtggcctggtccaacaagtccgatttcgcctgcgccaacgccttcaacaacagcattatccccgaggacacattcttcccaagcagcgacgtgccctgcgacgtgaagctggtggaaaagagcttcgagacagacaccaacctgaacttccagaacctgagcgtgatcggcttcagaatcctgctgctgaaagtggccggctttaacctgctgatgaccctgcggctgtggtccagc

SEQ ID NO: 39363 - DNA, 1938 bp, synthetic construct
  source 1..1938: mol_type = other DNA
atggccttaccagtgaccgccttgctcctgccgctggccttgctgctccacgccgccaggccgctcgagggctccggcgatcgccctgatcctgccgtgtaccagctgcgggatagcaagagcagcgacaagagcgtgtgtctgttcaccgacttcgacagccagaccaacgtgtcccagagcaaggactccgacgtgtacatcaccgataagtgcgtgctggacatgcggagcatggacttcaagagcaactccgccgtggcctggtccaacaagtccgatttcgcctgcgccaacgccttcaacaacagcattatccccgaggacacattcttcccaagccccgagagcagctgcgacgtgaagctggtggaaaagagcttcgagacagacaccaacctgaacttccagaacctgagcgtgatcggcttcagaatcctgctgctgaaagtggccggctttaacctgctgatgaccctgcggctgtggtccagctctagtcgcgccaagagaagcggatctggcgtgaagcagaccctgaatttcgacctgctgaagctggctggcgacgtggaatccaacccaggccccactagcatggccttaccagtgaccgccttgctcctgccgctggccttgctgctccacgccgccaggccggacatccagatgacacagagccctagcagcctgtctgccagcgtgggagacagagtgaccatcacctgtagagccagccaggacgtgaacacagccgtggcttggtatcagcagaagcctggcaaggcccctaagctgctgatctacagcgcctacttcctgtacagcggcgtgcccagcagattcagcggaagcagaagcggcaccgacttcaccctgacaatatccagcctccagcctgaggacttcgccacctactactgccagcagtacagcagatacagccccgtgacctttggacagggcaccaaggtggaaatcaagagaggcggaggcggaagtggaggcggaggatctggcggcggaggctctgaagttcagctggttgaaagtggtggcggcctggttcaacctggcggatctctgagactgagctgtgccgccagcggcttcaatgtgtacgcctctggaatgcactgggtccgacaggcccctggcaaaggacttgagtgggtcgccaaaatctaccccgacagcgactacacctattacgccgacagcgtgaagggcagattcaccatcagcgccgacaccagcaagaacaccgcctacctccagatgaactccctgagagccgaggacaccgccgtgtactactgtagcagagacagcagcttctactacgtgtacgctatggactactggggccagggcacactggtcacagtctcttctacgcgtgaggacctgaagaacgtgttcccacctgaggtggccgtgttcgagcctagcgaggccgagatcagccacacccagaaagccaccctcgtgtgcctggctaccggcttctaccccgaccatgtggaactgtcttggtgggtcaacggcaaagaggtgcacagcggcgtgtgtaccgacccccagccactgaaagaacagcccgccctgaacgacagccggtactgcctgagcagcagactgagagtgtccgccaccttctggcagaacccccggaaccacttcagatgccaggtgcagttctacggcctgagcgagaacgacgagtggacccaggacagagccaagcccgtgacccagatcgtgtctgccgaagcctggggcagagccgattgcggctttaccagcgagagctaccagcagggcgtgctgagcgccaccatcctgtacgagatcctgctgggcaaggccaccctgtacgccgtgctggtgtctgccctggtgctgatggctatggtcaagcggaaggacagccgggga

SEQ ID NO: 39364 - DNA, 1869 bp, synthetic construct
  source 1..1869: mol_type = other DNA
atggccttaccagtgaccgccttgctcctgccgctggccttgctgctccacgccgccaggccggacatccagatgacacagagccctagcagcctgtctgccagcgtgggagacagagtgaccatcacctgtagagccagccaggacgtgaacacagccgtggcttggtatcagcagaagcctggcaaggcccctaagctgctgatctacagcgcctacttcctgtacagcggcgtgcccagcagattcagcggaagcagaagcggcaccgacttcaccctgacaatatccagcctccagcctgaggacttcgccacctactactgccagcagtacagcagatacagccccgtgacctttggacagggcaccaaggtggaaatcaagagactcgaggacctgaagaacgtgttcccacctgaggtggccgtgttcgagcctagcgaggccgagatcagccacacccagaaagccaccctcgtgtgcctggctaccggcttctaccccgaccatgtggaactgtcttggtgggtcaacggcaaagaggtgcacagcggcgtgtctaccgacccccagccactgaaagaacagcccgccctgaacgacagccggtactgcctgagcagcagactgagagtgtccgccaccttctggcagaacccccggaaccacttcagatgccaggtgcagttctacggcctgagcgagaacgacgagtggacccaggacagagccaagcccgtgacccagatcgtgtctgccgaagcctggggcagagccgattgcggctttaccagcgagagctaccagcagggcgtgctgagcgccaccatcctgtacgagatcctgctgggcaaggccaccctgtacgccgtgctggtgtctgccctggtgctgatggctatggtcaagcggaaggacagccggggaagggccaagcgatctggatctggagcaacaaacttctcactactcaaacaagcaggtgacgtggaggagaatcccgggcctactagtatggactggatttggcgcatccttttccttgtcggcgctgctaccggcgcgcattccttcgaagaagttcagctggttgaaagtggtggcggcctggttcaacctggcggatctctgagactgagctgtgccgccagcggcttcaatgtgtacgcctctggaatgcactgggtccgacaggcccctggcaaaggacttgagtgggtcgccaaaatctaccccgacagcgactacacctattacgccgacagcgtgaagggcagattcaccatcagcgccgacaccagcaagaacaccgcctacctccagatgaactccctgagagccgaggacaccgccgtgtactactgtagcagagacagcagcttctactacgtgtacgctatggactactggggccagggcacactggtcacagtctcttctacgcgtatccagaaccctgatcctgccgtgtaccagctgcgggatagcaagagcagcgacaagagcgtgtgtctgttcaccgacttcgacagccagaccaacgtgtcccagagcaaggactccgacgtgtacatcaccgataagaccgtgctggacatgcggagcatggacttcaagagcaactccgccgtggcctggtccaacaagtccgatttcgcctgcgccaacgccttcaacaacagcattatccccgaggacacattcttcccaagccccgagagcagctgcgacgtgaagctggtggaaaagagcttcgagacagacaccaacctgaacttccagaacctgagcgtgatcggcttcagaatcctgctgctgaaagtggccggctttaacctgctgatgaccctgcggctgtggtccagc

SEQ ID NO: 39365 - DNA, 1893 bp, synthetic construct
  source 1..1893: mol_type = other DNA
atggccttaccagtgaccgccttgctcctgccgctggccttgctgctccacgccgccaggccggacatccagatgacacagagccctagcagcctgtctgccagcgtgggagacagagtgaccatcacctgtagagccagccaggacgtgaacacagccgtggcttggtatcagcagaagcctggcaaggcccctaagctgctgatctacagcgcctacttcctgtacagcggcgtgcccagcagattcagcggaagcagaagcggcaccgacttcaccctgacaatatccagcctccagcctgaggacttcgccacctactactgccagcagtacagcagatacagccccgtgacctttggacagggcaccaaggtggaaatcaagagactcgaggacaagcagctggacgccgacgtgtcccccaagcctaccatcttcctgccctctatcgccgagacaaagctccagaaggccggcacctacctgtgcctgctggaaaagttcttcccagatgtgattaagatccactggcaggaaaagaagtccaacaccatcctgggcagccaggaaggcaacaccatgaagaccaacgacacctacatgaagttcagctggctgaccgtgcccgagaagtccctggacaaagaacacagatgcatcgtgcggcacgaaaacaacaagaacggcgtggaccaggaaatcatcttcccacccatcaagaccgatgtgattacaatggaccccaaggacaactgctccaaggacgccaacgataccctgctgctccagctgaccaacaccagcgcctactacatgtacttgttgctgctgctgaagtccgtggtgtacttcgccatcatcacatgctgcctgctgcggagaaccgccttctgctgcaacggcgagaagtctagggccaagcgatctggatctggagcaacaaacttctcactactcaaacaagcaggtgacgtggaggagaatcccgggcctactagtatggactggatttggcgcatccttttccttgtcggcgctgctaccggcgcgcattccttcgaagaagttcagctggttgaaagtggtggcggcctggttcaacctggcggatctctgagactgagctgtgccgccagcggcttcaatgtgtacgcctctggaatgcactgggtccgacaggcccctggcaaaggacttgagtgggtcgccaaaatctaccccgacagcgactacacctattacgccgacagcgtgaagggcagattcaccatcagcgccgacaccagcaagaacaccgcctacctccagatgaactccctgagagccgaggacaccgccgtgtactactgtagcagagacagcagcttctactacgtgtacgctatggactactggggccagggcacactggtcacagtctcttctacgcgtagccagcctcacaccaagcccagcgtgttcgtgatgaagaacggcaccaacgtggcctgcctcgtgaaagagttctaccccaaggacatcaggatcaacctggtgtccagcaagaagatcaccgagttcgaccccgccatcgtgatctcccccagcggcaagtacaacgccgtgaagctggggaagtacgaggacagcaacagcgtgacctgctccgtgcagcacgacaacaagaccgtgcacagcaccgactttgaagtgaaaaccgactccaccgaccacgtgaagcccaaagagacagagaacaccaagcagcccagcaagagctgccacaagcccaaggccatcgtgcacaccgagaaagtgaacatgatgagcctgaccgtgctgggcctgcggatgctgttcgccaaaaccgtggccgtgaacttcctgctgaccgccaagctgttcttcctc
